United States Patent Application Publication US 2007/0054278 A1 - sequence listing, part 52

SEQ ID NO: 95011 - DNA, 106503 bp, Homo sapiens
  misc_feature (1)...(106503): n = A,T,C or G
ttcactgaacacacctcccaaattggctcctcctcctatattccccatttcagttaatggttacattacaccaaagcactagtctcctaatcaagaaacttaacacgctattctcaaatcctttctctcacatccacctcaaactgaccaccaaatcctaccctctttctctcctgcttcagtgttactgctctaatctgtgcttctgtggagctctattatatcatcttgtgatttttttttcctctgaggcagggtcttgctctgtcacccaggctggagtgcagtggcatgatcatagctcactgcaacctcaaactcctaggctcaagctattctccccactaaccctcatgaatagctaagactacaggcatgcaccaccatgcccagataatttttaaatttttaatggagatgagggctcactatgtctcccaggctggtctcgaactcctgctctcaagcagtcctcctgccttggcctcccaaagtgctaggattacaggcatgagccaccacacccggactcatcttgtgattatctatgtgtatttccccattgtcaattactggactcttcagaggctacaaccagattctattaatttttgtatccccagtacctagaagtgcctggcatggtaggtgttcaagaaggaaaggaaaggaagggactggaaattccacgccaatgggcaatcaagcactggctttacagtctgagtgggctatttggcattttcatgggacagaatggggagtagcagcagctgccaccctcaatattcattcattcatttactctgcctagatatttagcgagtgctgccaagatgcccaacactgtgctagaaactcatgatacataaaaggaggctgccagtctctgcttagaggagctcccattcaagggaaagacaggcatgtggtaggcactaacctggcatcttgggccatgtagtctgatctgaggaccttggccacccagctctgcagaggctacggagaaggggaagtgactcaggagaaggtagtggagacgggaaggtcagagaggccttggaaagggctctgcctctgggatcaactctgctgaggagtggttttatttatgtatttctcctttgtacaaattccttgcttgttaatgaaaatcatttgacacatttctaattagcctgcagcctctgcaatcctattattcccaaatgcaacacctgggttatttcatgatccctggtaacatttatggttcttgcagttgtccaccagaattggggtcattccttctgctacttctcatgggaccacaaaggactttctctcccccctcatcctggggcaggaaggtttggccctggctccatgacttggggaggaagcactggcaggggactccctacactggcccgccctgaccctaaacgaatcaccccctttgtctgtgctctagtcctgtactcatttctcaagtgcttggcttaagagagaagtgcattttttcatagagctacactgccttttctcctccttccctcttcctctcccttccttccatcaacaaataactatgcgatcgcattccaagggcttcagacaaacaaacaaacaaaaaaacaaatactacacactaacaagcatgtactatttgccactactataggcaccggggaaacagtggtaaggaaaatatacaagaaccccagtcctcttggaatttttactccagtggcagaaactaataagtaagaaaccagggttatcagacaagtaggaggaggaggattgacaataagaaaactgccaagttcctttcaaagagctaagtcctttcctccatctataatggtttatagaaactaccttataaatatcttttccttagagacgattggtgcattgagtgcgctcagctggcagtgggcagcgcatgctccactttatgctggcacctccgtgggcatcagtctcctcccctgtggaagggggatgattgcgccttcctcacagggtcgttatgagtattctgagatcgtgtatcagcacattgcctgttgcttggtaacatacattctgtccaccatccctgccttctttcctgcttagagcagacatgggccagtaagggtatccaatcaggtcccttccctaccttctgggccctgctgctgtggacagagcaagagcttctgagctggcccagcacctcaaatgggaggctggggccctgctctgtgcctctcccctgccttgcctccagcctgctcagcagaggctctggaagatgcagccacccacccacgggcaggacagtctatgactgctggacattagccatggccaaagaggctggcatcaggtctgttcttggcagcaatagtgagcagtccctttcaggaggcccctttcacctccagcagccagcaacagcctgcaggagagagcccctggggggtgcttatgaggcactggattttacatgactttatttcatcctatctttcccaacaaagttgtgaggtaagagctgtcagtgccccattttgcagttgaggaaactgaggttaagaatttgcccaaaccactctcttaatttgtgacaggatcagcattcaagttcaggttgtccaattccagagccagggccttacactgagctgtaccctttccccctcggttatccactcctccacaacccccacaccaaaggcccagaggcagagagctccctggggcatctgggagccccaggggcatgtggaactttgcccagcttaccctgagtgctggctttgacagctttaaaacaatatgaactgtgcctaagagaaatcctgaaaaggaggaaatgcaagttcaaagtggcacagttggtgagacccccccaccccaggacatcttatatccctccttttatggatgagaaaacggagaactgtgggcagggaaagtgagactcctgcatacagaaattcagaccacactgcagatttcccagtggcctcagaagccctgtactcgtacccagacacaagcgttgaaaatggcacaggacttaaaccgagcttcaccacttacttgctgtaggattccaggcaagttgagtagccgttgagcttcagtgtcatcatctgcagttggggatatgatcatccttagctcagggttgtaggggctttagagacagtataggtgacagtacctggtaggtactgagtaaactgcagctattatgatgactcttgttttcacagttcaaagtatgtgaagaaacagtgaattccttaggtgttgctttgattctgtgatgctgctggagtccattcctagtaccagagaggaaacaacactcattgtcatttctgagcattgaaacctatcccagggagggccagttctgcacccacttgggattacaatctgaaacgaagaccacagactgtagccaaggtggcaattcctggtctttagctctgccagagtgcctatggcttcaggcacattactccacctctgtctatgtggaattcctgtcagtcaaatgagcatggcaattacttgctgtcttacccccaccccacccccatcatcccccagggaagtgcccaactaaggaacaactgtggtgaagtcatctagagaggctacgcttcacttctgtgcagtctttctggtggtgggggccaagcaaaccttctctcagggacagaactaccaggagtgaccatttggggcagatatatagcatcctcaccactgagccctgggcagtaagtggtgagatgtgagaaaccctgccacattccagcccatcccacccctccctccttccccccatggagccttccttttggagtcaccagaagccccaactgtctggtttcagtcagcatggtccagcttcatccccgtgccgaggggtgagtttggagccttttaccaggaggtgataggtgatgtgatgtcttcgaatcccacatccaaaggcaactagagatgcacagaccaggctgggatgaggggagcagcctatgacaacagggctactccccaagttttcacctggctcacctgagagatgtgtgaaaatgggggcaccaggagggtagttcccttacattttcttggttgacctgagaggcctgtggagcctgattcccaaggagcaaggtctttcctggcctcccacaaatggcaccgctggatctgccccatgattcctgcggaaaccagatggaggtttggcagtggttttctccatctatgcaaacaagccctggcccctggcgcagtcttattaaactccccaggggagagagacctgggagagcatctggcgtctccagactcctgcccctgttgtgactgccacaccttatgcctgaaattccctgctacttgtgtagaccctttgtgaggccctctttgtgcattctcttctttctaggtcccattcctgcgtgggtcacttttggacttgtctaagtgtcatcgtaattagtcttctgagtgaggatatcgtattgcagtaatgaccctgggttttcctcagcaaaaacccaactagggtttcttcacctcaacagaaatgtattgagcatctattatatgtgcggttcagtctcgagtgctggagaaatggagaaaagccacctgattttacttctatctgtcagggtggtgctcatgggatgcttgtgggggggcatgatgctgtgacttcagtttgcctgattccccagatggcttcatttagaggctggaccctatgtgggtcttcggagtagccatggtgtccagcagtgccagcaggaagcagactcctcaacaactctgccccggcattcaaggacctcctgagttcagactcacccagcctggccaacctcaactcctatcaaatcctaggccccctgcaacgcctggcagctctctctcttgaacacatcaagctcttccatcctctggatttttgcaaggcctatttctgcagtctctcccctgtcctcacctcccccttccttacctcttaagtgattcatccacctttctgagagctttcccaaaggccaccttacaataaattatttcttcctctgttggatccctactttgttgttacacatctattcattgagcgctctgtgcccgacactgtgctggtttcctaaaactcatccaagcctcttgctttctgcctggagtgaagagtagttcacgttctgattctcagtgcctctagggctggagcggaatcttaatgtctgtgtcctcgtctctcaccaccgcgttttgcactttgtcgaaaggtgtcagatggtgagatggcttctagactgggctctgcccactaattagctgtgtggccttgggagaatcatccggcctctcttgctgcccttctttccgatgaaataatgctgacgatgatatttcagggttgtccaggggtcaatgaggcgggatagagggargcatcgtgaaatctgggagccccaggccagcgaaaaatgtggaagggccgtacccgcactctcctagcactgggtgtgaggcagcgtcgtttccccttcgcgctcttcgaatgtcaagtgcaccagcttccaatccctcctctgggcgggcccggtctggctaatctcagctgcagattccagtacaaactcaggactctcccccgcccagccgcccctacacaaggactcgccgaacacaccttgaatcccgcgccagagcgcagcccggaactgcagctcgcggcgcgggcccaggtcgggggtcgcgcgtctccagtcggtgactcaaggccgctcggtccgggggtgggtgtgggtcggcaggaccgaccagggccgcgcgggggcagctgccgggcgttcggtcacctagcggtgggagccgaggctggctttggccagtcgccattccgccgcgggcgtctgtctcgccgggttcccgggcgcgggaggaaggcccgcgccgcttcccactcggcgcgcttctctcccagtgcgcagtggcctggtgggtcagccggcggcggctggagcgcggggccggccctgcgcacgaatgaatgggcgcccgggggacgcgcgcgctcggggctgaagggcattaggaccgtgaggatcgctccgcgatcctgtctctccctatcacccccccgcccccccacctctctcctttttctgctctgcaggactgagcagctaggcgcgagcgaaaacaaacagctggggctgcgagcgcccccgccccggccccgagagcacgccggcccagtcccccacctggggcgcccgtctgcccaccatgaggaagatccgcgccaatgccatcgccatcctgaccgtagcctggatcctgggcactttctactacttatggcaggacaaccgagcccacgcagcatcctccggcggccggggcgcgcagagggcaggcaggaggtcggagcagctccgcgaggaccgcaccatcccgctcattgtgagtacgccccgagcgtcggccggccggctagggagccgcggcgcgcgtccagaccctgcgcggcggccgagggcgcggggcccggccagggctgagtgcccgctgcgccgggccggctttgtatatgttggagcattcctgcccgttgttatggcaacctctgccgggcggcggggctggggcgcaccgactaagggagggtgacagagggtgggggctgggagaaagtgctgcaagtttggtgggcccggcgtgcgcgcgcggctgggaacgtggcggctctcccggctctgcgctgccggggccgggagtctgggggctgcgggagcctcgtgtgccccggaaggctgccgggcccagcgcgcggcgagcgggcggtgggaaccactcgcagccgagcgcgtaggtggcagtgcgcagcccctctccagccttctgggggcagaggacatcgggtgggggcgtgggtaggggaaggctctctaggcgctgcgcctggcttcgaacccccttctgagccgggtcaacttgaacccgcttcttcggcgcggacacccagcttccccggagttctctgggttgaggagaggtctcgcactgtacgcgtctctcactcccaaccttagggtccgccaccacgggtaggtgggcagtgtcagcgcccgaacttggcgatacccttgcatgaagtcagcctcgcgacatctaagcgggcagggaaacaaaggcagtgtggcacagcgggggcggcggcggggctgcgggggcccttggcgctctggggacccgggcgggggcgtgcggagccgcagccgccctgcagggggcgatcctgtcgccgtctccgtccgagccccaggtgacagagctgtgcgtggccaggcaggggcacctgttgaggcgggaggctttggcacccgccgagagtgcgctcgagcgggcgcattcttccagacgggggcggttggtggacgagagcctcggacgaccctcgggaactaccagggcggggcagcctggccggatgaggaccaggaagaggagagccgagtggggcgggggtaaaggagtgaggaagcgtggcgattccgacaaggaaagatctgggcctgggggtggaggggtgaggagatccgcgggggaggtgcaaggtccggagggctgaggcttgtgtggagccgaatccgagaaacgcatccagacgcggatctgaaccccaggaatatcgggaagttcattggagagtgtcccctcatattcccatcctgccccagattccgagtcccctgcaaaggaaacattatttcagggctttgcctgaggagacctggggcgggggggtgaggttgtgggttttgtcctagataccagtctgggtgaactctctgggggcaagcctgattaggtgcactgttcccttctgggctgttctcccaggacactgtttccaaagcacttgtcgccctttggacagaaaactgataaggaaaagcctcctgtgctgaggccccagagtgttgtgatctgagcagagggacaggttggagctggaactgtccaaaccagcagtggcctccagaccccagggagcttcctctccaggagcccaggctgccacattcatactcagtggcaggaagagccctagtctcaggcaaggcaggctggccagatgctctgtccctctttctggtgaggcgatgagaagagggtctgagttggaaggggcggagaaagaggctgggcagggaggagaggagggaagagagcacaggagactgctgctcagagcctctgctttggaacccggaacctgaaccctgacctggcccatgcacctctctcctgctccttccagagtcctgtaagatgcactgggagggccgctcacatttctcaagagtcccagaatggtgtaggggacctgctggaaggattcagcactcattttgaggggtgggaattggaggtcatgagaatcaccagtaaacatcctcttgtccctgcttattcccacagggtttgacttgctgcaggtaagaaaaggtctcagagcgggaagctaagtttaaagtatgaaggagtatcagggagatacctgggagctgggaagtgaaggtgcaggaagaaagggagaatggaagtccctgggagtggcagagccttctgtggccacttaggggcacagccagctccctctttgttcttaagctttagatgcctgttccaccagcactgacccccccrtcaggcaccacttttgacaactgccttgcattgtttcattgtattcctctcttccagttatttcttccatgtgatttgcagctgaatgtaagtgatgcatgcgggaactgtgctggaagctccttgcatccccacattgatgcacacagcaagatttctttttttctttttttttttttgagatggagtctcactctgtcacccaggctggagtgaggtggcatgatctcggctcactgtaacctccacctcccgggttcaagcgattctcatgcctcagcctctcgagcagctgggattacaggcatgcgccaccactctcagctaatttttgtatttttagtagagatggggtttcatcatgttgcccaggctggtctcaaactcctgacctcatgtgatccattcacctcagcctcctaaagtgcacagcaaggcttcttaaaggagtgaaataggattctcacccatttctgggggcagtcaatgcttcacatccccctaatattattgtattatattcatatctccttaatattttattatcaactgtaacctctaagtaaggaggtggctctaagtaaggaggtgggggatgtacgttcaagcttctgcaggcattgaatgctttgttcaacttaaaaggggcaggtgcagctgaggatttactttctccctgcaatttgtggtaaccgcttattcagaaacatttctctgtctagttgggccaggatgctgcatgtggattttcagattcttagagaatgatgtggctagccctgctgtcagaggctggcaaattcagacaggcgtcatcattgctcccttggggaatcagagagctgagctgggaaagggagggtctgcagaagcgcctggacctggaggcagctctgctttcacaatgtctggactatttgaagccagccaagttgcttctggaccttggagatgcctgtttggcattacagggtgtcggcatggcaaccgtatggccagatttctcaagaaggtcctgatttttaatattctgtcctgctgtcggcccaagtgtcaccaattttgatgtgaaaaatttggctatggaatctgtaaagctaaagggagatactgattccatccctatatggctgcttacgatgcggcaaggtttgtgatttttccatgctgtacccgatgcagcgaggcagtagatttggggacatccccttgaatctacactgatgcacgctgggacaggacagcagccaaactgggaggcagggctgacacagccggccttgagtcttcagtcctcacagttggcgagaacatttgtggttgttttggtttgggacttaggttttccatatgccagttcactaacaggcatgggtgggaggctaaggtgttatatggaatttcactttacattttttaaaaagactactcattttcggtataggtgcactcatttgtgtcaacagtctcctatttagaactgtgaaagatttaggcaagaatttcttaaaccggagtttcttagcctgaaattgggatactactgaatgaccatggacacaatacttaacatctctggaccttggttattttgtcggctgaaattgagttaaatgatttgcaaggtttgttgatcctgagataagcagatgatagctccatttctagatgtaaatacatggctttaagggggagttctcctgaaaggtgttgtgaagtttctgcttatggaggaacatgctcctgtcagtggaaggtcccacaggaacccttgaggcctcgcaggaagcccccacttacctagcagaaggggatgcaaatgatggcttttctggtagtgttctcagagagcggatgctttaataagatctaaaataatttatattttatttataatgtgtgcattttggaactgtgggaatatgatttgcctaaatataataacagaaagtgattttgtatttaattggtttaggtaccacacttgagaaagagagtgaggaggaagaagcacaaacacccacaattccctttgtcaaaatgttcagatttttttcttttctttcttttctttttttattttctcttttctttttctttctttttttttttggacacagggtctcactctgtcacccaggctggagtgcagtggcacagtcatgattcactgcaaccttcacctcctgggctcaagcgattcccctgcctcagcatcctgaatagctaggactacaagtgtgtgccaccacacctggttgatttttatatatttttgtagagacagggtctttccatgttgtccaggttggtctcaaacttctggactcaaggggatcctcccaccttggcctcccaaagtgctgggattacaggcgtgagccactgcgcccagccaaaaatgttcagatataaagggcctgatttcctgtcaatggggtctgttcctgggccatttcgagacctgcctctgggacatggggtcagcccagagggaactaagactgggggtggggaggagggctggcagcccgagagttaccttcctggaaggccagaggtccaagggcacgggactagctttagggtgctgctcatgcttctgcaggtcttttatttctgtgctgtaacagcaatttacccccgagctgctccgagatctttgggagcatggctttcttccmtggtggctgtgtttgtccttgctgcaggcagaggaaacccttggctctggaaatgccatttaaggtagaggtaggaggacactggtagaccagggccaggctgagttgcccacgggactgtctcactgtaatggaggaagcttctctgaggtcagaggggagcctatagccaagccttcattacagttacaagattgaagatttataccctgtctgcttcttgaggagaccttaagcaccttccccatgaacagcagagcaaagacacaggaggctaaacagacgtggaaaggagcagaggagccgagctttcagacatgagttaactgctgattatacttgggcagtaaattcagttcagttaatcagtgtgcttgcctggtacagtcaccgactgtgtgtagcccactctgaaaacggtgtcaagtggtttagtccctcttctctgaaatcttgtggtctttgacccgtacctgtctagcctccataatcactgtatactctgttatgttgatggtgatgacattcgttggagacctggatgctgtgtgttttacaggcttacctctctgaatcccctcaacaacctaatgagataggtaccattgttaagttctcatacgagtaaacacgcttactcatgctctgacaactagtaagtgcacccgacactaggtgtttctcactccaaagcccaggctcatgtcttccttcccctggagcatcttctggtcaagatccaagcctggtctatcagcacatcttttctggggcacctgaatcagcaccttgctttgtattcgctccacaaacattcgatggggaaaaaaatgcaaaaacgatacagaacaaaatgttggcagtagggaggtaggattatgggcaatccctccttccatcttttgggtttttacccccaaattttctgtaataagcatccattgacatgataatgttcaaaccaataaggataattatttttaaaacatatttggtgactggttaagatcactcttgactccaaaatcaaagtataaccttcttaaccacatctcacacttctgactccccatcaaaacttagcattgagccaactttcagaaaaggcaagagacttatttgaattattctgtagggttccaaggaatagaattgaggccaggaggtgaaagatgcagggagagaaatttctttgcagcagaaggaaaacattctcacagaaccatccaacatgggagcagtccaaaggctggccagggtttctctccacactccccgttggcccataagtgctcccaacagcagcaggaaagggagaaaaaagactctctgtcatgaaatagggcccaattattgcactgcaagagccctgcaccctgggaagtaggcgggccccatgcactgaggccagcccaggacagggtaacgaccagaaatccataactgctgctgtgctcctctctcccctgttcctttggagctgccaagcaaggacagagagaggaagccaaggctggtcagagacaaagctgcaaagttggaggtgctggtctttagcatctttcctctcccaagaccgaggcctgcataggtgtttctgcctggtggaggcaccttgagtctgaccttcccatattccacttctattttcccaatccaacccaggtgtgatttccaggttacctgtcctgtctcccagacccctgactgttgctgcctggggcggcgctggctggcagtgcccctgagctgtgtgcttatggagaagccacagccctggcctgcctgtctccccacacccctaaacttcagatgcgcctttgaactgtatctggctagagacagtatggtcacccagggaacttytgtgaacatttcagaccagataggagtggcaggccagaggtactttgggaaagagggggcgactggaagaagcttgtcgatcatattatataggcaagataaggctcaggcaaaatttgaggaggcattgaggcaggtctgcccaggtatagcctttccacttttccagacccattaggaacaacttcacgtttcgctgaagagcacaagctcctctttcttgctgtttcataaagtgaggtgtggctctgtgtagagcagggatgactttgtctcagagttcagaggtgagtgacatgccttaatgtgaattgkgctgttgcaggattttcctggcccctaggtgggccaggcagagtggagtggcccaggatggaaacagatgttggctgtcagcaggggatggagagagggaatggagagaggatgtgaatgaagtccaagtgatcccacttctaggctcagccctgccctcaagggactgtgtttccttaggtgagtcagtcccactcsctggaccttagtttcctcatctgtcaggtgagggttgaactacaggatctcggcggtccctatcagctgaaataatcttggactttgttgaacttctcccgcgaaagtgaggtggccttcagccagggcttaagtcctgatagtgcttgaattaaggagaataagaccagagggtgaggtgtacagagacctcgaccacatgtattaagaagggctgtaacctttaaattctcataaggaataaactggccctcatccttcccctttctcttcccttgaaacattgtctgatggagctacgctgctccctgcccgctgtactagaagcctaagatatttgtgagtgtgtctgagaatgcacacaggcatgtatgcagaagtgtctacaggtggacttcagatacctcaacaatctaggaagaccagaaggaagctacaaagacccctttgcagagcataaatagccacaacacccatggactttactcagaagacaggcatggaattgcccataggccacagtctggaaattaacattgtttataaaaactggtttcagtagttcagggggttggtcatctcctggcaactttcagttttcctaggttacaaatatagtagattggatgaagcaagatgagggaattgctaggagctgctgacacactgagaagtgacagctgatagcaaaggcctagccaggaagggccgtgtgaggtaggaggggcccctcctgcctccacacacacacagggtccgaatgctgaaggcagcatctattcattctcttgacaattatttactgagcatgtactatgtgccaggactgttacaggcctggaaataacaaaccaggtaaaatccaagctctcaaggggctcatattctagtggggagagggagaaaataaacagaaagatatattaggtggtggcaaatactatgaaagtaaagcagcataagggagcagaaagatgggaaaaggatggccaggaaaggcctctggtaagacttcattggagatggcattggcatgcaaagagagagtgagccatgcggacatctagggagacagtgttccagacagcctgggccagggcaccatcccggagagtgtgtgcttagaggggcagctggagcagcaggaaaagtgcccacagcagaggccagacacgttaggccttgcaggctgtggtaaagataggctcagaaatctgtccctgaatcatcaggaagtgataaattccactcggtgcacaggctggtaagtcagggaactgtgtcattcatttcagaacattttccagcaagatggtcaaatttagttgttagtgttggttcttttttctttttttaagatttttttccctctcaggataatgtgtgtgtataaaagcgttggttcctaaggaggtaagtgtaggttcgttggaaaatgttctgtgtcttggaacacttcatttccttaaaatgtgggatcaatgtgtgttgtgtgtggtatgtgtggtgtgtggtgtctgtggtatgtgtatgtgtagtgtgtatgttgtgttgtatgggtatgtatagaacgtgtgatgtatgatatatggggcgcacgtgtgtgtgtgtggtgtagtgtgtgttgtgtgtggtatgtgtatgtgtggtatgtctggtgtgtgtgtgatgtgtggggtttgtgtatgtgtgtgtagtatgtgatgtgtgtgtgtggcatttgtgtgtgtgtgatgtgtggggcttatgtgtgtgtgatgtgtgtgatgtgaggtttgtgtgtatatagtgtgtgtgtgtgatttgtggggtttgtatgtatgtgtgttatatgttgtgtgtgtgtggtatgtgtggtgtgtatatgatgtgtggggtttgtgtgtgtgtagtgtgtgtgtgatgtggggtttgtgtgtatgtagtgtgtgtgtgatgtgtggggttcgtgtatgtctgtgtggtgtgtgagatgtggggttcctgtgtatgtagtatgtgtgtgtgtgtctgtgtgcatttgtgtgtttgtgtgtgtgtgtgtatgatgtatgtgtcgggggtgtagtgtgtgatgtgaggctggtggagggtgccggtgcctgaagcgatgtaaaagggaaaaggtaacggagcccttgttgaaatattggagtgggcaggctggggaggactctgtctggagggagagttttgtgtgggatggagaattcctctgaatggtggtacctgatcaagcccgcctttgtctccttgtctggttcgtggtgttctcttctggtacagttgggactctggaaattgttttctggcaatgcaggaacttggaatccctgcccctccccacagcttctcctctgttcaagcagaccccctggaggctgaagcctgtcggggccttccctaagacacagagtaggcactcgtgcggggagtagtcactgctgggcaggagtgggcactgcgcagctgtttctcgggcaggtggttgataaaaggggctgccctcaggaggcagacggctctgcccggcccatctgaggtgtgtcctctgaggttcgatggctccctcagtgcccaggtgactggtatgacacagtgtcgtgtgtctctggcaagctgcaggcaccttttttctgtggtttaggtcacacacaattccaatcccctggcagtcgtgccctgtgagatgcttcttgtcaaagttcagattttcatcccttcatcttctcacagcagctctgcctgtagcttctttaaacaaactgtatgggagggcttctgatatttcaaggtctttcatgtcaagggaagctggccttgggctgccacagcccactggggcaacccgagttgccttccaaagttgctggatcagcggtccgttccagggggcttcacttctgacgcctcacacatctgtgacctgattatttccttggaagtcatcttttcctctccctgtggaagttctcactggatagggagatgcggggcatgtggcaggcttggggcattatcccagggatgaggggaagtgcagcctggggctcagggagaaagaacacgtgatcgcctagtgatgtcttgctggggatctggtggtttgaaggggcgaagcagttaggactgagcacagcccccacaaataccgcaccaacctagaggccggatgaagaaggagaaccaaaggtcagggcaaacacaccgcagggaccagggaaggcaagggagcagcaggccaaagcacttctccaagtggaaagcagaggctacccacggtgatgtgtgagtgcagtcttggtggtgccttgcgggggcatgaacatggcaagggccttctcccaaaacaacaacgggacatggctcatcgctggatgcaccccggaattgccaactccagttgttttttgtatagcagagaacacagcgtcacccaactacctcttccagacaatgcagcatccctgaaccacaccggggccggggctctggaactgggactcacagcggggtgaggatgggctagctcaagacctatggaacttgggagatcagaaggccagcgctggggcaaagctgarggcaggccaaccagagagcccaagaaagggccctggcagagaggaaaactggkcataaggtgacaggtctgagcgagagtgctcagaggagccggcccctgggatccccgaagccaagctgagtcacaggagctctgatgggaggctggcatctgcccaaggctggggagagccctcctcatcacagggtccagactgtgctcaccagtgcagtggttgccggccacaggtggccaccgagtgcttggaatgtggttagtgcaactgaggaactgaatttttcattttatttgattctcattgatttaagttttgaaacaacactcattttagttgtggggaaacatttgggaatgtttagaacttcggtatgtggaatctatattttcaactgtaaatttttgtgaaatctcaatacagatcaagtatctgtgctgaaaatttagtatctgaattgaaatctgctgtaaaatatatatcggatttcacagacttagaaaaagaactaaaataccttgctagtattttgtacatgttgaaatgatatttggatatattaggtgaaataacattattaaagttaatttcgtctgtttctttttatttaatgtggctactagaaaattttaacttgcatacatggcttgcagtctgtttccactgggcagtgctggtgctcacattcattcacatcccctctcttaagtgctaggagggaccaggtgctgtggctcgtgcctgtaatcccrgcattttgggaggctgaggaggggagatcatctgaggtcaggagttcaagaccagcctggctaacatggtgaaaccccatctctactaaaaatacaaaaaaattaaccgggcctggtggcatgcacttgtaatcccagctactcaggaaggggaggcacaagaattgcttgaacctggaaggtggagtttgcagtgagccaagatcgygccactgcactccagcctgggtgacagagcaagactctgtcataaataaataaataaataaatacataaataaaaagtgctaggaggttgtccaaggaaggttatacagtcatgtgctgcaacaatgttttggtcaaccagggactacatatatgacagtggtcccatcagattataatggaactgaaatattcctcccctactgaccctgtagccactgtaatgttgcagcacaattactttattttaaaaaataaatttagtgtagactacatgtacagtgtttataaagtcgtgtaacatcctaggccttcccattcactcatcaygcactcactgactcacccagagcaattcccagtcctgcaagctccattcatggtatgtgccctatacaagtctaccattttttatcttctatactgtatttttactctactttttatacrtttagatacgtacacatgtgaaaatacttattgtgttaccatcgcctaccattcaggacagtaatatgctgtacaggtttatagcctaggagcaatagggtatcccatatagcctagttgtgctggaggttataccatctaggtttgtgtaagtgcactctgacatttgcacagtgatgaacttgcctaatgacgcatttctcagaatggataaggaatgcatgactgtatacaaagtgaagaatctggctacgcatcctagtttaccttgacttcaggattagatctttccagtccagctgctgctgagctattggttcctaattcaccattatccgtgagcatgggatacctcccagcatgggctctagtcctcatatcatcattaaaaacaaggtcaatattttktgcagtgtcttctcttttagaaatcccttctaagctcttgctgtgatgaaaatgggttttggaggaggggtaggagcagtggaggcgagaagccttttactcccctggaaggtagagggattatttccagtctgttgcttttggtgtttcgtctttgtcctgttacagccagaatgacaagtaggtctcagctctaatgccaactcagaacttgtggaagtggcagcctggagcactgtggtgaggattctggagctgcctccaggctgagcgggaaagaggctatgatcgattagccatgtctgtaaagggcttggaaagggaccctaggacatgcaccttgtatttactaatcctgcattaggtgaggttgtcttcttggagtgatttttctccactttagagatctgacatgctttaagacatcagccactttgaagaagcagggatgaggcttacactgagccagaacatgtgcagaagagacattctcatctccttgggccagaatcctagctaaggagatgtgtgacattttagtaagcattcctgtcaggaaagtctcaatacccacttcacatatttggtgkaggtgagcttggctctggtctgggctcagcctactggcaagataggacatagttagagccgtaaacccaagaagagtaggaatctgcagggtctggaagaaatgggaggggttggctctttttctgtctttcctcttctttgcttaaaaacaggagctgtggatttgagaacatgtcttgcttcttggtgctaaatttctgatgatggctttgttcaggatgcagcatagcgtagtggttatgggcacagacattgcagccaaagtgtcagggttcatattctagttctgccacttactagcaagttacttaagcattccatgcctctggtttctcatctggaaaatgaggatgctagtaatccgcgttttagagggttgctctgaagattgagttaattcacatcaagagtttaggttaattcacatcaagagtttagaattctgcctaactcgtagtaaatgctatacaagcattagtatacaaattgttacacaaattagtatgcaaacttgtaatatgttattatttgttaatttgtatattagttatctaattctgcataacaaatcaccccaaaacttaatgacttaaaacaataattatttattctctctcattgggtcaaggaatttgggagtggcttggctaaatggttctgggttttctcatgtggttgcaaacagatgtcagccagggctattgttatctaaaggactgaaggtgtttctctcatattgttggcaagttggcattggctgttggcaaaagacctcagttctccacgtgggtctccacaggcctcctgtgggaggccttcgtagtaatgcatcttaatagtatggtggttggcttcccccagagcaagcaatctgggagaccaaggcaaatattgccaagccttgtatatgtgtgatgcagccttggaaatctcataaacagaagagtagtaagattttgagagactgctgcggctgctggtttgagaatagactggaggacggcagggatagaagcactttttgactgtccagcttgttctggtactttcccccttgaccagaacagcaggcctgagctgaatgttactgtcctcattttacacatcagaacctgactcagagatggcaggttacttgccaacagagccaggattctaccagggctgcccggcttcaaagccatggacacacttacttgtcaggatacccaccacctgatggcacagcttacaaggggaaaacagattctgtgaaggatcttagttcccttatctcttcaagtcaggatggggagcttcagagggcagagaggtactcatggatcagacaaaggattggaacgagaaaggggtgaccatagcaggtgccatagctgtgggaagatagagggactggggcagagtttggaaggtcttagggactagaagggtgcagcctggggagagcccctgcaattggcttagcctctccaaagtagaacccctgaggtcagggaaattcttggtgttatttattataccctagagagctctatgcaaagggagcaggaccacccacttgggatggagtaccttgcaggagtaaaataaatgaaattgatcagtatatatatatatcagtatgaaaggagctgaaaaatatgatgttagggaggaaaagaactgcattgcagaattgatgatttagtatgataccatttatgtaaattaaaataatacaaaacaattccatatatcatccttgggtgtgtctatgtgtgtgtgtgcgcatgcgcacatatacatctcaaagtataaaagtggaactggccaggcacacttgctcatacctgtaatcccagcacttggggagactgaggcaggaggactggttgagcttaggagtttgagaccagcttgggtaacatagtaagcctctgtctctacaaaaatttgtttttaattagccaggcatggtggcatgcaccgagtagtcccagctactctggaggctgaagtgggaagattgcttgagtctgggaggtcatgaggctgcagtgagctatgatcatgccactgcactccagactgggctataaagtgagacatgtattagtccgttttcacgctgctgataaaggcatacctgagactgggcaatttacaaaagaaagaggtttatttggacttacagttctacatggctggggaagcctcacaatcatggcagaggatgaaaggcagtggcaagagagaatgaggaggaagcaaaagtggagacccctgataaagccatcagatctcgtgagacttattcactatcacaagaatagcacgggaaagatgattcagttacccacattgattcagttacctcccattgggtccctcccacagcatgtggraactctgagagatacaattgaagatgagatttgggtggggacacagccaaatcatatcatctgtttccaaaaaaagaaaaaaaaagaagaccaaagaagatacacagcgcacttatgacagtgagtgtcctggagaaggatgggagagaggatcaaaagagagtgtgactttatctgtaatgttttgtttctgttgtttttgtggttttgtttgtttgcttcagtttttttataagaaagaagcttggaggctgggtgcggtggcgcacgcctgtaatcccagcactttgggaggccgaggtgggcrgatcacgaggtcaggagatcgagaccatcctggccaacatggtgaagccctgtctctgccaaaaatacaaaaattagctgggtgtggtggtgtgcgcctgtaatcccagctactcaggaggctgaggcaggagaatcgcttgtacccaggaggtggaggttgcagtgagccgagatcacgccactgcactccagcctgggcaacagagtgagactctatctcaaaaaaaaaaaaagaaagaaagaagcttgaagcaaatctaacaaaatataaacagttgttaattctggtggcagtgcaagtaatagtattctttgtctttgtcctttttggaataaaaaaactctgattttaaagcatgtttaaagtaaaaggaaagagcgagcttgtgacttaaggttgctggatctcagctgattgagaaggagggtgcagtggaggactgaaggcaaaatgcctgttcccccaagcctgtcacgcacgtggcactgtggtcacttgcctggaggacaatcaaagtgattctcgattcttctgaacctgaagatcaaccctgatggactggcattgaaggcactggtcatggagaaaggacttccctgctgagagccaaggcaagagagacgagatcccaggacctgcaggccaatctgtaaaagggctgaatagtcaaaatgggtgtgtcttcatgaaggacaaatgacaaattcttttgatagaaaggtatgagatcaaagacaaaaagcctttattattatattttctcctttttttattattatgctttaagttctagggtacatgtgcacaacgtgcaggctcgtcacatatgtatacatgtgccatgttggtgtgctgcacccgttaactcgtcatttacattaggtatatctcctaatgctatccctccctgctccccgccaccccatgacaggccccggtgtgtgatgttccccatcctgtgtccaagtgttctcattgttcagttcccacctatgagtgagagcatgcagtgtttggttttctgtccttacaatagtttgctcagaatgatggtttccagcttcatccatgtccctacaaaggacataaactcatccttttttatggctgcatagtattccatggtgtatgtgtgccacattttcttaatccagtctatcattgttggacatttgggttggttccaagtctttgctattgtgattagtgccacaataaacatacgtgtgcatgtgtctttatagcagcatgatttataatcctttgggtatatacccagtaatgggatggctgggtcaaatggtatttctagttctagatccttggggaattgccccactgtcttccacaatggttgaactagtttacagtcccatcaacagtgtaaaagtgttcctatttctccacatcctctccagcacctgttgtttcctgactttttaatgatcgccattctaacatttatgcagccaacagacacatgaaaaaatgctcatcatcactggccatcagagaaatgcaaatcaaaaccacaatgaaataccatctttttttttttttttttagagacaagccctccctctgtgacccaggctggagtgctgtggtgctatcaaagctcactataacctccaactcctgggctcaagtatctacccacctcagcctcagcctgtagctaggactacaggtgcacaccaccatgcccggctaatttttaaatgttttggaaagacggggtctcactatgttacccaggctggtcttgaactcctaggctcaagcaggccttccactttggcctcccaaagtcctaggattacaggcgtgagccaccacactggtcatattctgtccctttagacataatatgtgtttaatttacaaggcaggaaatcaaaaggaaggaaataaaaatcaccccaaatcctaccattcagggttactgctattaatgttttggcaaataattgattcagatcttttttgattgatttttaaaaaaaggaaattatagattctatactgtttgtaacttgttctttttatttaacactatatcacgaatactcttctgtatcataatcttcttccaaatatttttaaatgtctgtctaggatttcrttgttgtctactgttccatagactatataatcacagttcataaatgatgaatgtttagattaggttggactatataatgttgtattttaggtaaaaaattgtcaaattggcagtttcgtatggtctaaccaaatgtgttgtccgtgtttcatagttataaacaacacagtgagcattcctgaaggcaaatctttgcacatagcattgattaattccttagataaatacctcaaaataaattgttgaacaaaagatcaaatttcaaataaagacaggatctgacagggctggaattagggtgaggcaaattatctatgcacagagccagatcctgtctttaccttaattttttttttttttttgagacaaagtctcactcttgtcrccgaggctggggtgcagtggcacagtatcagctcactgcaacctccgcttcccaggttcaagcgattctccggcctcagcctcccaagtagctgggattacaggcgctcgccaccactcctggctaatttttgtatttttagtagtgatggggtttcaccatgttggccaggctggtctcgaaatcctgacctcaggtgatctgcccaccttggcctcccaaagtgctgagattacaggcgtgagccaccacgcctggccatttatcttaaattttaatattttgttcattaagaattttttgcattaattttgatttttaaaaatacttcattaaaatattacttaccttgattactgagttttggggggtccctttacatttgcacctgaggtgagtgcctcacttgtcttaccctgaaggtaacgatagcactaccttttagagttgttaagatgagacaatcttttgtaaatctcagaacattgtccacagtaagtgtgttcaataaatgttatgtagatctccactgaaaaagcattggttttcttgtgtgcaacgagcactaagctagaagctggtttacaaggataagtaagacccagttcctgccctcaagttgctcagccctgtaagggactgagtgggtgtgggaarggctgtggggrccgtgtcagggcgtatgccgagtatagcacagtcttggacagcttcactgagggctgaatctttgaagatgagcrtgtgcttggtggacacaggaaggaacatcaggtgaggggtgtggcaaaggcttggcgtagtaaccccaattccatcttgtagggtcatctcatgggattgtagcctgaatggagggggcctaggccaagaaataagactgggctgttgggggaagagactgcaacttcaccctgaagctggtacttattctgttcccaagccacacagactacaggagagcccagcctagaataacctactcatgttccctatgcaacagaaataatggtgcctggtattgatttatttttcytatttttaaaattttgtattgtagtraaatacatataagataaactttaccatcttaaccatttttaaatgtacaattcaatggcattaaagacattcacattgttgtgtgaccatcactaccattcatctacagagctctttcatcttcccaaactcaaagtctaygcccattaaacactaactccccatttcccctctccctagcccttggaggctactatcctactttctgtctctatgactgtgactactctaggtacctcatataagtggaatcctgtaagtggtgtcttttgtgatggctcatttcattcagtgtagtgttctcagtgttcatccatgttgtagcatgtgtcagaatttcctttttttaaggctgaataataaatactcctatgtatgtctatgctacattttgtttatccattcatccatcagtgaacctcccgggctgcttcgacattttggctaatgtaaataatggtgctgcaaacatggtgtacaagtrtctgtgcaagacgctgctttctgttctttggggtatatatgcagaagtggaattcctggatcatatggtaattctatttttaattttttgaggaatcaccataactttttcttaccgttttagctggataagggagctgaggcatccagcagagtgcccacccctagaaagtatacaatgaacattgttgcctggatgaggcccatggaggttgagtcacttgcccaaggtcccagagttggtggcagattgggggaacatccagattcgaatccagagggcaactccagggcccaaaggctatttacctccaggttgtatagctccctgagagggcctggctccatcagtttcatgatgttttctcttccctttcctccccttggggaagaagctgaggttacagcccttaggggagcccccactgccttcgctgcagtgagttgtaaaggtggccaaactgctcatggctaataaaaacacggagtcttcgccacatgcccacaccaacccccgagaccagggcagcagctgctgtgcaccaacccaactgtgctacagattgcttttccttagctgttccttgtatacccagtggacagagtccgcgatcgtacttgacctccacagtgcctggtccatcgtgagcacctggggactctgcagtggttgaacctacagggcctactgtgtgtcacacccagaccaaaaagcttgacactttctctgatttaatgcagtgaacaaggaactgtcagtatctccattttgcagatgaaaaaactgagactcagagagggtgtgacagctaatcagtcacagtgctaggatatacagcagacatctgggctcctaaccacacaggcatataaagacggggagaacctaattcagctccagaccttgttaggtgtgcagggtcccactcagagtccccaaagcacccctggattgggatggaggaaaaggatgagaggaaaagaaggacaattgcaaagctggtggacccagtgctctgcttgtctgccctccccgctttcaatgttctgtgagcctggcggtggaaatctctctcctttgttgccagcagggctggaggctgcatccctgtgtagtcatgacaccagctgaaccctccactcctgggcttcatgtgctcacgtgaccccaaggagaagtggcttgttaaagaactctgacgtcagcctttctccatcccagcacacagacatgtgccatttctgagacctgatattttacaagcctgtattgaagaacccaatacagtctcccattactccagacacagtcctctgcccgagggtgggtgctgggtaggagctgagactgtccccagtgcctgtctaaaccccaagtaaccatgagggtcattaaagaaacaacactcattctgaaattgcctcctgttggtaagtatttgcatgcacagagcacttcaaagactaagtgttaggattatgaattttcatacgttacatcatggggtttgtcccagagaaactatgagaaacgtcagccttgacgaagacgatgtctgcactagctgggctttgttttctttatgtgaagacaactcaagttgcatggtgaggtttcatcgctttcagagaggctgtaacctgggaccaccygcatcccctggaggcgattccttgagtagttcccttgcccgctgcctgtgtggacacagtgttgtgtggcgttggagtgcacaggcctggagtcaaccagacctggattcgagtccccgactttcctcatctcctattgttccctccatgcactgtgctccttccacactgacctcctttctttccaacaggacctcaagttgtcctgccytgggcgctttgcacaggccatcctctctgcctagaacacccctagctcctcagatctgaccatggttggctcctctctccagccctctccagcctgtaccttgctttgttgccttccccacgatgatcgcccttggaaatgatttttttagggttcccttttataaggataatgtgaacatgggccctgtatctgcctaagtgcgggccctgtatctgctctaagtgcaggccccgtatctgctctaagtgcaggcttaagaatttgtcctatttatttatttatttatttatttatttatttgagacagagtctccctctgttgcccaggctggagtgcagtggtgctatcttggctcactacaacgtccgcctcccaggttcaagcaattctcctgcctcatccctcctgagtagctaggattacaggtacacaccaccaacctggctaatttttgtatttttggtagagatggggcttcaccatgttggccaggctggtctcaaactcctgacctcaagtgattctcccaactttgcctcccaaagttttgggattacaggtgtgagccactgcacctggccgagatgattttttatatgttctctactgctctccatcccacctcttccactagcattacagctcatgaggggcaaggccatctgtggtgttcacttctgtaccaccatatcagcacctgccatgcagatacctgtaaatttgtgcagttaccatggagcaagtgatctcacctttctcagactcggtttcttcatcaataaaatgagcatgattaaggtcacagaattacatgaaaagacactatggacacattagtacgatccacaaatgatggatcactaatgtcagtcacttgggttccttgagcgcatcagggagtgcacctagtttagctgcatcaggtcctggacagtgcctggcacttggtgggcacacagtaaatgttgcctgaatcggagggaggctggccagtattgatatggctgcagtttctttgctcacttggtctttcatagtctgcatcacccatgttgtggttgctaggataatggtttgtctaccagggtcacacttggcctcttacgagtcctgactcttgggctcaggctggtgaggagctttgtgtaatgtgccagggagcttttccaaggtaggatagacaggatggtagtcatcacagggatgaagaccaccgatgctggaatctaactgtctgggttcaaatttagctctatcacttactagctgtgtgacctcaggcaagttacttaacctctctatgcctcatacctacatcacagggtagttaagaagatttgattatttactctaagtggtgctgttagaatggtgcccaacacttagtaagtgctgcattcmttttgtttgtattactgtccctctgctttctcgtcttccctgtgtcatgtattcattcatttaagatatattcattatgcacctactatgtgtcatgaactgtacagggggctggcaaatcaaagatgaacaagacattctagctcctgtcttcaagttgcttacagtaaggtgggaatcggtgataacagaggcatggatraataccaggagagggtgtgcttaagaatgatttggctcatccttacccatcctgatttggaaaaatggattcctgctttttgggtgctcacacctgccctgctatacaaactttgaccctctcctaagactagactcaacttctcagggctggacctcctccttatcttcccccaaacacctgctgcagttcctcgagaaagggatgcctgctcttcaggcacaaggaagcagagccaccacttcaatgccagcagccaggccatcctgctaccctccagactccagaggcgagtgggcccatcagcagcagcaaggagagagagatcaatgcacctgtctcaggagctgcacacagataggtataaggaggcactcccagcagcgtgtcagctccagggctgtaacttccagttaactcaccccgtgtggcgtgtgcagacgaaggtgacattggggagccagggccaggaggcttttacacgtggctgctcactcatgacaaataatgctcccgggtggaaaacttgccacccaccctggacaggactctggggccttcactgagcacctgcttcrgtacaggaacctcttattcagcaaaatgctgtgacttgcggcttcataatatggtgaattctggttccacaacttactagctgtgtgaacrtgggcaaagtatacctctgttctgtttcctcagtcacaaaacggggactgatatggtttggctgtgtccccacccaaatctcatcttgtagttcccataatccccatgtgtcgtgggagggacctggtgggaggtaattaaattatggtggtggtttccccatgctgttctcttgatagcaagtgagttctcatgagatccaatggttttataaggggcttttaacccccttcgctcggcccttctctctcctgccaccctgtgaaggacgtgtttgcttccccttctgccatgattgtaagtttcctgaggcctccccagccatgcagaactgtgggtcaattaaacttctttcctttatatgttacccagtctcgggcactcttttttttttttttttttgagacggagtgtcgctctttcgcccaggctggagtggggcagcaagatctcggctcactgcaagctccgcctcccgggttcacaccattctcctgcctcagcctctcgagtagctgggactacaggcgcccgctaccacgcccggctaattttttgtatttttagtagagacggggtttcaccgtgttagccaggatggtctcgatctcctgacctcggcctctcaaagtgctgggattgcaggcttgagccactgcacccagcctggggcagttctttatagcagcatgagaatggactaacacagggactataaaagtgcctgctgtgggaataggattgtcagggggatcaaatgagattacacctctaaaatgtgtagtgtcatgtgtggttttctcatcattactgttgtcattattgttatcatcttccaggagcagtgaggtcatgctgatagcccatcacacacggaagcaggatggctcccatttaagaaagatcctttaatttttatgccacactgtcaattttgtacctgcacaatgtaccatcgtctacatttccattgtaggcaccattgtagctggggctgtggcagtcgcatggagaaagggcctgtttgaccctcagagaaagagggtyttgtgaggacaccagagaactggaactgcagttgaaaggggaggaagctgagcccccctctccatctgtccctcagggacrgtgccatctctcacacagagtttcttcatcttctggatacayaccccctacccctcactagctctggcttttccacacttctgctggcacatggcatgcaaycatagtgaccccaacccagatctgcctcatggcccctcagctcagcatcctggtctgactcccccacccgccccagtgcaaccagtttcccacttctcgaaagagcctctggtaggtgtggcctaccctgccaagccaggccaaagaggttaaagatcactctttaaccagcacctggctggcttgcctttgggtgaggtgcccagcctgggcaactcactgtggccaggtgctcagaaccacagggcrcagaactcatagggtaggacaacaaagggtagggcacgcgggacaagggcagaatcctgtaagaagggatagatgagggaactttctggaatgatattactgctctatttcttggtagggatttggactacmcaggtgtatgcacttaccaaaattcatccaaaggcactttttttttttttttgagatgaagtctcgctattgtagcccaggctggagtgcaatggtgtgatctcagctcactgcaacctctggctcccaggtttcaagtgattctcctgcctcagcctccggagtagctgggattacaggtgcctgccaccacgcctggctaatttttgtatttttagtagagatggggtttcaccatgttaaccaggctggtctcaaactcctgacctcaggcaatctgcctgcctcagccttccaaagtgctgggattacaggcatgagccactgcgcccggccaaaggcactcttatttgtgcattttacacacacataactcctacttaagaatatgcatgtgaagggtttaagtgaaatatactgaggtctacagcttcctttgaagtgcaccaaaaaatcaggatgggttgactgacagatgaaaggatggttagaggagagctgtatgatcaagcaaatatagcaaaatgttaacagtgggatccagatgggtgttcactayacaactctttcaacttctcagaatgtttgaaaaattttataataaaatgtcgatgttttaataaaaaaaagaaagggagtgtgatcaggcaggtcttgactggcatctccacacaatttgccctctttccagtcaaaaacacaggacccgtctaccccaggcctgccacagaacacacggcatcttcttgaccagtgtagcccccatcagtgaatcaagagactttccmggacatatgagtcactcaccattcctggttttccagatcaagaccccacacacctcaccatggtttgtgactctgcccactgttggtccatctttgtgcaattacaactctgcatcacacccttcactttcatagggcccctttgagcatcttttgtacaattgccattgacatcattgtatctccactgtgtgaaatacatcccagagataaaatccctgttggttccctggggacaggagcctcaggtctggttgctgttgcaggcccagcacagtggctgcctagccagatgctcagtaagtgtttactggctaaacgcaaggatgagtgaactgtagaattcagtgcaagaaagaagtgtttatctcctgacgtttgggtaatctttctttttagcaaacagaactgagtagcacacagcgtttcccttttggtgcaatatagcaactacaactgctcccgtagcctgagctccctcactggaagtgggagggggtacctgctccctcccttacacgtctctggatgttttgtctccctgtgagtaatgctccagggaatacataataaataagtgaatagaaatcaagtccaacctccagagagattaagtgacttgtccaaaggcaaacagccatctgctggccagcacagccaacacggagcccgcctttcctacctgcacttttttctcctggaccacactgcctcttgtgttcagatttgrggtgaaaacacagcttggaaatgatgcagctgcctctgagtgagatacgctaaccaaaaatcctaactgcagggcccaaatcctgtagaaaattttcctcttgatcctcgcctgggtatttggtgactaattctgaggactcagagaaaaccctccatagcaccaggagctctgaattctccctgaagtttctcaagtcctcaaagactgaagtgctaagagccaaaagtgtttcttgggatcagtgaccctccaagtccaaagcaaactracagtgtctgccactgcctagctcaattctttgtgtactgctttccagcagggactgaaagaagggccagtcaaatctaggaagtgacctggacagccgcctagtggcctaatttacagggggaggaaatgaaggtcaggagagagtaycatttgtttaaagttgcacagcttgtttggacagactagggctggaatccaggcctcctggcttccagcatcccggcaggactcttcccactaccccctgctgcgtctttagaaagccacagggcacttgttctgcattaaggcaaaccagaaggcagttggaacaggttgacagcctgcagcaaagaaacctctgatgcaattggtggtgaatgaattttagtggggatgctgccaaacctgacccccattgacacaggaggcccatgtgaaacagcggctctcccaccagtaaccctggcccctatgctttcccaacacccagcaggctggccacgtttccttcattcattttgcattgaccgagcacctagccaggcctggcgagttgcagcaccaggcctcactagtttaccacctggaattactcagagaaaatgagattaatgggcccttcctaggctatctcttcaaggatcagaacttccagtcggtttcaatcaacccagaactctgtagattggaaaatagsttccacagcatcagaracttcaaaactcaatatgaggtccagaaaaaccaacacctggagaatgagagaacccacatgtggagcaggggcatatttgagtctggtgttggcatgggctgtcatcctagcgagtggatagaagtcttmttttttttttagagacgaggtctcactctgccacccaggtgggagtgcagttgtgtgatcacagctcactgcagcctcaacctcctgagctcaagtgatcctcctgcctcagcctcctgggtagctaggactataggcacacacccccatgcctggctaatttttaaattttttgtagaaacagggtctcgccctgttgcccaggctggtctcaaacgcttggcctgaagcaatcctcctacctcggcctcccagagtgctaggattacaggcgtgggtcaccatacccagtcaaatagaagtctcattgttttcccttttgcggcctctgagggatgccaaggtgctggagagtcttgagagtggctgagtccatgtggaagtcattatgtaacacttgaacttgtatgaggcccagtgaatccattttgaagtctctggttttaagtttgcacaactaactgaagtcatcagggaatgtgatgcaggggagactggaaaccaggatgcttcagaaggtctctgtggtcaaaacttttgaaggcttcagctcgctggaaggttcagactctacaaatctcagttgctggcctcaggcctaaggcttgagagcggcttgttggctcggcctatgtcctgtggttgccctttggtgggaagaagtgggcagtctccacaggggcctacaaggactgccctggcttccatggtggtgatagtggtggtggggcagactcctggatgctccaccaggagtcttcctggaaggaaacgggtgctcttaggaagaggaaatggatactaggcttcccaaaacaaacgctgtccccagaacccagtgtagatgttgttctgagttatttacttatttggagatagagtctcactctgtcgcccaggctggagtgctgtggcgcggtctcactgcaacctctacctcccaggttcaagcaattctcatgcctcaacttcccgaatagctgggactacaggtgcccgccaccaggcccagctaatttttttttgttttttttaatagagacagggtttcaccgtgttgcccagggtagccttgtactcctgagctcaggcaatccgctcgcctcggcctcccaaagtgctaggattacaggcataagccaccacgcctggcctgttctgagttatttttgttaatgaatttcatatgaacatatgctttgttggtcaatatcaatgatctaatgtgtaaggttttaaaaagcaagagacagtgccacagtggtagttattgtcacacgccatgtgttcatctttctcaccggaactgctatttggagatgctctcaagtttgcactttgacccacacaatcttgccagatctttgcaaggttcttaggaggcagctgttgttttaccgaatatggtgttcccaggagaaggaccctttgcctcaggaaaccaacatcttggatggccttgcaagcaaacaggaaggcgggggaagaaaaagctgtcccaagacatcagaattgaacccaggctgcctgcagctgggaacagcacggcagggacagactcccagaatcatctgtgtttggtgcctcygcagaggagctgagacaagatgttggcaggggctttgcccttcggtttcattgttgatggttttaaactgacaaaagcagttgaaaaggttgcaaaaatagtaaggctctcattgaccccaagatgctatgacagagaatgattgaaagattcacgttaagaatgtgactcttgaaagtgcctcccagaattcagactggcttaggaaaataactcgtgtgcttcacctctgggcttggaaccatctcagtccaaatggtaatggtctcagaaaattaccagccctcgaaaatgagtgtggcgaatggaaatgctatttcagccttaaatggaaagaattaagtgccaaaaccttccatccaggttccatgactgacaacagttaaactgtgttagaggaaggtaacgtcaccagggaaggttccctgaagcttcaggacccacagagctcccttgagagacatggttctggggtgcggcagcccgccggccaggagacagggttagaagctcaagtgtcaaggacacttcttccaggctgggtgtggtggttcatgcttataatcccaacactttgggaggccaaggcaggagaattgcttgaggccaggagttcgagaccagcctgggcaacatagtaaaaccctgtttctacgacaaattttaaaaagttaactgggcatagtggcatgtgtctgtagtcccagctaactcgggaggctgaggcaggaggattgcttgagcctaggaggcagaggttgcagtaagccaagatcatgccgctgcactccagcctgggtagcagaatgaaaccctgtctcaaaaaataaagtaaaataaaattttatgtgggaacttttgaagtttgtccccaaagctcttatctaataagcccccctccccggcttattagataagagggagacttggctctgactttccgagtctctaggctgggtggcttccagtagaccagctattcatacagctgacttgacaaggacacaacccagtgaggtcagggtccccacccaccctgctcttggtcagaacaatgggaaaggcaccttctwccacagacatgcgccaagccctgaccttgagccagcctgccaggcctccatgctgtgctcaccgaccaccaggcacaggcactcaggaggaaagggagtgggatggggaaagacaatcctcgcctctgccaggaaggctcaaggtcatgtggaacaggagttccaccccctggacttcagtccttcttcactagctgcgttgcctcccttgacttcccccatttcttcatctgtaaaatggctaccatgagaatgctcacaggcttataagagccgaactgagaaaccgtgtgaaattgctttgcaaactgatccgtgccataaaagcagaaggaaccacggtcattactatggtaggtcattactatagtaggcacccgaagtcctgtaatgggtgtgaccccacaggcactgctaacttgggaggggttcagatacccctcctgggcacaggcctgatggcatcctgggtccttcctcaagacaagaatctctggcaggaaaggggacctgtggatggctctgtcttaacctcaacacaagcttaacagtagctgctaattatggagcattaactctgtccccaggcatgctaagaattttcttctcccaatatccatgtggggtaggacctggagcacagaggaagtgggcacagagaggtgaagtactttgtgcaaggccacacagctagtgagtggcagagccgggactcccatccaggttgcctcattcctgagttagtgctcttagctggcatgctggaccacatctttgtttcccattatgaactctgtcctgagacagaggggaaaaggtgagtcagctgcttaatgctgctgcccctgctgggccctgctcctcctaggagaggagcctgaggccaatgcaggcagggcagggaatgggagtgccatcccagagccccagggaaggagcacagctgactgctcctgagcgcatctccgtcctaatgacaccaagacgagtctccttccatacccttggccagtttaatggcccgtggaaagtcctttaaggctagcttagccagcctcctgccccagtctagacccagtggctctttctctgttctctggggagatggagaatcattccctcctacccacaataacctttcttataccaaagtcacagatctacttaaagcacctcatctttttctcattagtctagtgatggtggcttccccctaccagtttgatttgctgtacacagtggctaaatttcctgtcgtccctccaggctgatgacagggttggcccattgggcagcctttttctagtgtggagagtcaaatcacagtgctgagagcacaagaccttttgttaaccttcctctacaaagtgctacacttccttaatgaactgtaatgagaaatgcatctgtggtgacaagaaaattaggtggaagataattgactgaacctattaatccctcaatatgtgccatgacctatgctgagcactctgcacatattacattatgtcctccttgcaacctccaagcaggttttttttttccaacccattttacagatgaggaagctgagagtgaacagaaggtaagtatcttgtcactgatcagatggccatattggtagaggggccaggaccaagccctgttctgtcctgccccaaagcctgggccttaaacctcagcacgctgcctcactgctgcaaagaaacccagatgcggtaggaactgcattggcttcttgctgcaccccttaatgtctaaaccagatagaaaagggatttctttacagaggctctgtagagttaagcacttttgtttcagacagaatacttcttaaaacaggcttggcttttttctccccaaacacttcaaaatacaattggacaaattcaagccatttgagtcagttaagcagtagtttcttccctgactagcatttattgagcacttattgtatgtcaagtactttgtattcattgtttttatttaattctcataacaacctgaaataggtgatgtcattgtgaggtggtacagtatggtggttaagcatttggcccttaaaatctggctactgcttgccctactgcctgctagctgtgtgaccrcaggcaagtcacttaacctctccgygcccagttttcttatttgtaaaatgatgatgatcataggagagttgtgaggcttaagcgcattaatatatgtaaagtgctggaaccaatgcctggctttatagtaagcattagttattcccaggaccatgttactgataagggaataggaagataaaggagcagctacactgggacagttggcattttcacccaatgaggccaatgccagaacccatactttttttttttttgagacggagtcttgctctgtcaccaggcgggagtacagtggcataatctcggctcactgcaacctctgcctcccaggttcaagcaattttcctgcctcagcctcctgagtagttgggactagaggygtgcaccaccatgcccagctaatttttgtatttttagtagagacgggtttcaccacgttggccaggatggtcttgaactcctgaccttgtgatccacccgcctyggcctcccatctcgctctgtcacccaggctggagtgcaatggtgcgatctcggctcactgcaacctccaccccctgggttcaagccattctgytgcctcagcctcccaagtagctgggattacaggtgcgtgccactgcgcctggctaagttttgtatttttagtagagatggggtttcaccatgttggtcaggctggtcttgaactcctgacctcaaatgatccatctgctttggcctcccaaagtgctgggttacaggcatgagccaccgcgcccagcccccttttacctttttaaaaagccactttactgaggtacgatttacataccaaaaaaattcactagttctaactgcaattcaaggacttgtactaaatttacacttgtgcaacttacaccataatcaagtttggaacgtttctgttatcccaaaaggatcccgcatgcccacatacagtcacttccccttcccacccccagccctagggaaccactaatttactctctgtctccatggatttgctttttaggggagacattttatatcaatggaacctacaatatgcagtcttttgtgactagcttctttcacgttacctgattttttaaatatttatttacttttaaagaggggagtctcatcatgttgcccagactggatttgaactcctaggctcaagggatcctcctgcctcagcttcccaaggagcggggatttcaggcacaggacaccgcgctggctcacatgatatttttgaggttcacccatgttgtagtttatattagtagtttgttcatttttattgatgaataatattccatggaatggatatgcctcatattttttcattcaccagatgatagacatttggattgtttccaccttttgatctttatgaataccttttaaaattttaataatctattacgaaaaaatttaaacatacaatgaacccccacgggcccatcaaccacctcaacatttaacattggccgggtgccatggctcacgcctgtaatcctagcacttagggaggctgaggcgggtggattgcttgagctcaggagttcgagaccagcctgggcaacatggggaaaccctgtctctaccaaaaatacaaaagattagctgggtgtggtggcgcatgcctatagtaccagctacttgagaggctgagacgggaggatcgcttgagccagggtggttgagcctgcagtgagctgagattgcgcccctgcacttcagcctgagggacaaagtgagactctgtctcaaaaaaaaaaaaaaaaaaaaaaattaggctgggcacagtggctcacacctgtaatcctagcattttgggaggccgaggtgggcagatcacttgaggtcaggagttcaagaccagcctggccaacatagcgaaactctgtctctactaaaaatacaaaacttagccaggcatggtggcacgtgcctgcagtcccagctacatgagagactgaggcagaagaattgcttgaacccagggggcakaggttacagtgagctgagatcgcactactgtactccagcctgggcgacagagcgagactccrtctcaaaaaaaattaaaaaattaacattaacattttgccattgttctttcatcgaaaccactcacaatatatttttttttctggagtacttaatttctcataggtaatatattaatcaggttctaagaccaaggagtataagaagatatttctttcactctggaaagtcctatcccccatctgctcagttctcagttccctccaaccaccgttttgttcatggacccttccagaatttctttatgcatatcgttatcagtccattcttggattgctgtaaagaaatacctgacattaggtaatatataaagaaaagaggtttcactgactctcggttctgcaggctgtacaggaagcataaaagcttctgcttctggagaggcctcaggaaacttccaatcatgggagaaggtaaagggggtgtgagccacttcacatggccagtgtaggaggaagagaggaggaggaggaggtgctaaatacttaaacaaccagatctcacgagaactcactattatgagaacagcaccaagggggatggtgttaaactattcataagaaatctcccccatggtccaatcacctccctccaggccccatctccracactggggattacaattcaacatgagatttgggtgggaacgcagagccaaaccacatcacatatgcaagaaaatataaatatatagtcttgctcaggtgtgttggctcatgcctgtaatcccagcactttgggaagccgaggtgggcagatcacttaagttcaggagttcaagaccagcctgggcaacatggcaaaaccccatctctacaaaaatataaaaattagcctggcatggtggcacacacctgtagtcccagctactcaggaggctgaggtgagaggattgcttggacctgggaggcagaggttgcagtgagccgagatcacaccactgcactccagcctgtatgacagagccagaccctgtctcaacacaaaataaaactagatagatggacagatagatgatagatcgatagatagatagatagatagatagatagatagatagatagacagatagatgatagagatagacagacagatagagctagatagatagatagatagatagatgccttttctcaccttttacacaaaaggtagcatattacatatactgttttgtaccttgatttctttttcacttaatagtatagcttagaaatctttccatatcagaagacagcttcctcattcttttatttacatttttacagctacatattatttcgttgtgtagctataccataagttattcaatcagccacctactgatggacatttggattatttcagtcttttactcttaacaggcaatgctgtggttcattgccttgtacatatgtcattcatcatgcaaaatatctataggatatatttcctaaaaaggaattgctgggtgagagagtatgtccatttgtagcatttgtaatttttactgatttgccctctttggcggtcgtatcgattgacactcccagcagacgtatacactcgcaagttcttgatttcctattgcctcaccaatagagtgagttatcagaccttttaactgttacataatagttctgttttttagctctcgcctcattttctttctttcttttactctttttgctttagtttatacatttttatgttaagaatttttgaatgggctattcttatacaccttgactcatgttttaaggtttttaaaaataacagctttaatgaggcatgattcacatactatacaattcacccattaaagtgtaccagtccatggtttttagtacttagctcacttttaatgctcatcctcaatctttaagagtatttttttctaattgcattagtattatgtatttggaaaagccaaaaaaaaaaaacaaactacaaagaaaaacataacactgtcacttagagatatccagttaacatttttttaaaaacaaaaataataccatattgtagatcacatgctgaggtttcttttatcattctcagttcttctaagtctctcaattatgtgttcagcctctaggtcttctagtgacataatcgtcggtgatgataacaatagcaataataactataatactaccgacttactgagagcttgttatgtgccagcattgtgtcttacatactttatgtgctcgatctcaattaatccttgaaacagtttgttggtcggtactgtactcacccctattttacagctacaaaaactgaggctcagagaggttaagtaatttgcctcatgttaaacaggtagcaactgaaaaaactaaggtttgaacactcatctatgcaacttcaaaatctctagtcactcagctacaagttcagactagagacattcaggactggttaaagaaagcagcccctctctcaggaagagtcaggagggcagaggagttacagcctctcaacagcaacgttggggcctgccaatgccagttcctgatgcccccctctttctcagggctggtgagtgcccagcgcccttcacctgcattggcaggattctgttctagctgtgtgtggccctctctctgcccctggagggccctccctccttcagcttgtagatagggagtggartgggtaaggaggtgttgctggagaagtggcctatatcacaagaaggtgtgggaacccctctggcrggagtcatctcatagctcttccaacctgttggtagggaatgatagaacaattccaaatctctgcacttcacaatcagcctcccgttccctgtcgccacttcccacgtcctccaccatgttccatcctcacagacactttgggggcaacttcccctgcagttgcccaagccaagtagtcagcaggagcttcatggctgttagctggagcggaaggctggctgcctggttgccacagcaacagctgttgtaagtaagtggtccttgtgacagaagacaatttaataagccagatctgggggcctagtgggaaggttgctagtggctttactgggtatcttctgtggtgctggagctgtaggcaggcaggtgtgactgaggagagttggagtcgggggaggccaggcatctgcctttacccaagggctggaggcttttgtcctgcagaggtaggcccagccaagagggagctgcctcctgtgtcttcagagatcccgacactcarctctggacatcacccaaggccgaggccttgcacttctgctcccagctagaatgaactagcttgtatcagagcagttcttctgctgagaacaactggacaatttggatgaagcataagaaacatctgtgtgcagttgagactgaggcagacaggacaggtgtccatatctagggcccgatttcagcacgtgcagtagccctgggaaaatggcatgctgtttctgcatctctgtgctcctagtaaaacagcaaaactcctggaaagagttgcctatccttgctgtgctgtttctctcctttcattctttcttgaatccactccagtgaggtttttgtccctactgttcctccagaattgtttgtcaaggctgttctcacttcatttgctccctaagggatctcgcctcaagtctcaggttcctaggaagctgactcggagacggaggtttgcatgcagcaagtttatctggcagtactttggaatgaatactcgcaaggcacacaggatggtgcaaagggagatgctccactgtgatggtgttgcagcaaagactgtggctgacctccgggggtgctccagagctggggcagcctcatccgtaaggtggggtggggagtgctgagcagtgtgctgtggaggcattaccttgagtcttcctaatgtccttaaggaagaggttctgtcattgtccccattttgcaggtgcagaggtggaggctgagtgaattatacatcttgctcactgtggggagctgagactcaaatcaggtcttcctgcctcccagagccctagccacgcttctgcttcatraagcctccaagaagcgtattgaggaaactcctgggccaggtctctgggaggcctgtgactgtcactcccctgggctggctgctgggaaccccatcttcaccatggaactttcaggctacagtggaggcttcccacagattctgtccttatctccttctaagacaccaaggtgtccgtgttacagggtctgatggagcagctctgagatgttacaagagttcgagcagcctcagaagcaggatgaaaggatgaagccccagagagccaggcctctcttccccagcccatcagcggctgcttttagcacgtgtgtgcacattttaggaagggatgtttcctagggtgctgcctcctttccccacaaatggctctgaaacttgaaaaaacaaaagtcaattccaaaataagcgaatctctaaccactgggtgaacccctctgtgtccccttgaagaacttgtatttaaagtgtgtgtgtgctacacccgcacacacacatgtgctctgatacacacagacacatccctgtccacagcaaagcttgtgcctgtgtatacacataagcacactcacatattcacaaatatgcagacccagaaatggaaacactgagcagcatcagcactggggtgatgccactcctgcccttgctgtcactggggctgtagctagtgatgcttctgctgctgccacctctaaggccacctctaagagccgttaccctctagggagcccaggcagcattctctgatctcagaaaaccacgcttgcttttgcctattagggtctggggtgatgtttgaagcctgcaggaatggttttaaatattgatttgagtcatctgcagaatcttccatttcacttggggtgtgcccatttaacctctggagagctactgccaaatcacctgccctacctgcaggccctcctcctaggtcctagcagtcccctgtgcaatgacagttggtagaggtcttggagtttggttcttggtacagcttcttgagagatctttcaaagcaagaggacatccaactcagaattaaagcaaaactcctgttcctacccccacactcccctccccgccccatcccaaaggcatgggacataggaagtcagaggtaccaacttgggatttaccttctggttcttcctgtccgtggagccctcccaaattgaatgcttttcagcggtactcagagtacaagaaattcttcctctgcatcatattctctctcacacactttaaagtgcttgctgtgaggcagccccctgggagtgctgagctaattctatccctggctttgttccttttttcaaaatccatgtttaaccagtttggcccaaaaggaacttggggatttcaggctccagggagtgccaaaggcttgggattgcaccagggattctgaatctggactccaagaatggrcctcaggagtttgtgagcctctgaaagcmcctgcagctgcgtgagagtttatgtgtgcttttttcctgaggaaagagtccatagcttttaacagggtctcagcaggtgtgcgatcactcttccctacatcmcccagaaaaggttaagaaccattgcctcagggacagagtatgtagctttatttttttaaattattattatttgagacggagtctctctgtgttgcccaggctggactgcagtggtgtgatctctgctcactgcaccctccacctcctgggttcaagtgattctcctgcctcaaactccctaatagctgggattacaggtgcatgccaccgcacctggctaatttttgtattttcagtagagacaggctttcaccatgttggccaggctgatctcagagactcgcctgcctcagcctcccaaagtgctgggattacaggtgtgaactactgcacccagcccaaagtatgtggctttataaacaggcagagttaagtaactgcattctagaatcaagaatctagggaagggccgggcgtggtggctcactactgtaatcccagcactttgggaggccaaggcaggcagatgatttgagctcaggagtttgagaccagcctgggcaacatggtgaaacctgctctctccaaaaagtacaaaaaattagctgggcatggtggtgtgcacctgtagtaccagctactcgggaggctgaggcaggagaatcgcttgaacccaggaggcggggttgcagtgagccgagatggcgccagcttgggtgacagtgagacctcatctaaaacaaacaaacacacacacagaaaacagaatctcaagagggattcttaacaagaagttgaggtgggggtgctgcatgcaaagttttgtgtgactctgccttctgagaataggatacagatttcattagatccccagagagttcataactccctgatttaataatcacagatacagagaattaatgatgttaaagtattagtgtcatctgagaaggtagatatttttaatagtgattctttttcaaaatgtaaatgcatttattcattgaagaaaacttgaaaaaaatcttctggaaatcttccaaaaatcacctataatcccagcacccagaaataataactgtttttttaaaaaaagatttctccagtgtgtttgatgtctgtctgtctctctcattctctctttctctgtgtgtgtatgggcatgtacacacaaacctagaatcatactgattttaacatgatttttttatttatgtaatatctattttatgagcactgtctcctgttgttagttttctaaaacagtgtttttcaaactttgtttagtaatggaacccttatttttaaaccgaatcttgcacagaagtctaaaatataaaagagataaaaggtgagatgctctagttaaagcacaggaagagaagaaacacaatttgaaagctactgcactaaaaatatgaattttaatggctatattgtattccatcatatggacatatagggtgaccagatttagcaagtaaaaatacaagacatccagataaattagggtttcagataaaaatgaataaatttttagtataactatatcccaatttgaattttagataaacaaatactataaaaaagaatacatttttagaataactgtgtcttacagcaatatttgagacatacttataccaaaaaaattatttgttgcttatctgaaattttaatttaactgggtatcctgtattttacatggcaaccttgtgataatgcataatttaaccactctcccattattggacatttagattatttccaatatcttactaagaaatattaagcatgtatctttgtacctacatcttcattacttattattttataacaccctagaatcaaaattgctagaccagaggttgtgaacattttaaaggcttttgatgcatttgccaagttgttttctacaaagaaatgtaccttccacagctgtmtgtgagggcgccctgacccattgttactggtttacatttgctcgtcattctgcctcagcaaggtcctgagcctccaggtgggatccaagatagctaaaatggatggggcctgaaggtgctaaagaacccaaagggaggggctggttagcccaatagcatctgctgcttggggtcagggatcakggctgataagaaatagggtagagatggcagagacttcacccagggaaagtcagctccaatcatgtgttgcagagaccatcctttctccattaaagtagcagtaagctgtacactaggcccatgtaatgcgttatatttagtaagcagccttacttaccataaagacagccattccaagaaggggagaggctacagaggaaaaagtctgaaaagattttttcccacttaaaaaataacaattacataaacatagtaacaaccgaaaggatggaaaatcacccataatcttcccatcctaacaaatcacagtttttagttttcagtatacccttcctgtcaaggtccgtaatttttacayaactgcaatcacaaagtgtatacaattttatcctgccctttcctccctttattgtgcaagcatttttctgtactgctacagagctttcatagctaatattattattgktattttttcttgatttcagaggtataattattcagcaagataaatgagaacatctagataaacaaaaatgggatcaaaatgcacatattaatttgtagctcattttttcccatttaactgtgtctagtgaacatctttccatgttaaaaaatgttgatttctgcgtcatttttataattgcaatgtgttctatttaaggagtcttccatcactttttttccgggctctttttgggggtgggggtgagggatcagctcacgtttaatgatgacactttaaaattgtacaagtattttcacagttgcccactacaaatttagcctcttaaaatgacaggaaaacaccaaccaatcgcaggttaaataagtttaccccttcagttctgatttgyaatatccaatattcttttgaaatatgaaacagactggtaaaggccaacagtaaatttctgccctcttgacagagttggagagttcagtccaggttctattatggtttaattttataagtgaagagatggagattcagaaaatttaaataacttctaatagatcacatgtcaatgagtgagaaaatgtaggscttttaattccatatgtggttttttcttttatattattgcagtaagaacacataacatgagacctaccttcttagcaaatttkgaagtgtaaaatccattatgattgactataggtacgatgttgtacagcagactctagagctcattctttttgcttggctgaaacttcacacctgttgattagtaattccccatttcctttacacctcccccaatagcccctggcaaccatgaatctgacattttgatgtctatgaatttgacatcatcatattttagatactttaaataagtggaatcatgcagtatttgtctttctgggactggcttatttcacttggcataatgtccccaaggttcatctgtgttgttgcaaatggcaggatttccttctttctcaaggctgaatagtttcattgtatgcatctaccacattttctttatccgttcatctgtcatggacatttgggttgttcccacatcttggctattgtgaataatgctgcattgaacaaaggagtgctaatatcccttcaaagtcttgatttcaattcttttggataaatacccagagtgggcttgctggatgttatggaagttctattgttaatttttttaagagcttccatactgttttctgtagcagctgcgccatttcacattcccactgaaagcgtgcaggagttccaatttctccacatcctcaccaacacttgtcttttttttttttttataataaccatccgacaagtatctttttttttttttttttgagagagagtctcactctattgcccaggctggggtagtgtgatctcggctcactgaaatctctgcctccccagttcaagtgattctcctgcctcagcctcccaagtagctgcgattacagacatgtgccaccatacctggctaattttgtattttgtgtagagacagggtttcattgtgttggccaggctggtctcgaactcctgwcctcaggtgatccacctgccttggcctaccaaagtgctgggattataggtgtgagccactgcgcctagccctgacaagtattttattgtggttttgatatgcatttcctgatgattagtgatattgagcattttttcatatacctgttggctgtttgtatatattctttggagaaatgtctattcaagttctgagcccaatttttaaatcaggttactagttttttgtttttgttttttttaactgttgagttgtaggagttccttagaatttttggaaattaacctcttataagaaatatgacttgcaaatattttctctcagtcktttcactctgttgattgtgtcckttgctgtgcagaagcttttttagttagatttaatccggctttgtttatttttgtttttgttgcttgtgtttttgatgtcatgtccacgaaatcattgcaagaccaatggcatgaggattttcccctatgttttcttctaggagttttgcaatttccagtcttatatttgtctttaatcattttgagttgattttggcgtatagcataagataggggcccagttccattcttttgcatgtggatatcatgttttcccagcactatttgtagaagagactatcctttcatcattgcgtattcttggcacccttgtcgaacatcagttgaccatatatggatgggtttattggggtatctattctgttccagtggtctctttgtgtctatgccaattccatactgttgtttgatgactgtagctttgtaatatattttgaaatcagaaagtgtgatgcctccagctttgtttttccttttcaaaattaatttggctgtttgttgttatataataacttactgagccaatttcctacagttggaactagggtttttttcccacaatcttttgctgttataagtgaaaccaaattttaatcatttccttgggaaagacccctaaaattgaatcacatgtacacttttttttacttttgatcatactgttaaatttatctctaaaagatttataccagtttatactcccactaataatgtattaaagagtacctagttccccacagcctatatcaaatattgtaaatcrttgctaaatattctattcagttgagagaacataatttatttactcttcttcctgctgttaacatttagattattttcaaattttcattcttacaaaaccatcatgaacatctttctgcctaatatttgtctataagttgaatcatgattaaaataggaatcctgggtgagagggcatatttacccttgtcacttatactttccaaaggttaaactgaaatcttctgggtagatgggagttttggggcaccctgccatgtctaggggaaggtaatggacagaatgaaatagaagaggccatgtgccaaaggataaaacactagaaacgtactgccagactgttttccaaaagggtactaatttaataaccattccggtggcttaaaaacaatttaatgcagtattcaaagatattaggtaaggaagaaaagcactatccaccattaacctgcaataatgtcattcctcacagaggaccctcaacctcaataaaacacacatctctgtccctcccggatccaaagctagcatgcgcatctgcctagctcatgcacttggcgggaactaccaggggaactcacagggtagctcatctcctggggctcctctgttctagaatcctttgtatttttatctcctgtccaaagctcgagatccccaagggagcaagtcccattttagttgacacctaatcaaagctgytggtactccttcagctcctgtggagcgtaggtctctggggcgcaatgaacacactttttcacrtgacaaacgtacctcgagcagstactgtgtgccaagcaaagcgacagatcacaaagaagctctcagctcttcagcagccttgtccagagacctagtcctcactgtttcagcatttgctccatgatctgcaataaatatgtattgaacaatgataggatgagtggatattgttccggctcatttgatatttgaggtggaagaagactcagagatcatcttgctgaaccccctccttttatacagtcatttagtgatggcctcccatgacccgatgtgcttgacaccccaaggcagtaccattacctcctttccgcagctacggaaactgcttcactcagaggttaacttgactgccgctatggagtggctgtggtctagctggaggaacttgactgacatcccttttcagctctccttgccctgcctgcccacctcaactaagttactaagttaagcactcacatcaggaactttagaaaatatgttttttaatggtcaagacggaaaaggaaatggcaccaattgcccatgtgcctaagtacctaagtaccagcctcctgggagtgttctgtggttgatgtctgcagtacaggtgaggaaaggcttggcttctcggcccccacccccagtcccaccctgttttcaactgttaggcttgtgctttggggagaaatcaggcaaagtcaagttgggttgccaaccatcacacgaatgatgaattcacctgcaaaagcacctcccaccccgactctgcaattcagcctccacatcttgctcctctccctcctccactttcctctccttcctgtccatcaggactaagctactccggacggtacctcggccctcagatgttacagctgaggaaggacttacttttcatcaatgtatttatccctgagtttcactctgaggatgatgatgataatgatgacagtaatgagctcaatccttttatcttaggtagagaattaaggttcacctgtttcttaaaaatttttattataaaaaayaaatccttatttatataaaaaaacctgacatgtatgaaggaaaaggtaaaagtcttcagttttctatctcacccccatgccattttccagaggtgacccctgtagagcggtttcctgtgtattctttcaggtatacctatgcatttacacatgcatatgtttataaactatttatrtaaaatgaatcacactgtatatatttatttcttctaacattcctttagaattctagtataaggataaagtatactttaattaatcagttgtctactgatagasatttatttccaccatttttattaaaaataatgcagtaattaatatatttgtacatttcacatatttacatgagtttaattgtagggctaatgcctagaaatataaggtgaccatataatctattgcctaaaccaggacaagtgctcattcagaagggctccagagagcacaggaatgtacactgtaattgtctcaggaaatcaagtgtatttttacctagaaatgaaacttctgctaagtcaaagagtaatatttttaaatgctgatgttgacaaatagccttctgtcatggttataccaatgtatcattcaccaatgtataaaagcttctatttcttcaaactgtcaaaatactgagaattaataattattcttgaactttgccagatgaattagcaagacattatgtctcattttagtttttgacttttgttttctgtaattttttattactggcagaatcaaccagatagatcttgctttaatttgcatttttatttagtcattaatgaggttgaacatcttttcatttattaatggccatttgcattttatttttattttatttttccttttttaacgtgtacttatatttattataaaaggatataactcaggaaaagccagatggaagaaatgcataaggcaagatatggggaaaggggcacaaagctttcatgacctcttgagatgtgccacctacgtttcatctttctttctttcttcctttcttttccttcttttttttttttttwatttgagacagggtctcactctgtcacccaagctggagtgcagtggtacgatcataacttattgcagccttgaattcctgggctccagtgatcctcctgcttcaatctcctgagtagctgggactacagcacgcaccatcatacctggattatttttattatttttttgtgtgtttgtagagatgaggtcttgctgtgttgcccagactggtcttgaactcctggcctcaagtgatcctcctgccttggcctcccaaagtgctgggattatgggcatgagccactagccagccacacatttcatttttctatgaacttcttcatatcctttaagcttatattcctttttaaatattggttcatttcttattgattaataagagctctttgtgtattacagaagttagttctttgtcatatttttatttaatattttttcccaacgtgatgtttgtattttgactttatgacatttttgacatataaaaatgttaagtctttgtatagtgttttcttttatgacatatgggctttatggccaagattgaaaataaatgaaaagtgaccaatttttttctttatacttttaagtttctttttcagtttaaatatttgagctacctgaaatttattttggttgaagaaattagtccagctttattgatttccacattgcctagtcacttttcctaacatcattcactgaatggcatagctctccctccccactgccatttgaagtacaagtgtatcttatgccaatcctccacatgtatttgggtctatttctgatctctcctctattgatctgtttatagtaagacatactataagactacaggtactactagtatagtagtattctactatatactactatataggatatagatctatatcctatagatataggatactattatatgaatagcatctgtagtcttatggtatatcttaaaacctggtaggtagtttttttttcagattttctctgattgttctctcatgtttaaactcttccagctgaatctcccttcccccaacacagctgttatttgatcagagttgcattaaattcatagattaagtcaaggagaatgtatgtctttacatcactgaatcttttccaagcatgagctgtgtcttccctttaaggtctgtttaactacagggtgggtggccrtaaagggaaacatggacaaatatacctaatcagtggtttatttctatcacattacaatacatgaaactgtgttgtttttactaacaatgtatggttcagtgtactgtgcaaaactgcaataaatgccacatttccattgatccctgtacatgcatctaaaatatgctatgatcggaacatttgtgtctctgttttctgatggaatgaaactgcctttatggcatcccagaagtaatcaaaagggttttttctgtctaaaaaaaattagggctgggtgcggtggctcacacctgtaacctcaagactttgggaggctgaggcaggaggatcacttgagcccaggaggttgaggctgcggtgagctgtgatggcaccactgcactccagccggggtgacagaatgagaccccagctcaataaataaataaaattttaaaaaaatagtattatccctctttccaaaatttatggctactttgtgccttgataaaatgcgggctacaggggtagaggcagtccaggggcatggtcttattgaggggacaggtcacacctgctccagcagtggtcctgtctttgtgctgctgtaacagaatatcacagccagggtggcttataaacaacagaaattgatttctyacagtttcagagcctggaaacccaagatcaaggcaccagcaggtttggtgtctgatgagggctgctctctctgtttccaagatggtaccttgttgctgtgtattccagaggggacaaatgctgtgtcctcgtatggcagaaggtgaaagggcgtaaaggtgtgaactctctctgaagcctcttttataaaggcattaatccattcatgagggcagagcctttctgacttaatcacttcccaaaagaccttacttcttaataccaccacaatggggattaagtttcaacaggaattttggaggggacatattcgaaccacagcagagcctcaaagaaagtcacacaagaggcaggctgatttttcccaagttctccttcccctctcccttttccttacatttaatctgattcaaaaaaatctgcctttgtcatgctctgtcctattggtggacattattgtgagagtataacctaaccgattaattactagtcacaaaccacaggtaatgtgtttctaaatttgacccacagtgccaataatgtgccatatcggccactactctgtttttggctctctcttctgaaaagtgttataaaccgacatgcccagctggcaatcaaaggcttgctgagttctaatgtgttgaattggatcctggcctgctggtcccgacctcagttggtggggcagaaggctgtcaccatctttgcaatagtcacactataagtgttctatatgttatacggcccattattgcttttttttcccccttaatatgttggggcaggggtggtggctcacacctataatcccggcactttgggaggccaaggcaggaggatggcttgaggccaggaatttgagacccgcctagsgtaacatagcaagatcctgtttctaaaaaaaaaaaaaraarbctrtctatctatctayctatctatctatctatctatctatctatatctatctatctgtctaatatatatagtcccagctactcaggagactgaggtgggaggatcacttgagcctaggagtttgaggctgcagtgagctagaatcatgccactgcactctaggctgggcaacagagcaagaccctatctctaaaaaaaattttttttaaattaactgtgatcagtccgtgttcgatagatactgactgtgaaatacctgaagtacaatgatggcatgcagaccttgacgctttgcgcttgtgactacagcagaagtggcaccgacctggaccccatgttagcccagagggtgtttcttggggcctcagttgccttgaggttgtcctgtctcagcagttcatcctgctcatgtccttttcctcagccatagagcaggaccaggttgtttgrgggactggtaccctgagcaagaatgactttgtctcccgttaggtgtgactgctgctgagggtcatcaggaccttgagggtgtcgctggctgagaggacccaggaaatctggtggtgtgctgatttggtctgagtacacaaactcttgtatttttctgttcttccatgttcttttgagccatagtcaagaagcgcatgtccaggccaaggagtgacagcactgggcaagtccctrtctgagccacgagctgatgccctgatccttgagccaaggaaggaagcgacctccagcctgagcttgtcaggactcagctgtgtgccgggcaccagaggccagcctgctttggagctgaggactcagaattggcaagaggggatgccaaggacatctgagccacaagctggtctgaaggcacacagagaaagctttgtgcttargctctgtggccagacagcctcaattttggtcccggctaagccactcagcagctatgtgaccttgggcatactattgtacctctaggcctcagtttccacctctgtaaaataagaataagaggagcatttggagatagaaataagcccttggcatagcacccagtgcacaktagaccctcaatgagccgtcagcatcagctcattcctgttgaagatgcccagtcttccccccatactctgggctacagcagctgtggctggaaggatcaggtagggcttttgtacccttcacagactcagagatgcttgatttgcactggcgaaactgataagcagatgcaagccgagcatcacatatctctggcatggaccagcctcacactccctccatccgcagatggcctctgggctgggcaaagggcgggaaatggagacctggggagcctggtggacctggagaggaccctcgggtctgagcagagactgcctggaatgkcgggcctgatgccttggcctagccttaggtagaggaccctgggtggctcagatccctaggggaataagcagtgggcctccctccactttcttggtgagatcactggaaccacaagcactcataaggccacaggaactctttctcagtgaaaccagtagtgttggaaagctgtgcagtcatcagtacccctggaggagtcatattaggatgtgttgggaaatctaactggaggccttaggtgggtttccccaggcagctcctatctcgtgttctggatatgtaattaaactagggcctcccaggcctgtgggacagaagtgttgcaaggtagtggatttccatagtaaccatggtggctctagctgagtttcagttggctctgctgatggtgaagttcctggtcaatacaaatataggccaaaaaccagactcgcggttagccttcctgggaacggggtcagaggagatagcctttaaggtccctcgtagttccaagatcctgtgattagcccctcaccatcatgagtttgtacaaagcagcggctctcaacttggtagcacattggaactgcctggagagctttaaaaacatctgatgcttttgtcccacctccasagattctggtttagttggtcttgggtatggcctggacatcaggctttttgccatcttcccacgtgattctaatgtgtggccaaggttgagaactactgacaaaaaggcagacaacgtatataataatagttaataacaattcgttagttaataataataatcacaatttatgtgccaggcactgtgcaaagcacattatatgcattgcattcttgataatttccattttccagatgaagaagaaacatgttcagaaagggaagtgactttccaaggccagagagcagtaagaactgccattctataccagagccatgagagttcaaagccctggccagtcacttctataattgccacttttgaggcaatgtgcagcagaagatggggacatgtctggagcagactcctgagggacccttgatactccactcaggcctcccctgtacccaacctgaggttcctggccctgtgcaacctgcagcaccttgtctggttggatgagaccactggcagcccagtggggttggctacttcctgaggcaggctcagggaggccctgtggaaccctccttttcatttggaagagttggaacctgagaccttgagctcagagatgtcraattatgtgcttagcttcccagctctcataatgaatggcagtctttcaacttgggacagagaatcaggtaagattttactcccaggggagtggggagtggttggaaatcacattttattcaccaggtgtttttggtttatagcagactcaggaaaaaagtcaggggccatccataaaatagggccagagcmtttttacttgcagtttcattgaaatttagtgaaaggtaaacccagcaggtacctgttttactggcagtaaaagaaaattgggcaacaattatttaaaatgagtcagagctgtttaaatctaaaatttaggggtatgtgtatgttttaaaagaaagtttacaaggcttggagatttggactgaactgtttttgatgaaaatgacatggaaaatattttcctttcttattttaaaccttcttctttgctgtttgtttcctaaatttagcaggaagcaataagcaaatctagctggaaaaaaaaactgaagcaagttagggaagtttcaaggtctaatcgaaatgatagactgaaaataaagctgtccaaggtgagacagtaattcttcccattttatagaaaaaagtcattatttcmacttaaaccrtttcagatgtgattgacctattggacacggaagtgctggatttggcactccctaaaagtacaaagactggggagggaggcaactgtctaaacatcagccaagaactctcagcaggaggctggaaggatgtgggaggctcgtcagcctgtcactcaccatctccccaaccttccttcctcaccatggcaacaccagggcttctggagccatggtccagatggaacccccagtctcaaagcctgaacaccgccctgcctgctggggaaggctgggaatgccccacccaactctagacttaagccactggccaaatgccaaagacgggcctgatattttggaatggagtgttgacaccagtgactgtcattgttgtcagtgactcacttgttgggttttgggtttgactttgttttttacttgtggagaatgattttctatttattggaagaactgcaggactgatatctctgaacttttggtcactagagaagaacacccaactcaaatcagtttttaaaaaaaaaaatatgtaggtaggtaggtagatagatactttacatctcttggttctgattgtttcttcttggttcatttttcagacaaggtttctccatgtgatggacaagaagattctcattttgcacgcttggcagtgctggcaaaaaaaaaagttcattgtatagaaaagtctcagggaagattctgattggcccagatcaaatcaaatgaccattcctgaaccaatcactgtgtctagaggtgcagtaatgagattggcctagccagggtcttgtgctcacccttgtggtggtgcttggggtgttggtgggacaggggacagtgaatgacagtcctgccagaagcctatgagtggggaagaagatctccaagacaggcaaactaccatacgccggcttggtccacctcagtctcaagtattgtatttggccaagggtgcagggatggtggggaaaggaggaaggagaggcttgagattacacatgtattcagtagctattgtttttgagtgcctacaatcaccaaggtttttctctgggctttgggattcagcatgagacaaaacagaaaacccctgccctagtgaagcttataatcttgtggggagaggtagccaaaaccctaaaataaataagtaaagcacatatagactgtgagattgcaatgagtgccttaggagaagcaaaacactgcaggagggcagggaatgagagggtcgggttggggtcacagagttacatgtggtggttggggaaggctcacagaggaggtgaggtttgagcagcgtcctgcaggaggtttgagcagggccctgcaggccctacacagaggagccttccacagaaagagagtgtggctggagcagagcaagtaaggggcagcagtggaagcaagttcagcaaggtgacacctgcccagagagcgcctcaggccattgtgagcttgggggcttgtagtctgtgaggggggggggggcactgaaggtcacgtgatgtatcacagggtcccatttgtttgctgttttctctccatttgattataggtcctttgagagcagggacaatatttaggtattcattcatttacttatctattccttgattcagcaaccacctgttgagtacctactgtgtgccaggtgcagggagccccatgaggaagagctcaccatctagtggaaaagaaagagaagtaaagcacaaatgtcagtgtcatgtgacatgtgcccctgcttgacataagaattccaccaacaacccaaaatactttcactaccccctccagagagggcagccaagctagtcccatctagtggctccaagcccaggatctccagtctcttgagctggtccagatatagctcctcatggtcctgcagccaagtgccaaatgatgcatttactccctcgccaatacacttagtgagcaacatggatggaatgcaggctagcagcagcacagttcccctttagaagaggggaggagggaaacagcatccactggtcacacgacatctgcagactcctgctccagtgggagtcagggtggggtgaggttctgtggtcagttctccagctccgctctgagcttggggttggcggtttcttctttctgatcctccatggccaagcctggcatgggatggggcatgaaagggaccagatgcttggattcctgttctaggggttatgttgccttttgtttatttccacattcccagcctcttacccagtgtatgtacatagtaggttttcactcagtatttgctgagttaataccagtgttgttaagtacactgcctatgaatacacagggcagacattgaatcaggctatggagcatgggagggcatcaaagacgattttgtgaattcatgacttgggtggaactgctcatctcggcaacagggaatgcaggagaagcagcagctttgggataagtggggaatttgttttgagatgccaagttaggggcacccgtgggacattcaaagacctgaagtctcaagatcaaagaatggggctaaaggcaaaaggaggagttcaagagctggaaggaaatgattatgatctgggcatgggaactggggttacatatcggaagtagaacggctctgggtggtgaccggggcgaggccagagagagctgaggagagaggaagtgaaagcccttcagaggtcatggaattgtggccaggagccacaacctacccttcctcaggatccccttcacttcactggctcagggccaactgacatttcagctccaaccccaaggaacagcagggtcatcctgaaaggagagctaaggcctctgggcctgttgtttccatgacacctgtctcacaggtgaagagtcaaaccccaaaccctgataccacctggagcggggttggaccacccagagagtatggcttgtggaagggaacagcagactttacttttcccaatagcatctttgaggatgtgtaactcaatttcgaggccttgggaggaacctctctagagagcctgggcctgagcagacattcttccccaacagtctccatggccctgaggaagccttgaatgaagtggggaaggcagcaggctggggcagggggaactatctcagaaaccttacttctgcttcctggcacataggaggcgcttggtggagctttgttgaatgaatgcatgcatgaatggatgagtgaatgcaagcattcataaacaaatgaatgcatgtttaggtgattcagaagggtgccccagtgcctggtagatgggtgactgtcagtcaatgttcactgggcaatgaatgagtgtgggatgaggactcagaggtttcctgagcccacagagtggccgtaagtcctaaataaacaaacatggctatttcccacagctgacctggaggataacgaagtgcatactctccctttgggagcttcagcaaatcatccctctgcagtttttctttaattttagctcctttgccatcaactggaggctccgttccatttccctgacctagagctaagagggcatccatcgctctcccaggtgggaaggacaaaaagaatcactctccctttcagagttggatggcttggatccttctggcgatccagggcccaagccagaacattccttttgtccctctctccctccttccttccttccatcttcygtctttcctgaaatggattttgagttcactgggggctccgccacatctgttcagtctctggcatggcaccacctcagtgttccacacagcagccacagcagtgttaccatcatgagcatctgtgtctagcatggggtgggcccagtggacacgaggacatctccctcactgttctgccctcagggaacctccaactggctcctaggacaggaggcaaccctagaaggtagtatcgctacagagtggcagcagttcaggagatcagagctccccggaccctgggcatgcctgtccagtgaggtcgggggctaggctctcaggggaacatagaggccstgagctgctggtgacagtcccagtgtcrttccacacagcgatccactccccacaggtctagctgccttgctgggaccatccctctaggactaggcctgtgatagcatcctcatgcaagagttttgtgagtgggcaattctcaccctcctttctgcttcctctggggccccagcttcagcccagggctgatggttgggcggaaagttggagttgggatgtacccacagttgatgatatttcatggcactctggagaacatccagccagcagtttggttcaagtaatgagatgtcagggtgcttgcatccatctgttaatttcagatgtgtccttccccagtgtctgttgctggagactctgggagcacagggtagggtgtggccatgaaggaacgggatgggcaatggcatctgccatccatcactgcccagcacttagtgcctggggaccagtggatcttacaggggccatttcaggagcaagcaaaagtcccagagaagatgcatcactgtctgagcacttgagttctggtagctctggcatcagcctgcaggggtttgctgtccttacaggtagttctttatgcagcagattgtccaagccctggtgttttactgatcgggtgcctcatataatgcctaggccagggctaggcccaagtttctgcctaggagactgtcaatctgcaggcgcttggcagcatccattctggtttgtagtcccctcaggacaccttgccttagaggtctggtgcactccaggactcacccccscmatatcccgcaaagaacattggttaagagcatgggctttggagtcggaatgaccagtttaaatccagaccttgtgacttaatagctctgaccctggatgctttttaaaaagcctcttgatggccgggcgcggtggcgcatgcctgtaatcccagcactttgggaggctgaggtgggtggatcacttgaggtcaggagttcaaggccagcctagccaacaccacgaaactccacctctaccaaaactatgaaaattagctaggcgtggtggtgcgcacctgtaatctcagctacttgggaggctgagacaggagaatcgcttcaacctgggaggcagaggttgcagtgagccaagatctgcactccagcctgggtgacagaataagaccctgtgtcaaaaaaaagaaaaaaaaaagaaaaaaagaaaccctcttgagcctcagttttctcttctgtacagtgggggagataatggtctcctcctcatagagttggcgtaaggcacaaatgaggccacgtggctggctcccgcctggtgtgtgctgagcactcgccaagcagtggggtcctcctgcctgtggtcctctctgatgctgaccttcatctcaggtgacaggaactccctcgaaaggctttgatgagaaggcctacctgtcggccaagcagctgaaggctggagaggacccctacagacagcacgccttcaaccagctggagagtgacaagctgagcccagaccggcccatccgggacacccgccattacaggtayggcctccatcgtgtcagtggaggaagaaagactgagagaaagccaacattrtttagtttgtcttcttttacgtgtatctaagaaatgaggatgatttcctcagactgtgtccagtgatttagacattcaaaaaccctcaccctctgttgctggtttaccyggcctactgaggccctgccaagaccaaggaaaccgctccgctggggccaaggaggccccaaggcacttcagtctggcgccccagcaaaagtgacctgggaggggaccaaaggaggtccgtggcagtgggtgagccaggcgctcttggggccttactggtggtgcctaaagtggagagagtcacagccctgcacattgcaaacagtggggtgctgtggcccaccccattgacctccctttcctgcaccacagctccacctcctcagcaactcccagaaatgcttcctagtcttgttcttagttctctcagtatggtgaggtgggagaggccttagaccaggaccaaggaagcctccactctcatcccagctcagtgtgcgtgaccggccttaagcaaggcattagcccctctctgggtctatgcccttgtgtgttctgtctagagsgtgaaagtcaccatctccagtctttcctcttcctgccgtcacctgcacgaacagtctgagttcctgatgctgaagcaccaccccccgctccccatgacctggccttacccacctttcccccagcacttgatggtcctgcagtcccagattcctccctccttccttccttgctttcacacatgctgtttcctctgcctaaacgcacctcctccgccccacctaccctttgagctacttggctcacttcgaggacacttggctcactgtcctctcctccatggaaggctccttcccaacccgggctaggttgggcccctcttctgtgctctgtgcagacatctcacagaatggccagggcgctgttggagctgactcacggctgtgcctgcagctrtgtgctcaragctaggctgggcctccgtctggtcctggcttgagggtagcaacaatgacttggatcaaggttgcttttacttctgaagcagctactccacagcacaaagggtataggtgaggtgagggtgcgagagggcctggttctagcaccttccttgtcactcacagatgcatgcctgaagtccagggtgcttggtggcctgtgcaaggtgagatgaacacagggctgggggagccccagaccttggccttgctgtcctgtaacgccagcactgtcagcctccagaaaccactcatgcagccaagtaaggcrgtactcctgcttcgcggcaaggacamyaccaggcctgctggctgtttctgggcctcagaagttctttctcacccagtcctgggcagcatcccctcctgtctgcctgtgctgcagaagaggttacatccacatagctccacttagagacctttcatgggcagccctagccatggctgacctagtcccagggtctagaggatctgttggccccaatctgtgaattgagggcttgccctggataatctctgttcaccccccagcttacctgactctgaaccgcctcaggtgctcactgagaaacttaaagggggaattgccctgggggctatgtacatttttaaatgagacrctttaaatccagggtagtggtgggttgatgaggtgccacatgctgctgctgggccctgtcagaaagctgaggtgggccaggcacggtggctcacacctgtaatcccagcactttgggaggctgaggtgggtggatcatttgaggtcaggagttcaagaccagcctgcctatcatggtgaaaccctgtctctactaaaatacaaaaattagctgggtgtggtggtgggcacctgtaatctcagctactcgggaggctaaggcaggagaatctcttgaacctgggaggcagaggttgcagtgagccaagatcgcagtaccgtactccagcctgggtgccagagtaagcctccgtctcaaaaaagaaaaaagaaagctgaggtggctcacggggtgtgtgtgtgtgtgtgtgtgtgtgtgtgtgtgtgtgtgtgtgtgtgtgtgtgtgtgygygcgcgcgcgcgcacgcatgcacacgtgtagggaagcaaaggacgtgctggctktagtgggcaggcctcctgccatggtggggccagtttgctggtagaagctgctcttccttgcagccctgcaggctgtagtgtccgctggactccaaattgtcaggttcatttctggtccagcctcaatctagggagcccgctccaggggagcaaagggacataaaccacataagacaggccgaggaggatcacagagaaaaccccatcagctccaaactcaaaactcagggctgggacaaacccctttagaggctcctggctcctgggagccagataaacccccatgctaagtaacatcaatcccagaggcatgcatgccgaaagggctggagggagccggtggggaggtcaagttcacccttcagatggggtgtgggtgggtttgcccccttcagggagacgtcactgtcccgattccctcctttctgggcaccggatggttgggggatcaggacagaggactggggccctggaggtcagcactgggagggtgcacacttaggaggtatttgctgctcccagcacaccccagctcagccggccaagctcactccctcccccacaattcataggcccttgaacagcatggtttctcaaggggtagaaggcaaatttccctccgccaccactaccytacaccccctctcaaggagaattattgcacagcctctcaagatttcccccaggggggtcccaggctagtgggactcctgcctgtctgaccyggtctgctctgcagggcaggaaacaggcctgggaattcgggctgtaagctgctgtcagtagaatgaatgccacaatgaaaaaacgggcactggtggaatagtcagagagcaattgtaataaagaagattgctatgaaaaccagcaacggaggccaccttccagcaccccaggagctcaaataaatgcatrcgcagaaacaacagggatgaagtctggcaggaatgaattgttttcactccctttctagaggagagggagccagtaggccagaaaatgtggtgtctatggatggctggkgagggaggaagtgacgggataggcctttggtgtcttaacagaggcttgtttcctccaggggacccagtaccctgggaggagtgagactgctccccagcttgttgtctgcagcagggctgtcagtgttgggcagtgacagggaggaattccctggcagccagggtaggggtgattcctctgcagatkctaccaaatgtcctgagctgggaagagagaaggaagaaactctagggtatcaggacaaacagaggtagttttccctctcgcacataccccccaccatacgacagagtgtggtcagggctgtatcctggggcctggtgcagtayctgtayatactagggagccccctctgggggctctgagatctctggtaaagagcccccaggccttggaaggtctcccaacctgctgcttccctcccaggaccccagsatgggtggcatcggggttctgggccagtgtgggatgcagcatgggggtggaggcgcggggcctctggcctggctgttggtgtgccttctctgccwggcagaagtattctcaggcacaagactggacaaagaaaaacattgacctgccctgaggatgccctcatggctggctctgacctctgtgctcccttctcagctgcccatctgtgtcctactcctcggacctgccagccaccagcgtcatcatcaccttccacaatgaggcccgttccaccctgctgcgcacagtgaagaggtaagtccagccatgggactctcrtctcagtggtgctggcaggggaggacattgggattgggcgctgtggccagacagcttgaagcccagcaggtgctggaggctgagtcctgtacttctgagaggctgagactggtgaatcagggccaggaagaccccagaagtcaaactgttagaggaatgcgacagtcaaacaccaggtcagatgtccaggacaagggcagaaatgcaggtgtcaggagctgagggaggccgggctagacaggaggcctcaggagggtgatggaagcccagcagtgtctgtcagtgtcagagagaggtggattggaggtggattcttcctgctaagcctgggcttgtggtcaagttgaactcccatctccccatttcctcaatgaacttagacaagaataggattcaggtaggagcgcccagcatgctggccctggagctgggcggctggggagtcccacggccccgggagtggtaaaaatgggaggtggttcctaaatccaggctctttctctgtttccactgctactgtagtgtcctgaaccgaactcctgccaacttgatccaggagatcattttagtggatgacttcagctcagatcgtgagtagtcaccttcctttttgcagccctccattccgccctcgtccctgtttccccagaacaccaaggcaagcaccctgaggttgtcctgaccatcgcagacacctttctgccccyagcagggatcctgtcttttctaggacccctccctggtcctgttcccyggtgtcaaaggaggggaaagaagggtgggtgttgctttggatgggactctagtgagatgatattgtttttaaaaagtaaagaaaatcaacagcatccttcattattacaactgccaaatgcagatgatagctgggctggtagccacccccaagcgtgctttctagtgctccctgaggtggagtggagtactgccataggtacaggcactcctcagtctggcctgagagtggggcagggcaacccttcggccagtagtgatgaccatacctcttsccaatccccatccccaaccctttcctgggcttagtatggggcaattttcatggcagccaaaccactagtggcctgatgcccatgtctaaatgagcttgccttcctctttgcatcctcagcggaagactgtctactcctgaccaggatccccaaggtcaagtgcctgcgcaatgatcggcgggaaggtgagtccttgcaccctgggtcccaccaagggcccatcttggtgtcatcctgtgcacttccccactctctcttggtgccgtggcacaccaagccaacatggtcctgctgcattcctgatggctgagaccaggttctgcagaagactctcctccttcccagatcagccccatcaaggcacaactgtaggcaagttgctccatctctgactgccttagctgtctctcctgagaaatgggataagacagtccctttctgccttgcaaggtgattgtaaggattgcatgagacaggctgtgtggaaaggctttgagaaaaatccagaagcataaagcagatgtgatctcacttccaatccagatgtgttttggagtagctactacagcgtggcattgtgcatggcactctaggggacacgaaggaagtacaaagcatagtccctgccctcggagagctactacatagccaaggggtcagaatccactgcagccacaggctggctgtggttgtgtatgaatagcatggatatcagaggagagctggagtgagcagggaaggcttccatggaggaatgggcctcaatggggtgtgggggcatcatgagacaggtaaaggggagcaagggagggcatgccagcttgtgcactctgcaagcaaaggcatcagtcaggggtatgggcatgcgcaatactaacagcccctttcctgaggtctcctcccctgcgggcatccrgtttgctactttcagtccttgtactcagcccactgtgcctgttgtacagacaagggaactggggtttaaggagcttcagcgatttgcccagggtgatgaatagagcagccatggctccaacctgtggggcccaacccaaaggccagcckcctactcatactcatactcccttcctgcgagaccccaggcctggtcagcatggggaatagatggagtgaattgagatgatagaagaccttggaagccagaagaaagcattgacttcataaggcagaggtagcagggagccactgaggttttagagtaagagagggatgtgattgatatgtttaaaataatcccagcactttgggaggctgaggcgggcagaccacttgaggtcaggagttcaagactagcctggccaatgtgctaaaaccccgtctctactaaaaatacgaaaatatctggrtgtggtggcacatgcctgtagccccaactactcaggaggctgaggcaggagaatcacttgaacgcttgaacccaggaggcagaggttgcagtgagccaagattgcgccactgcactccagcctgggtgacagagcgacactcagtttcgaaaaaaagaaagaaagaaagaaagaccagtcaggccaaggggccacaagaataccagtgagggagaccttcaaaccagaatggaagtggccgaagttaaatccttcccaagccactgggctgtaggtaccgtcaggtctgggaatatgctgtccctggatttgacaacagtaaatgtaaatttatgactcgatgctttgtagacacttttggagtggagattgatgggcttttggctggctggcgggctggtaggcagctagaggcagagtctggggcagaggcatggctagggaaatgtctccaaggagctgcttatactcagagctctaagagtgaggcccttccctcccacagctcacagggcacacatggccactctggcaggggcaggagaagctgggcctcctccctcctgaccaggcaggtctccgcccagagcagagtgctgcccaaaatgaggctggtgaggctatygggggacaggcacagaagaacagaacctgacatgtgtgggtctcccaggcaccaagctctgtccctgtcgtcttgtttgatcctgacagtcagggattattatctctctgaatcttatagataagaaaactgaggctcagagcggttaaataacatgctgaaggtaaggaaaggggctgccatacaaacttaagcctatcttagtctcgaagattatctccatgctacacataggggtatggatggaggggacgacccagaggttcccatgggaaaaagttttgttttctggttctcctttgggatcaaactactttattgcactttccacgctctaaactgtgactgttcatcagtgtgtccctagagcccagacagtgactggcacatagagggcactcggggtgtgaccctggagtgatggtggttgatgggtggataagaagaagcaagggagggaggcaggaaacaagcagaagtataaagtcaaatctaatcacaataactcaggaagcctcagcccctgaaggagaggagagccttgggactttgggggacaggtgggaagccagttggcccagtcccagcgccaagccctatctactcctcttgtagggctgatccggtcccgagtgcrtggggcggacrtggctgcagctaccgttctcacctttctggatagccactgcgaagtgaacaccgagtggctgccgcccatkctgcagcgggtgaaggaggtgagccactgtctctggggagctgggcgtccttggggactcagccactacgttcctggcaccgaggcctatgggacagtatttgaagctgggcaggcatcgtaggaagcccaaatagtctacttccccctgagtgacttcaccttattgagttttctcatctgaaaatggggataattgtcataattatcccactgggttattgtgagaatgaaattggatgaaagcctgggtgagctacaaagctcctgctacaaatgggtgttgtttttctccttggagagttaggatcctgtgctgggagagcttttgttcgggctgggaagcccttgcaagagggagcagaggatgttgttctcaaagagaggagagggtaggagggcccctgccacgtgcctactgttctccagaacagggaggatttggacagatggcagaaaaggatgaggtgataacaacccgaccataaaaagacaaataacccaatttaaaaattggcaaaggggcctggagcggtggctcacccctgtaatcccagcactttgggaggccggggagggcagatcacctgagatcgggagttcaagaccagcctggccaacatggtgaaaccccatctctacaaaagtacaaaaagtagctgggcatgacggcgggtgcctgtgctcccagctacttgggaggcagaggcgggagaatcacctggtcccgggaggcagaggttgcagtgagccaagatcacaccactgcactgcagcctgggcaactgagcgagactccatctcaagaaaaaaaaattggcaaaggatttgagtagacattttttcaaggaagatatagaaatggccaataagcctaggaaaagatgctcagcatcattagtcattagggaagtgcaactcaaaaccataatgagatgccacttcacacctaccaggatggctagaatccaaaagatggacaataacaagtgctggcaaggacatggagaaataggagctgtatcaggccattcttgcattgctataaggaaatacctgagactggataacttacaaataaaaggtttaatcggctcacgttgtacaagcatggcactggcatctgcttggcttctgaggaggcctcagggagctttattcatggcagaaagtgaagggggagtaggtacctcacatggcgagagtgggggcaagagagagttgggtggaggtactacatgcttctaaactaaccagatctcacgagaagtcacttactgtcaggaagacaacaccaagccatgaacgatccacccccatgacccaaacacccctaactaggccccatctccaaccttggggattacatttcaacatgagatttggggggataaatacccaaaccatatcaggagccttcatatattgctggcaggaatgtaaagtagggcagccactttggaaggcagtctggcagttctgcgaaagtttgaacataagttagttagcatatgacccagcagtggagctgctaggtgtagacccgagagaaatgaaaacatatgttcacacaataacttcagagcagcactattcagaataaccaaaaggtagaaaaaatccaaatgcctatcaactgacgaatgggtaaataaaatgtggtgtatccatacaacagaattatccagacattaaaaaaatgaagaactgatacatgctacaacatggatgaactttgaaaacctacgtgaagtgaaagccagtcacgaaaagccatacattatatgattcctttcataggaaatgtccagaataagcaaatctatagaaacagaaagtagattgggtttcttgtcggggtggtgaaatgttctggaacaagatagtggtgatggttgtacaatcttgtgaatatactaaaaaccatcaattgtgtactttaaacctgtgattttatatctcagcacaaaaaaaagtctataaaaaggatgaggtgaggccctccacagagcactgaaaaaccatcaaaggtctctgytgatcagccccatcccgggcttccgttatcctgatctagggtgggaactgaggggcagagctggattccaagttccagacaagaggattttgggggtgaaagcagagtggggaaggagaagaaagaagaggctctgttccgtgtcccccatggagggcgaaagatgagaaggctcatgaagggtgatgaagttttacatgtggtatatgacataatctaccaccccaaaaaagaggccagcaaaatcaacattattcatcaaggttttggatttggatttgtgttctgggaggtgatgcggggagtggygagtctgaccttgtaacagtggatgtggtatgagagggatagcacccagattacatggggacctcggagcccctgccctccagctgctagtagtcccattgggaagactcaaacaactataatacaaaggtaaatgatattaataaagcaacagttcagaccagaaatagaagagccacttcaggcagcacagtgagtcactgtcccaggaatcatctaggctgtcattgtaagagtagcttaaaagaggaaaaaatccttcagcctgcagcagtcaaggaaggcttcatggagtaggtgagattctagcagggctcaaaataatgtgtgaggaagaggcttggagagtacatgggagccaaataggaacatccaggagcttgggtgtggtgatgcaggacagctgccaggagcctgccagggttgaggggtggccctgggcataccctgcaggaagtgctgagtgccccatgtctcagagaggccttctccccagagcaggcagctaggcctttttctgcagagaagtcccaggcctcacaccatctmacatctctctcctaggaccacacccgcgtggtgagtcccatcattgatgtcatcagtctggataattttgcctaccttgcagcatctgctgaccttcgtggaggtgagttctgctcccnggggtggggctgtagacatgaaaggaggtaggtgaggctaggcaggcaaaaacccttgcttgctgctctttccagctgtgccagagaccctcatgaacaccccttccaccacctccaaagagaaaatgaagagggattgggtgcagccctgggactggggacaaaggagcagagctggcagttgcaggcttctgatacaatcagtagcagagccagactagtctctcatctttccctccctccaaatattgacactttcttcccaaatgctgccagcctagggatcatggccacaagtcccggcagaaggccatgatgtgacagctgtcttgaggatggggagtagggagccctcagcctcacatgacttcctaacacatgcgccccagagatggtcaagaccagtgttgtgtatggcaactatcagccacatttggctattgagctcttgaaatatgactagtcttgaaaagtgactagttggaattaagagtgctataggcatagaagacccacaggttacccagacttagtgtgaaagaatgtaagatacctcattagtaattttttgtattgattacatgttgaaatgacaatatttttgatatattacattaaaaatatttcgtccaaattaatttcatatattctttttctgatgtgattactagaacattttgaattacgtatttggcttacatttgtgccttgcattatatttcttttggactgtgacgggctgttcagtacagtagataatagtcacctttggttacttaaacttgcattaattcaaattaaataaaattaaaaggcagttccttaactgtactagccacatttcaaggctcagtagccacatgaagttagtggctaccatatttgacaatgcagatacagaacatttcatcattgcagagagttctatggaactgtgctgctctagagaatctgttgctgggagctggcgggcacagtggatttcctgtttgggatctggactcccagtatatggacccagccattagttagattgtgagtctgagtgggattctgaagggagccaggcatttcccctttgggaaatcacctcagggctttggcactggcagctgcccctgccttgaattccctttctccaggtatcttcatggatctatccttcattcaggtctctactccaaagtcaccagagagcctttcctgactattctaactaaaatattaatagtatgggcactccttctttgttttcttcttytttttttttttttttagtactttcatccccagctgacatagtctccactgatttatttatctttgtagcttctgtcttacccagtagatggtacacttcctgagaggaggagcttggctcattccgaatgaaggagggactgcacgaagagcccagggctctgatcaggggagactccgaggggtggtggagtgaagggtctcagcagcccgcagctctgccctgagctctgtcctcaccttgctgtgtcccttagggttygactggagcctgcatttcaagtgggagcagatccctcttgagcagaagatgacccggacagaccccaccaggcccataaggtcagngctgcggtgggctctgggggaccccttccttccctgggtcaggggcctgggaggctcttgggaggctgtatcggtcgcttgggctcctgaggcgcactaagtgctgactctgttctgggccntcggaccctgtatgcagggacagcgaggacagaggccacgggaacagatgtggggggccagggagctggccagacatcctgccccagtgactctgcagggagggatctagaggcagacggtcttgggtcctggggccatctaaagggcctccttgcttctccagctcacgtgttgcgtcttccctctccttgctcccaggacgcctgtcatagctggaggaatcttcgtgatcgacaagtcctggtttaaccacttgggaaagtatgatgcccagatggacatctgggggggagagaattttggtgagttgggaaatagtgacagtgaaaataacagtagcagtaataaccacagttaaccctgacagagcactttctatgcgtgaggacctgctctaaggactttacacacatgaggtcatttaattctctcaaggaccctctgaggtaagtaccatgatctccattttactgattttaaaacccaaggcacagagaagttaagcaatttgtccagagccacacagctagtaaacaaagaggttctatttagggggagcccgtggtcacatggctggacatgtgtgtggaagaacacacaactgtatcacagaccacagcttacacacgtggctgcttccctaccagcaaggctgggaggtgtgtggtagagggtggtggtgaaatgctaagtgatggagtcagatggcctgggtgcaaaccctgaccctaccacctgcatgctgtttggccctgggcaagttaaagccctttaaagtctgagtttcctcaagaggttgttatgagtactaaatgaggtgatgagttaaaggcaggtcacagtgctggtggccactgtcattaggcagtctctagactcagaagcacaggaagctgcccctccctgccctgaagcagcagcgaaggagacagaggtgggggcaaagtgttccagtagggagctggagggggctggaccctcacacacttgcttctcagctcacggtgttggggccacagagtaccagggaagggttaccaagtgggatcggagcccaaactctggactccagtatgtgtgggctggcaagccagtcaactctttgaacctcagtttcttcatttgcaaaacagggttgcaagtgagatggaggttagataaagggtgagcatcagttagggtcctggcagaatacggaaggtgcaaccgacttgagtgtttattaaaggkcttatttacatggtgcgggcaggatagagggaaccatagggacagcacagtactgggcagggctgtgacttctgggagctgtaaccaccccaaggtctgaaagacagggtgagggagcaccccacgatggagctgtggtcttggggcacatgcagccagcccatggcaccaggtggagagtgtcagggctaaacactcaccctcactctacccccaccccgtcatctcctgctggtgcctccctgtctgcctgaggaagggaacccagcagtgcagcccccaggggctgtctcacaaacagcgacgtggagacgggggcggtggggagcaccattctgggggtctccaggagcaggggcaggtccttggtggcctgttcttgccctcttggtgggcccagtccttcacagagccctctcccactgcttccttcttcttcctgaccaggtgttctgagcaataactagcactggtggtatctcacccatttgacaggtagaaagactgaggtggatgctgccttctagatttcagtccggaaactccacatctaatgggcgtatgcagctcctttaccagagccacttatgtgttgtgggacgttggcaaaggcacagtmtatgtctctgagacgttaggagcagggattctttaactctttctccctgatgaggaaaatagcagtgagggggcttgcaacaggcctgatcccgactcaaaaccagctggagtgggaatgggcatgggactcccccagctttgtaacttgcttttggaggctgtttccaggcagggttcagagaagtaaattctgggaactggggtgcagtgacccctccattctgacccctttcatgtgttttgggtccaagtgacccgctttgtgtcttcaatctcggcctgaagggctttggcaaagccagtttcctgtgaagacttggaaagctgggaaacccacagtctccttgctctgcctccaaaggccattttttctttttcttttttttctgaggctagagacagagaaacaagtgaatgatcaaacagctcatttcaaactctgcctgaggcaagggctccgtggttggagaacttgaaaggtgaaccacagagtggttctggcaagggttttgtttcttagaagaaattcaaagaaatgtctgggctagctgcagtgctcagaygttcagccgctgggaccagttttgagctrtgagactcctgtcgctggtgggtttgagcctttccttttattcctttattgaaggaagggagatttccaaaccaagacgtgttcttttgtccccaaagaattccaaactcgggagcccagaggccaccttgagtggggctggcagatgtgcaaggttaggatccccaacaaagatgtgttggggatccttttaaaacatagattatgttgcttctgtgctcaaaaccttgcaagagttctcatgtcattctgaggaaaacccaaactccttactggctacagggtatctgcctttccctgcagccccgcagccacacccctgccctcacttcccacttctcccaccctgcctcactccacgtgggctgcacggcctccttttttttcagacagagtcttgctcttattgcccaggctggaaggcagtggcacaatcttactcattgcactctctgcctccagggttcaagcgattctcctgcctcagccttctgagtagctgggattacaggcacacaccaccaggcccggctaatttttgtatttttagtagagacggggtttcaccacgttggccaggatggtctcgaactcctgacctctcaggtgatccacccgcctcagcctcccaaagggctggggttgtaggygtgagccaccgcccccagccagcatggcctctttgaacttgccagctgtgctgttgcctctagggacctgcccttgccggctcctctgcccrgaatgctcttctcctgctagccacaggacttgctccctcatctgtttcaggtcttggctcaaatgtcccttttatagtgacaactcccctcatcagcctggtttaaaacatagtcttagtcctcccccaccaccatccactggccctcttcagctcccagcctgattcatttttctccatggccctaactaccatctgatatgctgtatttattttwttttttatttttatttttttcwttttatttatttatttatttttagagacagagtctccctctgtcacccaggwtggagtgcagtggcacgatcttggctcactgaaacctctgcctcccgggttcaaacaattytgcctcagccttccaartagctgggactacaggtgcatgccgccacacccggataatttcttttgcattttagtagagacggggtttcaccatgtggcccaggctggtctcgaactcctgagctcaggcaatctgccgccctcagcctcccaaagtcctaagatcacaggcgtgaaccaccgcacctggctgacatgctacatttttatgcattttcttgtttacttgyatttttttgccccttattttatggagttcccgtcttctcacttccctgctagagtacaagggaatctagagcagtgtctgacatataatgaaaatttgctgagtgaactaaagaatctgacagtgtggcttgctggacacaatgtgaacttgatgctgcacttctgcaactgaatatttgagtgaccttggagaggttatttaacaactttgagcttcaacgtcctcgttaaaaaaaataaggctaaaaatcctgacttcacatggttgcagtgagaattagatattggatagaaagagcatggcatgtagtaagtactcagtaaatggatggttactgctattgttatggccattgttgataataataacaatagttaataatattatagacattatgggctgagtgggatgaagtgacttaactagcataacaaagttgggatggcagaaatggaaccagaatgcagatcttcggccccccaggactgtgcccagttctacgccttagttgctgaggccaaacacagagctctgaccaggagaagggacggatgcctggcagtttataggcagacctagggaagcccattgatatagccatccttacatgtgggtccaggtatgccaagtgtccggtcctggccctgaaccacatctggacgtcacttggtgcacacaggctggccagaggtgggctttagtcctgcttcctccactctgccctttgctagttactgggagggtcctgaccagctatgccacgtgagagcccccaggcctggttggagatcatgagtgtccttagagccagctgaggagtgggaagagactatagggttaatatgaaggaaagtacgaaatcaaaagagattatgtgagattcagccagctgtcaaggtgggtccttaccataaatggcaactggtgagcggagatcagagtggtaacttttgaggtccccttctgggcagcaggatggccactgctctcccgacaccactggggaccacagtcatccacaaaagctggttcagctccaccaccgctgtcaaaaggaggcatggctcaagagggccagtgagagcctgtacaaggagaccaactgggtcaagagggaggttggggccagcccaagaggtgycagctggagcagcctgtggtttggttggtggctggttttccgacctctcaggtgcacagagctggctgacgagcagatgtgtttttccttagctcatgtctgtctggggctttctagacagagcctggaaatgatgccrctgtttggttgttttccttctacttatgttcttggtgttccttcaagctttttccactgctcttcctggaatgggccacggggatcatgtgtatatgtgtgtgtgtgcatgtgcacgtacacacgtagagtgggcagtcaggaacctgtgcaaggagtgggagcactccatttgagcaggcccaggagccccgaccccaacatgtacctccagtgagacaccaaagggaagggaagccagccccttcccaccctcacttgccaaggaaccccttcctcctcctgacggctactatttcctgcagagctctccttcagggtgtggatgtgtggtggcagtctggagatcgtcccctgcagccgggtgggccatgtcttcaggaaacggcacccctacaacttccctgagggtaatgccctcacctacatcaggtaggtcaccgagaaaggagcacgggactcagaggaggacaccaaggcccaagcccccagccttgccagttatcactatgtgactgtgggcagccacctcacttcttgggcctcagtttccccatttgccccctctggtaacatcctgggattgcaggtaccttcaggggtggagggagttgccaccaggtctctcttgccttgagactcatatggacttcctttgtccatatgagtctcggaaaattggccaaatccccaactaagccatgctctccactcatggagccccgagtgctggkcatggatgcctgtgccccaaccctgacttgatcaaccatctgtccatccctatccccagctacagggtgcactagtctcaagggagagtgggtaatgtcctagaagaccactccacggtctgctctcctgaggaggttggcaggggaggatgagggacttgtcatgagcaccctcgtacatgtggatggttcttcaccttgtcgagctcatgcttattcgtacagcgtytggagcagcagctgcccaagtctagctgcwtacctacaaagtcgatgggtattgacagactgtcttccaaaaggaccgtgctaatctataccatccaagtatcaccttgctcctgagattctcatcgtcctgtattcatggatcgattaatcttgatcctgaccgctaaccctgttgcttccctggtgaccttattttgctctttcctctccttttaggaatactaagcgcactgcagaagtgtggatggatgaatacaagcaatactactatgaggcccggccctcggccatcgggaaggccttcggcaggtgggcccccccagctccactgtctgactccctctacccacattagcacaaccccagcaaaatacgaagtggtatgtacgccagggaaccacccgccacctccccagccactgaggtcccactctaatgggcttctttgggtcctgggagggaatgcaaccgcagagacaagaccttaggctttgaggagcgtgaaatctcatgggagagaaggctcgcttatgaaaaagagctgcctgtccacagctgcctgcagaagaacaggcatctgtggaactgcttaggagggggctgcctgcagaaagcatttggggttctgcctccactccctgttcaaaattgagatctgttagcctattttcctgtcatggactgttaggactatggtctagttaagcattttcaaaatgcagatgggttgtgaaatcaatttagtgggtcgtgaccagcatttaaaaagagagagagagaagtagaaccctatagattagattagtacagagcaggatagaaaataagagttgattgcagttaagggttagtattgtccttatgaaactcttatttccgttgtgggtgcatgtgtgtgcatgcatgtacctacacatgtacagttgcccctctgcatctgcaggggatttgttccaggaccccccacggataccagaatccacacagatgctcaagtccctgatataaaatagtgtagtatttgcataccctatgcacaacctcctgaatattttaaatcatctctagattacttataatacctaatacaatgcctacacatcacgtcatttgcatggattcaatgtggtactcgatgcgtggcgaattcaagtttggctttggaaccttgtggaattttttttttttttctagatggagtctcattctgtcacccaggctggagtgcagtggcacaatctaggctcactgcaacctccatctcctgggttcaagcgattctcctgcctcrtcctctagagtagctgggattacaggcacgtgccaccatgcccagctgattttttgtgtttttaatagagatggggtttcaccatgtcagccaggctggtctcgaactcctgatctcaagcgatctgcatatcttggcctcccaaagtactgagattacaggcatgagccactgcacctggcctgaaattttttcctaagtatttttgatccaaggttggttgaatccatggatgcagaacccacagatactgagggctgactgtacatggggcgtattatattacaatgtaagatagttatctcctacttaagcttgtggtcagaaaagtttgaaaacactattaatgatgatcaatgaatcttctccctatttattcatatctatctccctttttttgaaaaaataagttatgtcactaaatatttcttgtaatgaggaactaacatttacttagcacctgccctgtgctaagtgcttcacacttaattcacttgattctcacaaaagccttctgagatgagtggtcgtgtccccagttgaatgtagaggaaactgaggctcagatagctggtgacgagggccgtcaaccagtggccattgtggtgggtgtacctgaggaaggtgaggatggcggtgtcccaaggacacatctaatggttttatttgccaacacatctaaagatgtttaaagcttgctcttcctgctgttagaccttcctcctgtacttctcattaattctgcaaagataaagaccagttcatggtctgctaacagaggtcttaaggagtgagaagccgagagaaaggcatggtcccgtatggtctgtgctcaccctgaaaggtgagctccaggcaggaatttgatgagtgaggcatagccaggagacctgccttgagcttgcaagtcagagaataacatcagataagtggccagggctggacatggcaggctggaagtctcctggtccttgcctgcctgagatagttggggctgggggacaggcctctggcatcctccctcgggctgccttccacactggcaggccaaagcccaagccctgcctcctcctacagtgtggctacgcggatagagcagaggaagaagatgaactgcaagtccttccgctggtacctggagaacgtctacccagagctcacgtgagtgcagccctcatcttgtgcatcccccaggcgggtagggggtggttggggccagcggctttggtcccaccccacccttagatctcctcaacactggtgatctggctttctagctgccgggttttatcttcacgtgacggctstgggggaactgagagggcattactaggggttataaattaggtgtggtgggaaccgaatttttaatggtttcagatctagatatggacgttatccccttaggaaacaacactgcattacatagcaaaggctgcagagacattcgtcccctttagccctgttctctcccttctgggagtttatcctaaggaaataaagcaaccaaagcagaagctgttgaccagcagatcaatagctgtggtgaaaaaatgagaaaccgccaggcacagtgggttatgcctgtaattccagcactttgggaggccaaggcaggaggattgcttgagtccaggagtttgagaccagcctgggcaacataatgagaccttgtctctactaaaaatcaaaaaattagctgggcgtggtggcacacacctatgagtgggaggatcacttgagcccaaaaggtaggggctgcagtgagccctggttatgccattacactccagcctaagtgttagrgtgaggaagagggaagrtgaggggaggtgaggggagggagggagggaaggtggaagaaggaaggaagggagggagggagggagggagggagggagggaggraggaaggggagagggagaggaaaagaaaagaaaaggagagaatcaacaataggggttggcttcagtgaatcactatacatagatctaaacaaatattatgcacccattaatattataatcatagaaactgtgaagaaaacacagggaaatgtttgctctggcaaatgagaaaacaaaatgcaaatgatgtgtgcactcgagctgtagttacctgggaatatgtgtgcgttctcacaggacagtgggcaataagctacgatggccttttcagtgtctcagttacatccacgtggttcatttcctcaccttcctcaggccttgactcaaacgtccccttcccagggagactttccctgaacactctgagtttgcagctccgcctccctccccagcatcrtctcctccatgttccttgtagccgttattatcatcggcattatctggccaattaattttgttgtatctccctgarcttgcctgtaagttctatgagggtggaggctttgatctgtttgttcactgctttatctccagcacctggaacagtgcctgtcataaaatgggcactcagtaaatatttttaatggaacaagttgcacagtccgtacgcctcaatcatgtctaaaagccgcatgcgccctctatagctgtcaccttggggaacacgtgtcccaccgctgccagctttctctcaaggatgctgccatggctttccagaacactccacccctcagagcttgcatatccttgaaagaggcaaatctttgtcctttgaggacaggtttgatttttggccaacagccaccattaagttgtagccaagtgcaatgaataagctagagatgattaacccwgataattataatcccaggtcccaaatacagcatgactctaaatgaacaagattaaactgactctaggagcaatttccaagaagttccagaacaatgtgagcactggcagtgtcactggaagaaagtcagtggcctagataaccccagctccctggacactagctgtgatgggaagaacattaatttatgaaaatgcaacttcctgaagtggtcacttctaggggacagtgttcattcagatgcatcatttctgagaccctgaagaaaaaagakcagtcacttctttacactgtgtcagcgttcatacaacatttgggtgaagcccactagttccagccctagggcaggagctgggcagcctgtgggaagagtgggggaggcctgggaatgcccttcctctccaacctcagtgccctgccacagggtctgatgacacccccaaggaccaaggggaagaagtgtctcataactatcagaaacctggctcgatcacaaggcaggagagtagatgaaccagctacgtcgatgaggagcagaagtcctcttctgtttgttctgccactgtgtgaaagttaaaataattttttgttgctaagatggaaaccccagacctcattcctgtctggattactcacccccagttcctaggctgaggggccaggagtggatcratttgctrattagaaaggggacccataggcctgagtgataccaactttcctccaaacagggggtccctaaatagttgcctacacttgcaaacagtcagtggggagaccgaggaggctgaaagaagaggcttttgctttcctaggcctgccgtggctctgccccttctccaggttagagctctgcagctggcctcaggaactgctaatttattacttgcattaggactatcaagaacagttgttcaggctgtgcgttgcacaagcacaccatgtttgtgagggtgctagttgcatagtagacattgcacattcatgacactaattccaagcaaatggcagtaagcattcttctaacaaaaccagtatgtcagttttctaacagaaagaagtagtgtcttggggaatggatctaatggcagcctgtgtacatagaagagacccatagagaaggaagtggatgcagagtttagagggctgctgacaaacaggacagcttagcctggcactgctggggagctggggaaggatggtgacgactgctattccagctgctccaggactgctaccacgatgacagcttaggagctgcatctgatcttgagattgctcccaagcctagggtttcttccgtaagcatcactgggcattgccactcttggtcagtatccacctcacctctgaaagctgatcagcttgcacaacaccctaagcaacaagggagtagcagggtctggaacaacccctggccctcgtgctgtattccccctgtgcagttatcaaagaggcctcagtacccatcttgtctctatagagaagggaaatgtaacacattgctcctggatgaggctgagagtgtggagctcctgccctccaacatgcttgcacatggcaggggttgcaaactcaaattcttacagtggtcaggcaggtgatgtcaataagtcaaatgggtaaggatgagacaatagagagttgtrgggactggggcaaagtgcgatgcagaagccccactcagagggggcagctgctactcactgcagtggattagtaccattctggaatgcaagctcattgtggcctgatcttccaatttttaagagaagctagattcagatttgaaggtttctatgtaaccttaaaatcattcaatattgccaactaattaaaagcaacaaccaccacgctatgcaggtcagaccatgtccagggtccagattcagcttggcagccagcagtttgccacctctgctagagagttgcaatgcctcccaaagggagtctggagaggcacaggctgctgccaggggtgtgggagaggaattgaaagggtctctctgagcctcctgtgagcagatcagttctggaactttgcggcttctagccacccctgaggaaggaagacctggtttggtctagatcctgcagatgtccacatcaaagaatgccaaacatcttataatggcccaaccccccaggcccagattgtttcactgacagaggtaacaggaggcagagaaggcacacacrctgtaatccctcctgctcccctgtaactcccaggcctggtgactccttaatccaagaacgaacataacctgaactcaggtatgcaagcctgcagcagctggggccggcagcttcctcaggtttattacccataaggtgtcagtgtgtgtgtgtgtgtgtgtgtgtgtgtgtgtgtgtgtgtgtgtgtgtgtgtgtctgtatgtgtgtataagcatattttcctgggcatataaagtgttttaataatataatattttaaaacttgcctgttttacttaatagtgtgctgtgaacatttttccatactagcaagtatcatttcacagagtcattttttaaaattttattttatttatttactttgagacagggtctcactctgaagcctagactgacatgcagtggtggcattatggctcactgcagcctcaactacctgggctcaagtgatcctccaaccttagcctcccaagtacgtgggactataggcatgtgccactgtgcctggataatttttttttttttaatttttgtagagatggggtctttctgtgttgcccaggctggtctcgaactcctggtctcaagtgatcctcctgctttggccttccaaaatgctgggattacaggtgtgggctaccatgcccagccataagtcatttttaatggctacagggttttctatcgtatggatgaatccgaatttatttagcccagctcctgttgttagatatctagaaatttctggtgttttcaatataatcaaccactctgagatgaatgtcttttacaacatttataattatttttgtaggatatgttcctacaaggggcaatattggtcaaagatgtgtgcatttttaagggctttgagacacaatagcacactgccctcctgagaagctgtgctaatctatgctctcaccaggaaggtgtgagaagattcagtcccacagctgttgccgacactgggcattgtcattaaattaagtgtgtgtgtgtacaaatgtacatacatggtaaataaacattggtgactctgatacgtagttctttaatcattactgagattaaacacattttcatatttgtgtttaatttgcctcttcaragcgctcccttccctgtcattttgggattgattattgagcatgcattttggccccaggctctcctgaggctttcctctttctggactgaggggctctgtttttccagcctgagctccgcccatggctcccccatcctctatgtctcaggcccagcctccagggcagagggtcccagagccacttggaagaacccctggggccgaggcccagtcttcccagaggccactcctgctcctcacctccccctgctggccaggctgctcccgggccccttcccacggagacctcggcgctcccagagctgatrggatgctgacgtctggcagagggtgtaggtaagccttggkggggaaagcacaagcctgactgctgccttttctctcagggtccccgtgaaggaagcactccccggcatcattaagcagggggtgaactgcttagaatctcagggccagaacacagctggtgacttcctgcttggaatggggatctgcagagggtctgccaagaacccgcagcccgcccaggtaaggacctcgggtaggaatgggagtgggagagagctggaggcattgtccaggagtggggtgarggacttccccctactcattctcctcctctgtctacatcttacacaaacccactttgccaggggcccctagaccctgctcctacacattcatatcccctttccagcctgtcacttgggtatcctgtgtgcaccacctgctttgttcttgccgagggagaagagctgcccagatagtgcccagttgtctcctgagatccagctggggtcggctcatgtgacaggcaatgtccaagactcctgtgcgcacatgggtgcaacatatgagtgttgcacccacatcgaaactaaagcaggtcatggagactccagtgaggaccagctctcagctgccttggttccatgtcttgtcattctctctcatcccccacagtctcttggcacagccctgactgccctctggccagctccagctaagctcccccaccccagcattttattaccaaaaaattcaaacatatagaaaaatagtaagaattatgcagtgaatacccatacatctaccctagctcctacaattatttgtagaaatcttacaaaaatatgccgtgtttttgctttatsccctatctacccatctctccacccatcgctgtactttttgacttggcctttctgctccctgccttgcaggcatggctgttcagtgaccacctcatccagcagcaggggaagtgcctggctgccacctccaccttaatgtcctccyctggatccccagtcatactgcagatgtgcaaccctagagaaggcaagcaggtgagtctccttgcctctggcccagaggcccagcagcccgaggggccatgcctcagggtggcagaccttggcaggagagcccctgattgactcaaataagcccttcagagcgaggatctgtggggagggggagcaaagtctacatctaggtcaagccaattattctgcccatgaggaaatacttctttgggtaattatttgtttaatgccatcctgccaggctgtgagctccatgaaggcagggaccacttgtcttgttaacactgtatccctagctcctgacaaccaccacagttcaaataagtgttagcttttactgacagtctgtgctagaagtttgaaatagatcatctcatctaatcctcccagccacccagtgacgtgggttctagtactacctccattttataagtgagtaagctgaggctcgctgaatctaaagaatatatgtcagatcacacagctgagaaggggtggagctgggattcaaacccaggtcagtgacttctaggcccacagtcttaacccagcacatagtagatgttcaataagtatttcttgactgttggcagactagggaaactgagctccagacacagtgatgtccaagctggcatgaccagcctcacgtgagcactgctttttccattgatccgacactctcacccacactgtcaccactaatcctgggagacaggtcagggtcaaggaagaaagtgatgcacagagaggtggagtcacttgctcagggtacacagcaaccagtgacagtggatttccagaatccagccagctctcttctgtgctactcccttcctgtcttggagggctccctcaccacccagggaatgggacccaaggcccagaggctgctccagcacttcccctgctcaccctcctcagaagccctccctgtgcctgccactggctagcctgcctcagtcggtgcaagcagtgaggagggtgcctgggtctctgatttggcctgcatggttttcctcctacccctttttctttgcttgggtcagcacgttttttaaaggatgaacagcagtttgctgtgccattctggaaagcagccacagcctctccctccggcctgtgtgtgtctgagggatctgtgtgcccagcccacttgctggacctgtgggacactttaagcrcttttggatggtggggggatgcagcccaccctcggccctgccctgcagtggggctggtgcagtgtctcctgcacctagagcacccacctctctgagggcaaatccttgagcccacgcccaccccctcccactgaggaattatctccgagcaaagcctccactcaattgcccctctggggctgaatcacacatttccccctttgtgctgacccagcctacggggtgtgtaggtatctccttggccccattcattctgcccctgcaagtcctgccaggctcccgatggcattctgggtrcctgtgcccctcttctcccaggaggacaggatgagccagctatcccactgccaatgccttctggaatccgggcygtccttcttggtcccctgctggtcctrtttccaaggctagctgggtttcctgtatccgagaggctcctgtgcctcagacctggtgtgatgragtcagcaggccccagctcagtcttccctccccctcccttcactcagtctcctcacttataaaataaggggctccctcccctgcttacctcacaaggaatccgcaagaaccaagatgtggagatgggacagtgggtgatgtgacattgtttctcagacaagcccagaattgagtggcctggagagtcaagaagccctgagattgtgcctaatagcactgataagaagtgagaatcccgctgtttggggagcacttcctaatgattgggtgattcagtcattygttcatcttaaaacaaaatgacggctgggtgcagtggctcatgcctgtaatcccagcactttgggaggctgagatgggtggatcatgaggtcaggagttcgagaccagcctgaccaaaatggtgaaaccccgtctctactaaaaacacaaaaattagccgggcgtggtggcgcgcgtctgtaatcccagctactcaggaggctgagacaggagaatcgcttgaacccgggaggcagaggtagcagtgagccgagatcgtgtcactgcactcctgcctgggtgacagagcgagactcagtctcaaacaaacaaaatgtcactgggtgcctaccttgtgccagagaatgtacagatcatgttggccacaaggatgaacggacatggtccttgacccccagggaatttgcactttagtggaagagaaagaagggagtaagacactatattacagaaggctagatgctgaggtagctccaagcaccacgactccctggggtgaggatggccatactctctccagctgggcattgctggaggtttggcctacatgaggtaaatgtcaaggactagaagagcatgaagaaacaggaggggggatccaaaggcccttgacctttaggctctctgcgggggccatgtgggcccagagaggctgggtctcagccctacccatcacgtccttgcattcccactgggagcccaggctccgcccctgccttccaccctgtgtgcacatccccccgcagccctagccctatccctgcagctgggtgggctcatctctctcccctcagctgctccctgtccaccaactgccctcagagccctctgggcttcctccacatggtcacaagcactcctgcctctaatcgaagacacggtgaatgagagaagatggaagaggggaggtggttgcaatgggaggcaaataggagagaaacccaaactagacctatcttactattattcttccctgagccttgaaacctgggtctctgcctctcatcccttctcataaatgttccaagcaacactccatcctccacccaggcacttccgtaatgttctacaggagcaactcttctsccccttgtcaaacccggggtcggggaggcaccaggaggtgaaggcactgaccaggagcccctgcatgactctgtgatgcgagacctccagtctcccaccaccctgctggccccacacttcatccctacaaagaaggcrgcttcccactagggggtgtagattactggcctcacaggtcagaagcttaggaagaataaatcttgtttacagaaataaaagatttacctaggccaggactgacaagctcaagtgcctacagggagctggtgggaaaaccccaataggagaaaagtcgggaccaggcaggaactatggtgacctgcagaacaagagccccatctaaggcagagggcaaatcctcagccccagcaactgatgccatgtaagaaactgggtccaataactacatagaagctggaaatgcagatttgcacgtggcaaccaagctaaattgtaaataaacacaggggacttctgctttgcctcctcctctgatctggacaggaacttctgcaaactacagaaaagcaagagccctgctgggaagggcagggcttaaagctggtgttagaggcaggatgggggcagcctcttacataggaacacacagcctgatttaaatgaggggcatgactgggcatggtagctcatgcctgtaatcccagtgctttggaaggccaagacaggtggatcacttgaggtgagacgttctagctagaccagcctgggcaacatagcaagacccagtctctgcaaaaaatttaaaaattagctgggcgtggtggcatgcaggtgtagtcctagctactcagaggctgaggcaagaggattgcttgractcaggagttcgaggctgcagtgagctgtggtagcaccactgtaagaacaaggtcatgcctaaaaagaaaggaggagggggatgtgtcctagttatatacaagggctgtgtgcatacatgtggaatgaaagtacaacattatttttttaaatcattgttttctccttcctcttctaacccatctctgttcctcctagaaatggaggagaaaaggatctttcatccagcattcagtcagtggcctctgcctggagacaaagcctgcccagctggtgaccagcaagtgtcaggctgacgcccaggcccagcagtggcagctgttgccacacacatgacggtarccctggggcctcctgtaccttttgcatgagacttcgggaccggaagggggttagggtgggggagtgcaaagtgggctgttcccatctcctcacatttctgccaggaccatcagcaaatacccaccatgacacacgttctccaaagcttgttctaggagggcgcaggcgggcacgccccgatgccctcagtgctgtcctggccttgccccgggagaggagatggtcagggtgctggactgttgctgggtagagactgagtaggtgcccctggccctttgtcctctcccttggcgcttcttggggctgggacaatagtgtgtggtctctcccttgttgcccggagaaagcaaggacagaagcccacacaggggtcttttgggtcatgaggcccagctgtgcaggcaggcagggccaggggraattgggcagcatggatggagaggctgaaggctgggaagagggaaggggagaggggcagcctgcaggggtagctgaagaacaggaaggaggtgagaagcccggtgacctgtcagagatgccaagcccagggtggcactgggttgggtggggacggatggtgtcttggcagcaaaggatgggtaatttgcaaatgaacatggatagaagagcagcaaagcaccaaaagaacaaggtctcttacccaggacacagtcccttccacactttaccagccccagggtctgagcccgacgctgcctcttccggtcctgtgcctgtgggtgcccacattcttagcaagaggctgcagagggatctttaggggaagattcgggcgtagtttattaaacagactccacttctatttggccatgtgtcaggctgagacctctctctcgggcattaatgaacagctagtgccctgtccctgccgccaggacccactgaaaggacgggtagccacacacatccctgagtagtcccagcctcrtttgtcatttttgactcctgctttctcaaaggtttttgcctctgtcaatasagcatcatgggtggttggaaagaagggaacttccyttctggaccaagaacagcccctaagtcattagggttcaacctcacccttattcccctccccgctacaggagcccctaagtcattagggctcaacctcacccttattcccctccctactacaggagggattttcttgaagggtcagctattgcactgtgctgggaggctggctgtggctcctgtttgtgaagagaactcccagttccttttcacagccgctgagaacacatccacacatctaccccacggccttgtcttggaactgctcctgctatccccacaccctgcttcctcaccccactggctcttgggcaaatgactgttggtaccaggaccctgggggtctcccctacaaagcagaccagcctggggcagatatacctaccacaggagccccctgtctttcataggccaaggatccacatacccatagagttcatggattctagagggtctaggaatctcttgaaattgtccctaaaatactgcatgtgtgtgcatacatgcattttcctggggaaaaagtccatggcttctaaaagaggtccctgatccccaaagggcctgaacctctgctctggattgaagccactgtctgcccaagctgccaccccctaatcttcctccctggcgtgctcaaactgccatcgcctgctccctccacacggcccttggggtcagcagccaagtgtctgtggtccgcagcacctgctctggagggctctccagcagtttcgcctcctgactctcaccagcgtcctctcggcagcactcccgtgcccaagygcacccctctggacttgccagcgcaggccccttcgctcccagggccatgctttgcctgtcctctgtcgtgatgtttcttccgcagccaggtgcagcctcagatcccctgttcatctgggaagcctcctgccacagcttaggacagaactgggcccagggcaaaggcctctccccagaggatggactagaaggcctgggccacactcgggcatggacctttggggctggggagcmggggctgcgcctgttgaatgtaagaggactgctgaccagagggccttcaagagggtctctctgtcctttgctgtggtcagatcaggctctgcacttatcagccggtcctttgtggcaacgcagccctgttctgtttttgcttttcctcttcttgaccaaagcatgtgccactagctgtccttgaggacctcgtctttatgaaacacacacctggaataaaaccacttcttacatgtccacatgcaccagcgccttcctttctgcctccaggcctagcccttcagcacaccctcccccgcctcgtggggaaagtccgggcctcctttctgtaaaagtgaaactgaacatgctcaagtctagccctgtcctgcacctggtagcttgctcgtcggcctccatgccctgtggtgccccaggaactcctgactgctctggtgggggccaacaggtggccctactgcaagggcaggccttggaccaaaaccaggaatcagcacaggtcaggtggagcccaggctcctgtggcctcattatgggattctacttggggcttagaaatggaaagcaaattgcttctccaaataggtattgccctgccgccgtgcttgcctttagccagccctctctccttccctgtgagccaggcctgtcccctcggagctgccctcccctgctctaccacacaagaaggcagtggtacaaattcaggcaggacatacttcctgggtaaaaacagcaaaataattctgaaaagagtcttaccagaccagctttgcttgattgggtagcagatgctctgcctaatgttcccatggaaaccaatggaaaacccccaccatgtctgtgatcagaagctgaacctacccaggtaaaaataaacgctgcttcaacatacatatgaactgcagctggcaggccagcacaccactagcctctcctggacgcaaccatttctgccctcagccccactttgccgtggggctgctgatctggagttacccagaacttctgacccctgggcctgaggagcctggagcaaagccctagctggctgcagagaatacaccttggctacaatgtccagcttggtctgggcttaggagcaagtcactgtaaaagaccttggctgcagcctccattcccccatccacccctccgtcctctcagggagcacagcccaccacccaccgcctactcagggctccctcctggcgcgctgagccccatttccactctccatctattttcaccctcagccttggagggctctggtgcttgcttctcctgagtcaggctctctcctcttgcttgctctcctccaaacctacctctcccaaagcccattttctgtgccacccagttttttccctaggagataaggctgtcagcctttagccaggccctggaggaatcagcaaaagccccaggctgggtattaacagttacgtcactggcaggagagtcccccgaaagcctatgggcagggcagcagaagggacttctgcaccagggccagactcccatttgtacagcagggagcagttcctgaggatccctgggcctctgtgacttggcttcagtttttacaagggctgttccccctggcccctcaggaaggctgtctccatctgcagttgggagaaataacctggacaatatgactgtcrtcccagggttccagcaccccaaggcctgcgggggatgtctcccagcactgcatggggtgtggtccttctcccaccagggaacaggaaaggaaacctggaagggaaaggctggcatttataacgtctgtaatttcattgccaacaatgttctcagtgtgtttggtatttgtgtgtccctgtgatggtctgagtcagtgctcctccagaaggagggggcaacccagccagcttctctaatgggaagaggtcttcactgccaggcacttaggaaagacctggagatggatcaggggagggcctactctcctgggcttgcagctgggctgtctgagtagccgacctggactgaggctccagagccatctgaggacaatttctcctgcttaattcagccctgtgaagcgtggagaagagtgtactaggggtgcggactcttgggtctttaagacccattcaagccaggcgcagtggctcacacctgtaatcccaaatattcaggaggctgaattgggagggtcctttgaacccaggggagttcgagaccagcctgggcaacatagcgagaccctatctctataaataaaaattcaaatcaacttcaaaaaatacccattcagctggatccctcactactctgccatttgccagctgtgagctctttttttttttttttttttgagacagagtgttgctctgtcacccaggctggagagcagtggcatgatctccacttactgcaagctctgcctcctgggttcacgccattctcctgcctcagcctcccgagtagctgggactacaggcgcccaccaccatgcccagctaattttttttgtatttttagtagagacagggtttcaccgtgttacccaggatggtctccatctcctgacctcgtgatccacccgcctcggcctcccaaagtgctgggattacaggcgtgagccactgcgcctgactgagctcttgaataagttatttcatctctcagccttgatttctttacctgttaaatggggtactcatagccgtaaaggatttttttgtgaagcctgatcgcaaagcatctggccctttccaaatgcttaatcaatatgtcattactattattaataaacattttctgagtgcctgctacatgccaaacactttgctaggggtgatgacacaaatgtaaacaagacagaaacggtccctgccctcgagaacaaatattctagcagaggagatggaccaatcagcagcaactgtgataccacatgataaaagctacaggggaaggcaggagctatgggagcaaggagagggagctctcacccagagcgtcagtgagttggtgctctctctccagaagatgatgcttccaggacagcttgaaatgacattccaggcaatgcctgcctcaggctggataaaggttggactggataaggtctggtgaagtccactggccacactagcagagatggcaattcagctggtaccttgctgggtggcctgggctttttaccctgcaggcagcattgtggtgacgtagaccagcctgttacaacaggagaattctagaaggaagctgtgggagccatttcaaccccaacagacacagcctgtgcttcttgagctagggaccattcctccagggctcggtattcttccttcgggaaggtgggtctagttggtacgggaattagtgatccttctctggagagaagggatactcatggtggaggcgttccaggaaagacttgtttttgcctggctctcaggttgcttctgatcccctcaagccatctgaaaacaaagccggtctttcaacaatttgtctttcaaatatgtgtctcttaagatgtggtccagataacctgctcagtatccctggagggattgtagacctgtatgctcctgggtctgacccagacggggaggcttagaattcctgtgtttgtattgagtggtccaagtgatgcgtttgcacatttaagtcccatgcaccaggaaggagagctggaggcccagagaggggaagctgtgcaggagagaatcagaatgagctgggccctggattgagtaccctgacactcagcactggactcactacaagagggagaagccagggggaaagaaggctacccttgtactccttactgtacttccccaggagccagaagaatgtagggaccacatcttggacccggaggtctgagcccagcagtggtggagagtccccagctgggagaccctcagttggatgggaaactagggatggcaggagagtctgggggactctctggcaggagaaccaggaggtaagagtctctggagacagttgctctagggccacctcgatggggtctctgtctgggcccctccccacagtttgagtcagagatggctctcagcatggcaggaggcttgctcctctccccgtgggtggactgcagttcccacaaccctgtcaggcagctgcagagctccaggtttctctgcccacaagggcaggggctgcccctcgcccaggatgactctgccttccagagccttggcctccctgggggtgggagtgtgggggatgctaaggttaaatcaggtcacagtaagttgtgggggcagcaggtggagcagcagagtggcactgggagctttctcttgggtgtgcggtgtggccttggttctgcagccatcaggtgggggcttgggactgacttctccttctgaaggatgctgggaaggtgagctggctttggcagtgcttagagctccggggggttccccctcctagaacatgcaagctctcacaccggtgcgtcatcatcacacccatcatcaagcccacagtggtatactgaacacctgccccacaaagacggtggaatgctctcagaggagccccatgaaccaccgatggttacaactatccaatgcctgatggcagacagccaggccaacctcggcttccactctctcttcctcaccctacaatcagccaaagtgacctgagtcgtgtagtgcgaagttgctttctgctttctcttgtttgtgcttttgctgtttcttctgccccatactttgttaactccatgagttaaatgctacccattttcccagacaagtgctgcttctgcaaggaaacccttcctgatcccccacctgtctgaaaagtacctctccagcttgcttcttcagggtgctgagcgttccttcccagcctgtcatcaccttcctccatacgctatggtgtgttcctgtcttctctagtcttgtcctcttttttctgttagattgtagctccttgctgacaggaaccacgcctgctccagcttcatacctcccactgctacagcacagaacctgcttctcagacttacagcaaatgtttgtttgctgaatgaattaattaaagataaagcattctaactgggtttgtttttgttttgctttgtcttttaatgataaagcattttggcatttaggaattagtacactgcacatagaaagcacgcaatatacacttgtccatttttcgtctcacttcttacaagtttgatgttgccacaactccaccctccctattcattagttgtctcaacagcaatgtgttggtgatgctgaggactgacacagattgagcactttctgggtacccagaatcttagtaaggctaccatatgcactccaatgaggtaggttctcatacactcactttatggatgaggaggggaggctcagttgagagaagaaatttgcccaaggataaacagctaggtttaaactcactctcacaggagcatgtgtcaatggtcccacagaccagccccttcagctgggaacttattagaaatgtaaactctgggccagacgcggtggctcacgcctggaattccagcactttgggaggccgcggtgggcaatcacaaggtcaggagatcgagaccatcctggctaatgtggtgaaaccccatctctactaaaaatacaaaaaattatccaggcgggtggcacacgcctgtagtcccagctactcgggaggctgaggcaggagaatcacttgaacccaggaggcagaggttgcagtgagccgagattgtgtcattgcactccagcctggcgacggagtgggactctgtctcaaaaataaaataaaataaaataaagaaaaaaagaaatgcaaactcttggccaggcacagcgattcctgcctagaatcccagcactttgggaggctaaggtaggaggaccacttgaactcaggagtttgaaaccagcctgggcaaaatagtgagacctcatctatactataaatttaaaaattagccaggtgtggtggtgcatgcctgtagtcccagctactcagaaggctgaggcgggaggatcacttgatcccaggaggttgaggctgcagtgagttatgattgcagcactgcacttccagcctgggcaacagagcgagaccctatctcaaaaagaaaaaaaaaaaaagaagaggccgattaggagactgagacaggtggatcacttgaggccaggagttcgagaccagcctggccaacatggtgaaaccacatctctactaaaaa

SEQ ID NO: 95012 - DNA, 23826 bp, Homo sapiens
ccaataaacgattcactcaaatacggagtgatttttttggatgctcattccctccaaatctcatgttgaaatgtaatcctcagtgaggtggggcctagtgggaagtatttgggtcatgggagtggaagcctcatgaatgacttggagctgtgctcacagtaatgagtgagttctcactctgtgagttcatgtgagatttggttgtttaaaagatcctggtggctgggcatggtggctcacatctataatcccagcactttgggaggctgaggcaggaggactgcttgcgcccaggagatcgagaccagcctgggcaacatagagagaccctgtctctacaaaatataaaaaattagcagggtatggtggtacacgcctgtagtcccagctacttggaaggctgagatgggaagatcacttgagcctaggaagtcaaggttgcagtaaccagtgatcacaccactgcaatacagcctaggtgacaaaccaggacattgtctcgaaaaataaaaacgaaaagataaattaaaaaataaaacattaaaaaaaatgaaagaggtacctcctccccctatcaccatgtggttcccctttgcctcctgcctcctctcacactggttcccctttgccttctgccatgattgtaagcttcctcaagccatcaccagaagcagatgccagtactatgcttcatgtacagcctgcaaaaccatgggccaattaaacctcttttctttataaattacccagtctcaggtattcctttatagtaatggaaatggactaacagaaaactgaaactgaagggtagggcagtgctataaagatacccagctttggagctgggtaccagacagaggctgaaagtgtttggaggtctcagaagaagacaggaaggtgagggaaagcgtggaacatcttagagccttaagtggctgtgaccaaaatgctgacagaaatgtagacagtgaaggccaggctgatgaggtctcacatggaattaaggaagttatcaggaactgtagtaaaggtcatccatactatgccctagcaaagaactctgctgcattgtgtccatgtcctaggcatctgtggaagttggaacttaagagtgatgacttagggtatctagtggaagaaatcattaagcaacaaaacatccaagatgtgctgtggctgcttctaacagcctatgatcagatagatgtgggagcaaaggaatgacttaaaaattgggacttatacttaaaaaggaaagcggagtctaaaagtttggaaaatgtgcagcctggccatgtggtagagaagaaaagcattttcaggagaggaattcaaccaggctgtacagcaacttgctagagaggttagcatggctaaaagagagccaagtgctaatagccaacacaatgagaaaaaggcttgaaggcatttcagaagtctttcagactgcctgtccgaccacaggcccagaggcctagaaggaaagaatagaaagtaggctgtcttccttatttttctcttttaattgggcactctttgttttgttgttgttgttttgtttttagtactcaactttctgagtgacttttaaactgaaatcagaaggaaaagaaggtagctaggtaacaagttgcagtcagatgaagagagtatttcagacagcagaaagagtttgcaggaagggaaagaacctaaagtaggaaagatcctgagaagttggaggaactaaaagaaaatcagtaaggcagaatttgacttcccattcccagcagattaaagttcacatgcttatcaagaaccttcacattctggcctcaacctatctttcctactcccctttatattacttttcttcatttgcaacccactcttgactaccccagattacttccattcctgcctaccacagatcacatatttcatacctctatgccattattcatgctgtttcttctgcctaaaatgttccttttttgaaatctttcagatcccatgaggcataatttatctctctgttctttgtaactccagagtactttgtttataactcttccactacatttctaagactgatttataattatgtacacacttgttttctccacaagattatgactataagccatgtcagttatttttatatctccttccctgatcttccaaacataaaatgcagtgcttagtaaatgtgtgctgatttaatatgttaatatgagtttttgtattaggttacagctatatcatttttaactacatcatactagattattagtattaaattaaattacaaagaatgtgttccataacaataaatagcttgtaatcataaccaattttgtgtagaaaaccaataaggattatagttgagaagtaaaagtattccttcaagatcactgagagtaaaacagactaaggacagttcccttaaaaattactaagtcatgccctattgttaagttttcttgtcacagttaagaataatctgaagataaagaaaaacatgtttaccacttttaaaacagaagaagcataattacttaataaggtcttctgagtgataattattccaacattagtccagccagatatgttcatagaaatgtgctaacctctttttccccgagtaccattcaatgaagaaccaatgtaaaaccagaggaagcaytgccataaatccaagatagagccaatcataaagttcaggagattctgtgcaaggctgacaatatttctgtgcattcgttctctgtcctcttgggcatacctataatatataaaaccaatattttgtgtacagatattattttacaacattaacacccccccaaatcattctataagacatcccatttcagtttaaatatttaagtttacatgtgcagcttttagaaataaaaaagagggcataagtaaaataaaaagaaatctatattgtatgtgctatatttgtacaatgctcttagaagattccttttactaagttactaaaatagttgactaacattcaatgaaaaacctagttattaacattatataagaataactgcagataaatgttctggattcatgatgttcaacttactgtacaagacacggtaccaaatcataaattagaaattattataaaattattaaatgttttaaaaaataatatagacatcaaaatgccaacatraacaatgmctatattaatgcctccatattcttttatatttccttattttattttttttttgagacagagtctccctctgttgcccacgctggaatgcagtggtgcaatcttggctcactgcaacctccacctcctaggttcaagcaattctcctgtctcagcctcccgagtagctgggactacaggcgcacacaactatgcccagctaatttttttctatttttagcagagatggggtttcaccatattggtcaggctggtctcgaactcctgacctcaagtgatctacccacctaggcttcccaaagtgctgggattacaggcatgagccactgcgcctggtcctccatattcttttataaattaatgagtataataacaaaaaatgttgtatgtgaaaatatttcaaaagcaaatagattttacaaaatgaaataagatacaaacataagacttaccccacattctccatatatttcagttgagccatttttaaataatagggtcttcccacaataaagtccaaggcatgctggttgaatatcgacagctttttaaaaacaaatgccagtatagtaacatcttttgtgattataaaaaaaaattgcaataatagctgaagcatttggcaaaaataacagtttcaaatttttgaataatatgtattagacaaaagtcttgaagcatttttaaatttacatttctccttttacactgtgacactgcagacagttatcctggaaccttgctgttaataccgtgccttatgattaaggtcctcaaccagcagagcaggatctatctccaggactcaaagcctaacccggtatgattagaggatacttctgagtttaactgattataaagttcaaatatacatatatttttaaattagagcaccagtagagggtcaccaccttgtattttgcccagtcaggacattaagcacccacatgtagacacacaattatcattatcacctatgttcataacagaacacattttcacatgggaaaagcagagagaacataatttcataacagaggtatgcaaattacctttataaaaagtttcctacattgtcctagcttttatcatttttgtggaggataagtgaaaatttcatcaaggctgtcactgggccaatattttagaaaccactgcattaaaattaagcccctgatctaaaggcttaggggaaaagcagctattccttacttaaaaaaaccccaacaactaagaacctaatacgttgtctttgaccttattcacaagaaattatggaagttttcttcatcagtgacatctgattcccttcattcattcattgattaaaacaaacaaacaggctcggtgaggtggctcacgcctgtaatcccagcactttgggaggtcgaggtgggcagatcatgaggtcaggagttccagaccagcctggccaaaatggtgaaaccccgtctctactaaaaatacaaaaattagcctgacgtggtggcgcgcgcctgtagtcccagctactggggaggctgaggcaggagaatcgcttgaacccaggaggcagaggttgcagtgagccgagatcgcgccactgcactccagcctgggctacagaaggagactccgtctcaaaacaaactgcggtctacatgtgaattaatttgaaaaattatgcatcttttgactattcttgaacaatcatttcccaaattattcacgaattcacaatctagactgcctggtctacagtgccttctctcctttcacattcaagcagactttttacttccttctccttatgctgctgagagaaaaagagaaacagcattgaataatattcctccagtttaatattttcgcttttaacaaatttcggacttagctttttaaacccactggcctctttaatgggcgcttattttttttgtaaccaattgtaatcacaatgttctaaattaatacatgaaaatgaatatttcaggtttttcaagaatgcagaaggtaaggaattggaaacttctgtatgggctttacatctagtagatgcttaataaatacacgtgaatatcaataatctaaagtttctcaaaatccaaggcctgaaaaccagtatgataaactgaactgaaataaacagcctatcacttactaagcaaaacccaggctccaagcgactgttgaatttctcctttcatttcctttagcgaacgatggctaaagttttaagattccatttttttgcagcggtcctgccctttgtgacgggcgctataaatctacgtttgaggttgaagcagtagacaaattatgcagcaacttgcttctgctttactgttttttctgcactatcacccgcgttttcaattccgaagtcaaccctcaagcaagtgttccctcgacattaaactaagggactgaagagacatttcggaccaaacaacaaagacctggcatttcgccgcagacagcgcgcctcccctagtagcccgttgcggacagaccaccccaaccccgcaggagtgcggagcccggcccgagggcgggcggggtcaaggggcgagcctgcgccgccaaccgaaggccgcctacaaagagccgagcccgaggccagccgtgtaggaaagtagtcgggactaccagaaacgcttcccgggatcttggcgaccactcacccatgggccgcctgaaggtttttttcgagaagcactagatcagcggatctggcagctgcaccgaacatccgggccacagcgagctcggcggctccgcctcccggtaacccgggcgacagctccgaagttcctccctcgcttccgggtttaggctccgagaccccgccccccggacgtggcwggttagcgtcccgccctcctcccgcggagtcagtgggtragggtcgggcttgaagccatagctgcgggaccgtactcgtctcccccgacgcagaccatggagagcgcgctggcggtgccccggctgcccccgcatgatccagggacgccggtgctgtcggtggtggacatgcacacgggcggcgarcccttgcgtatcgtgctggcggggtgtccggaggygtctgggcccaccctgctggccaagcggcgctacatgcgccagcaccttgaccacgtgcggcgacggctcatgttcgagccccgagggcaccgggacatgtacggggcggtcctagtcccgagcgagctgccggacgcgcatctgggcgtcctgttcctgcacaacgagggctacagctccatgtgcggccacgcagtgctggcgctgggccgcttcgckttggacttcgggcktgtgccggcgcccyctgcgggcacccgcgaggcccgcgtcaatatccactgcccctgcgggctggtgaccgccttcgtggcatgcgaggacggccgcagccacggaccggtgcgcttccacagcgtcccggccttcgtgctggccacaggtaatgggcgggacctttccagcccagggcagagctgcaaccgggacgcgactaactacattaacggtttttctgggctggaactctggcaactaacctactccgcgaamccttgcaattaatagaaaggtaaatcactgccaacgtgtgtcagcagccttgcgtatttggtgcgtgtaatttcgattttccctgactcccatccgcctgtggttttgggagacccttgaggagcgaggaattgcgtgttaccctgactcagcgcctccctctgcactggtgaggcattcctagagatttcaccggtggataaagcaaggtacggtggggtcaaggaaagagcgaagaacagccaatgtaccagggttccaggctggctgagaatatgcttggtagacacagaatcacacttaataagttactaaacctggtctcctttcctcacctcccccacttctttgaagaattaaatgagaatgaatgaacaaagcagtttataaatcattaagatackaatgttgcttttctttaagaacaggaacacacattgcctggtttcaaatcctgataaccccctaaagctgtgcaaccttaggcaaattacttaatctctctgtgcctgtgtttcttcttttccctcatagagtttttttgttaggattaaatgagagtatgcaagatactgtattcctggagatagattgcaaggtttatatgatcgctaaagttccctaggcctattgagccattaaaaggttttgctggattctctagtacagatccttgtacagcttatcatrtaaagcagggcatctctataaccataacccttacaggagggatgacctggcaagctggcatctggtttctcatcagactactacctcccaggagctgaattctatcagtaagaatgctttagtcattgtgactggaagtgagccaggagccagtttaccaggaatagagttatccttttcttaaaaatcttcaagccatgcaaatcatctgttagaaagttggaccttgattccccctgaagaactaggtttcagattagcctgattatgaatgataastgatagaacaggcacttttagagcaaccttaggcagctgaaatccacgagttaacgaagaatgcctctggagaaattgatgccattttcccagagaatggtgtcacttccagactgggagkccacttgagggagacagaatttatgtttacgattccatttttaaaacctcaacagtttaactagcgtggctaccagaattccccctaggcaactccagcagcagagtagaaacactctagacttctgtaggaaatggcagctggcagcaggaacacaaactacatctcatttctgggtcagttagggcagggtcagtcaaccacttgacctcagtagttcctctcagtagttcctgagagcatcactgtatgacagtacaatgattagtgggcattaatggtcactgagttaagaaaatgaaatgctatattctctactttgaaaaatgcatacaaggcagacatagtgttcaaggtcactgccccacctctccccatctcagtgaccttgtgctagagagtccatgcctcagtatcacagtctgcaaaatgaggatgacaacagtacccacctcagagggttgctgagttcatctccaccccaccaggctaaaatgcaaactctttcttgttcacagtattctaagtgcctagaagagtagtcagtcaatgaatgtttgttgaatgagtaactaaataaatgaaatttggagaagaatatgctgattgacaaatgtaaacatctggtcctcttgagaaacctattgccactggaaattaaagttttggctttcgagtccstaatctgtgccaggaactccccatacgtggaattttcaaaacaactcttttaggagaaatagcagttacagtttgcacaagacaccaaagccacactaatggcagaactagggttggaaccctggcctatcatattgcttccctctcatccttaaaattttttgtagtttaaggagatatgtttcaattttctagaatagtgcttagtgtattttaaagcattttaaaatctgtcttgtccaactaaactccaagaaggggaaaagcctatgttttattccttgtacttctcgtmtcttctacagtaatcggcacatagtaggtgctcactaaatcttgagcaaagtaaatcaaattgaaatttcagtgatatgcttgtatagaagaaaagaaaaacccttagattttggattgtgttctggatagaggttgtatattttagtagaaagggtttgggctttggagtcacctggtcctgggtttgaccccaagctctgccacttatttagtgggtaaaccagggaataatgtaaagatagtaagtaaaacagtacctacctctcagggctgtagtaattaaggcactaatgtaatgaattaaggggctagtgtatgtaaagacctgccacataggaagtactcatgggtgaaataaatatcttaatttttaatgttagtaatttagtgattaaaaaatgaaatagtcacagataattggtggacaagagtaactttaaaggaaatttggtccattttaaagaaaaggaaactgaaactcagtgagrtgtagcaccctacccaactgcccaccctaagaaaaccagacccaagattctagaaaggttgggccagggaaatgattgtaggctcagggatgacttctcctgaaccagcttcccaatttcatcctggycccgggattggtggccaatgccccatttagttgttacaatcaagggaagagggcaggcmgactgaaccctgggaccgtcacctgtgtctcctggtaagtgctgatcttcaccctcactttagctttccaccttccagcagtccctcatttctatcaacttgcccattctcttttcattaaacttgcttttcatgttgcgccagcatcaagataaagacatttttkattcagttttgttgttacaatccacagcatgttttactcttttgattataaacttgctctgttttaacacatcatgggttaaaagggcttctgtggactagtgtggactaatagcatactgatagccttctgtggactgatagcatactgatatctttgtatgaccttgtatgaaaactcaggaacacaagatatattttctttcccaaaacttaatttctgaagctgaaactctactctgtccttttggttcacttagcctcatcactccatgtgttgtcccctttcctgatatgtgtgagcaaaggtttcttaaaagtgctgtggccttggagaggatggcacttcagtcctcagcttacacagttaaccagcaaagtggagcaggagcattggctgccccaccctacctggtccttgccctctgcactgcctccccatcctctgtttcttcactcctgctcctgtggtgccctgggggaagttaacacacgtcctctctgcactaaggaccttcagcctccactcttctcaagggagaaaaaatttatctctaggagaaatatttctcccttcaggacactcctttgccaacagatgtctttcccctgagagcttaggcttccctaaaataaaaacatgaaagacaagctttctcccctgccataggcttccctraaaggcagtgatcaccaagctagcttaaattagggaagaggaaaatttgagaaggggcraaataaacatcacccagycccctttctttggaaatacagattcaagatttcaaactactgaccttcaggtgaaactttggggatgttgagacttaaaatgctcaaataaaaaccctggtgcaaaatgatgctgtagcagtcaatgattctacaatggcatttttctgtgtttgcctgcaggataccttaaggagatgaaaacatgtagataagtgtatataatttatatagaaaaatcttttattaaaatttatgttttgacattacggctgaagaaaattgatttgtaaataggatccaagaccctcactrttttaaaccatctctcatagtacaagtggggaatagacattttccttcttagtgttcacagggatgcccttgggtttccctctctcggcctcaggggtgtttcctagaaaagatcctcagggaagttaatgaatatgtctgtatgagttagggaaagcatggctttagtttataacttctgcaatcatcaagttaaaaatagaatgatgcatctagctattattcactcgatgcttattcatttaaaaaacggatttttacttcattatttttatgataggaaaagaacatccctcttgaaaaataaacatattaaaaatcctttgaattttattgctaaaatacttattaacaaacacrtcttstttccaaacacatcttttttttagatctcatggtggatgttcctggacatggaaaggtgatggtggacattgcatatggcggtgcattttatgcatttgttactgctgaaaagttaggactagacatttgttctgcaaagaccagggaccttgtggatgcagcgagtgcagtgacakaggcagtgaaagctcaggtcagtaatactctgccttcataaccaattcccttctctgtggcatggaggaaatatacattattatgtctataaagaaaattaaatgatgtttaaattattaatagtactaagaatagggtacttattaaaatcttaggctctagagcaagcttgtcccacccgtggcctgtgagccacatgcagcccaggatggctttgaatgtggcccaacacaaattttgtaaactttcttaaaacattatgagtttttttgcaatttttttttagctcatcagctctcgttagtgttastgtatcttatgtgtggcccaagacaattcttctcccagtgtggcccagagaagccaaaagattggacatycctgctctagagcaaaactatctatgagttctagctttaccactggtaacgtatataaccttgggcaagttacgtaacctccatatgcctcagttttcctgtctgcaaaatggaaattaaaaaatacctgctttgtagggttgtgagaatgaaataagtcaatacatgtaaaggacttagagtagtgtctggccaatagtaaatgttcagtaaatgataatattattttttttgagacagggtcttgctctgtcacccaggctgtagtgcagtggtgtgatcatagcttactgtaacttcaaattcccaggctcaaaatgatgcttctgcctcagcctccagagtaactgggaccacaggcatgccccatcacacccagctaaatctgtgtttgtgtgagtgtgtgtgtgtgtttatatagagacaggatgtcactatgttgcccaggatggcctcaaactcctggcctcaagtgattctcccagctyggcctcccaaagtgttgggattacaggtgtgagccaccacacctagcagttactaaatttaataatacatacatactaatatagtttatagttccttaaatgtgtagaaatatatttatagaattctgcaaattttaaatgcatgtgtgtggtcattctgttaaacttgaaaataataaatgtaaaatatagtgtacagaatagatttaagcctttttcttatttcatagagaacattaattcctattatttttttcctacattgctaagaagttactcaaataactacttaaataactctagtttttacttgggaaagctawtttgataaaatcagtttagataataattctaggatattctttcacttctagcacgagtgaagcacattttaccttgaaattgggacctataaataaaacacatgtacagtatttgaatgtttagtacgtgagaatttagtatgtgagaatttattagtagtaaaaagtaacttgtgtaagatagtgtctaatgtacgaataattatcattttctgaagctttattttaaaataatttataacttaaaatgagaatatacactgtatcagtattctaaattatttttctggtactgccagtaccaatatgtgcaattatattatgatagcaacttttgaagctctgaatttacatcagttttctgttccattaagcaggacagctaatagtctgagttaacaatttggcacaaaataatttctcctaatttttcrtgaattcaagagaaaaagtcatggatatcttaataaaaggtgtaattttgtacttctcatttgagtttgaactcaacaagatggcaaggggtggactttgagggaggaaggattctgagaaaaatgaggacaagttctgttattgatgtatcagacagtacaattaattactctgtgaactgttgactattcacactgctgaagcagatttaggaaaaggccatggggatggagagttaaagttaatataaattcatcttaattcattcactcttttaacaaacatttaccacaaacatactgtatatatgttagacattctgctagatcctggagactcgaagaaagaacaaaccccacctttgaggagctagctccagttggggaagcgagcatacctgtgaacagtgttatgttggaatgtgctatagtggaggtggggcgtatcactttaagaggatggagaacaaagattcaatctgcaggccgctttaacttggtttcagatggactctttggatgttaagaacccaaagctgttccattgctttaaatgacatgtaactggaagtagaaagtactaattgtaagcatatacaagggaagtcagattatagcaatctcagtcatactgtaaatgtttgcagaaatccaggaaaagttaaagaactagacttccaagaacaagtagctttgcatatttgggcctgaatctaccattgagtgacttagctaccctgccagtgcctgcttctttgtgtgcatatctgctgctttttgatgaatcaactgacttcatcgtctacaataaatctttttttcmtccaattgtttctcttgcctaatagtttctgcattcttacagaatgttatatcctctcacagcctttgtctctatcattggtgttaacttcagctctagatactcagagcctgattttcccacattatcctccttaagctcctgagaataagactatgattgccttagctcatcctgtttgagcagccatcgccagcctgtggattgaccatcctggggtcagtgctgcaaagactatgtgtatttggggtgggaggggtgtataaaataggactgcttttttagcaaagkctrtatgcaggacagcttccttagaagggactcaaagtatgataagaattataaattgcagtaaaactatgtttcttcatctagacaaagacataatttctagcaattagtatacgttgcccaaaaaggtattttaaaaatgataaggattaaaaagttatgtctaagaatgacccatctgcattatttataaatttgaatcaaaatatttattttgcatgtkatctttttttgttacttgcagtttaaaattaatcatcctgatagtgaakaccttgcctttttatatggaactatattaacagatggaaaagatgcttataccaaggaaccaaccaccaacatttgtgtttttgcagatgaacaggtattaaaactgtaatgtttagggacaaaagccaggtaatatggaacacactatgaacattctgtcttcatttattctgaaacaggttgacagaagtcccactggctcaggagtgacagcccgaattgccttacagtatcacaaagggcttctggaactgaaccagatgagagccttcaaaagcagtgcaactggctcagtattcacagggaaagctgtgagggtaagtggcacccttagcttcttatttataaatgtgtcactcatgagactggagaggcctgagttgggtgtttgataaatttcttcactcagctctcagaagagaattttaaagcaggcctgtaaaaacttcttttcaactaggacattggttatccagtgtggtcttggggccccagcgggcccctaaggtcctttccatgggttcagagggtcaaaactrtgttcataataatgacattatttgcttttcactctcattctctcaagagtgtacagtggggttcttcagaggctacgatgtgatatgtgataacccaaccaattgaatgcagaagctagatatgagaacctagttgtcttctgttaagccagacatgaaacaggtttgcaaaaatatcaaacaatgccacttttctcataattttttttgttttggcaaacagttattttcacaaaaatgtgttattcatatgttaatgtataatgggttatttttaaaatgaagtaatgaacagatatatccaattcctaatacagtaaatattgatagatataacttatataaagaaaaactctttggggtcctcaaatcttaargtataaaagggtcctragaccaaaaggtttgagaaccattaggatttggggtttttttttgtttttttgttttattttataatagtgttttatttgatataataggatgtgaaagccctgaaaagttgtggaacatcaaatttttgtaatggaataaaattttaaatgtgctaacagctaagtaatgaatcttatctcagtagtaaatgaaatctactacagaatgatctacattcagtaaattattctactcataaagagtcctttaacatagcaaacaatctatcctaatatagctgtttttaagatttggtgtttctgaatattagagtttccttaaggatctctacatcatatagtgatctgaaacatgtgaaaccatttatgttgtatgcaaaaatttggaacayactgtcttcaaaatctgaaatggaacataaaaataacaacatacatttattggatacttcactgtgcatcagtttccaagctaagcacttgatacatgccatctcatttaatcctcacaagaatcctacaaggtcagtactgtgctgttattatcgtttttcaatagatgataaaacggagaattggagaagttaggtaatttaccagaggttagttagtgagtagcagatccaggtcatgaaggtgggtctctgaacagaccacatgctgttaagcattatattatattgctgtcagacaaagcaaaaggtcaatgaggctttatattataggagctgttatgagaagaatctgggattgcaatgtccccccaaatagagagggagccgagagaccaaagaatgactcagacaagtccaggttggcaagtagaygcatttattagaacttccatataaggcactcctgggaagcagctgaacaactgtggagacccatcctgcctcctgactctaagctgcttttaagctaattttctggctctttgcctactgtgtatgtgtgataggactgttttccttggtatgttcccagatattctctgggatatttgggttctcagggatacctgcttcttggctgggcaccatgcccttggcttaccccccagccttcagggttcaagcagtggacatacacccttacataacctggtgaaggacctgtcacactacagcagctttataaaaagatataaaaagataaagtattataccctaacaatatttgacattttacctttagcttcagttattattcttttaaaaattagaacataaaaagatatgctgaagttaatgtttccagttacttgttttatagttattgatcatgcttgccagaatgtcttcacttgcatcatgctctctccctgtctgtgtgggcccgtccaggctccctgatggtaccttctcagtttcttcccctgctgcagcttcctttccctgtccttccatttagatgttaccgtcacttcatccccaccttccttctcatctcttctacagtttgatgctgctgggcaatttcatccacttcctaggcttcagttctcaaccatctactgatgatgactcccaaatgtttatccctgccctgactacctaccctgtatgtctttctgaatataacgctcttaatcccaactgtttattatactcatctctaaatgactgtcccagaggtgtctcaaactcaccttgttaaaaagttcttcctttcttcctttctcaaatgtgctcttcctttctctccccattgtgtttaatggcatcactagcatcatttccaagctagaaactatggttataattaacttattgctagtcctcaattcccacatgcattgatcaagaggcctatcagttctacctccaaactatctctatgttagtatatattccccttctccatcttcactgaaaactcccatagtgactctggaatcaatcattcagtgaattgaggttatctcttaacatgtttctgggtctcttgtctctctcttctccagtttgatccccactttacagctacagttatctaaaacacaagtctgaccatgtcattctccttaaaaaccttccctggcccataggattaacccttggcctttccttcacatgataaaagtcaakagtacagttttcaagccagatataatacgagtgcaatattttgatagtatactcccttcatcttttttcaggaagygaaatgtggtgattttaaagctgttatagtggaagtatmaggacaagcccattacacgggtacagcaagctttatartagaagatgacgacccattgagggatggatttcttctcaagtgacwtcttccatgattttaagggctttctttttaaagtaatcattatccttaaggactgttttctctaaattatatgaaaacaaataaattatacatataaactaactctcattctttgtaaaatactaccctgtggctaaatataaagtcattatacctcgtatttgcaactgtatttgtataaatatcacttatgtctagcatacaaaatgccagaaattcagagtctttttytagtgattaacgtatcaggtaaaattaaaacagtagttacttttaaaatattgctctatagtaattactattaatatcatattttgtattaaaggctcttcgaataatatgtggaatttaactgaactttacaagctcattatttttgtcttccatttttttgagtagaataatgccctctctataagcagcatgtaaaggagatggattattataaagtactcaacacttagcacaacagcctgggaaggatggggctggagtcagcttctttgttatagctgctgccagggtgttctctgtggcacaaagcccagcttctacatccacaggtactgaagtatcagagactgatgctgagaagaccaactagtaatcagacttttgctatatcttcagggcttttataaaaggggttgcttattgcattattaaaatacagatatacagtagaaattaagcagtgaatccttacaatggaatgagtctcatactctatcagctgcatgctaggtagatttaaaacatgaaataaatgcttactattggcattccttctagttaatacttcctatgagcctgttaaaaatagctgaagcattaaaatattctaagatgtgacgctccctgagaattcagtagagtcttttgtgagataggtaatagtattttattttggagcatccagaaactgaagtaattaattcatttaacaggctttatcacccagagagtctgtataggccttattattaggtctgtgatttaattacctgaacaaaaggaaagctatcatgttaatgtttatttctctgttacacaaaaacaggatgtttttcactcattctccacagaattctgtggtaaataaatcacttatctcaaaaaaaatgacatcactaacaatatgaccaaataatttttgcagatcagatttgctatactttttaaaaaaaataaaaacagaaccagtattttccctccaaatctcacaagtcacatgaatttgaaggaaattgtttaaaaattacattttgtagcattttataatctatcaggtacatactgaagtacattcagaaatgcatgattccatggccatcagggtagggggtagttttactcactgacctcatttagaattgtcagcatttggtgataatttttaaaaagacttttagttgattttattattgttctaaaattctctaaagacagcacacccctttatcaactccaccaggggaaactattcctgccctacccgtggtatgccactgtttttatcccatttatacatttaagggagatgcaagtcgaacatgttaaataactctcctaaggtcatttagaggctgcaaatctaggagttccgactccaagtctagtattttcctacaacacttcctccagttctaagataggatggccataacttggtctaggatatagtactttaataagaatgttatatttcttgaacattaaacaatagctattacctaagtcttcctaaatttcaatccaaaccagagctgaactcttgcaatagtgttcattcctgctgtacttcaccctggttcccttgaactaaaaaacattagggaaatcaactcctcctcctctgacctccacatgtctagtcagtcacaaagccctgttgattctgccttctcaatactgctcacatctatcccttcccatctcagtgagggtcttgcctcatcaattaacctttttcaggtgtctccagtctcctgccctccccccccccccgcccccagccacccccacactggttccttctcttaagtatttaaatgtgctaattgtaaacaaaatgaaacaaacatccctgtccctccttccctctgtggatggctgtcactgctaactccttcccttggtatttaagcttctagattccttactgtctcctcattgggaacattttctcaccttccattttgctattcaactactgcaatctggcttctacctcattactcattagaaactttacctaattgccaggtcttatggtttatgcaatccatggtggcccccgctgcttgctccctgcaggtaggtgtggtccattttagaacaggcaactctagtcccttggtgctgagctcacccacagaaccactcagttaggcttatgaggttagtacccagtccccattagtgcccgccaaagtgctgcaattgtatgggcccaggcccatctcctcttcatcatgaactcacaatgcactttgctccaagtcctccagactcagtaagagttaggtcacccttctcttcaatcctgaaagacacagatagcatactacctctctttaggacactgttcttcatacttcaatgtgcatgtgaatcacctgggaatcttagattctcattcatcagacacggggtggggcatttctaacaagctctcaggcgatgctaatgttgctggttggagtactgtgagtagcaaacttttggatgagcctattttaattacctgtttgggtaatcctggctggcaacttctcctctaagctctgaaacacatgaaaagcctgttagctctccacctggaggtaaaggatagcgctcacaagtacgttcctcataaaaggctgggaaaattgccttaccttcttttctgaaaaccaaaaacataaaacagctgatttctcaatagaccattgtgcctcattaactgtatcattcacctgcctagctttgctttctttatctgcttcttaacttttattactccctagcattccatccatggtccttttctttcttccctgactactctgtccttaaattgtcacattcattcccatggttttccctcttgtagagagactaaccacatccacatccctaatttctgaggtctaaggccatactgtagattcagtacttagaggacaaccaagatcattttccccctagactgtggccctcttcccatatttcctaacttgattaatggcaccaccatccaccaagctagggacttgggattgacccttggctcctattcacaatctttgtcctctttgttgatgctcctgaggtggatagctgtggatttctccagccatcatgcctttccccttcttttaccccccaacctttttttttttttttttttttttttttttaatgagatggagtctcactctgtcgccagggcgagagtgcagttggcatgatcttggctcactgcaacctctgcttcccgggttcaagcgattctcctgcctcagcctcctgagtagctgggattacaggtgcctgccactacgttcagctaatttttttgtatttttagtagagacgggatttcaccctgttggccaggctggccttgaactcctgatctcgtgattcacccaccttggcctcccaaagtgctgggattacaggcatgagccaccgcgcctggcctccccttcttttatcaacagcattctcctttttctttgggaaactacctgcatgtagtcttgctaggactgctgggaaactggtacaccagtcaagactttttcccccagacctgagatcttgagaaatgacataaggtctgaaaactgaagttgatctgttccaatggtggcctaaagagatcactcccatcagtttctgctctccctacccacaggactgctctgacttctcttcttcttggagctgctgttagactgtccttttgtaaatggaacttcccctgtccttccagtaaattcctatattgcttatgtgaaccagtgtcctcatgtgttacttacgcccagagaatcctaatccatatactacctaccctaatctatacatgacctctccttcttcactgcaaaggtccacttcagactctcacttttcacctggactgttagaatgcctctccttaagtggtctcctaaattccagattctcctcttacagttactcaaaaaatatttttttgtatgttggcatttgtatagcagtttgttagagtgctaagtgctggggatctcataaaataaacaggcaaggtttaggtcctcatatagtatagagtgggaggcaggtaatgcttagataatcacgcaaaaaattatagaccatggttatgtgctacaatggaaaatacagagtgctgtgaaactaacaggggaacatggcccaatacgtggggaaaggacggtatcagtcaagggaggcttcccccatggactaaccttaacgcgaagatggggatgctagggaagggaagaagaagatggagctttccaggcagaggggatagcaagtgcaaacaccctaagatggaaggtttaaggaagtcataaaagccaagtgtggcaggaacacagaaaaaagaaggaaagtggtaccgaatgagactagagaggaagcagggtcaaatcatgcagtgccttgtaggaaatattaaggattggggtccttattctaaaataaatggggaaagccaataggattttttttaaaagagacatggtctcactatgttgcccaggctggcctgtaactactgggctcatacgatcctccctcctcagcttcctaagtacctgggactacaggcacatgccactacactggcctaattagaagagtttaaataagtaagtggcatgaagaattttttttaagagcattatgcctagctgcctacaatgtaggaactggatgtgggaagaccggttaggacaacagtgacaacagtagtccaaagagaggatgagagccaagattcaggatggaggagatgaatggatgcaaagatagtccgcaactaaaatccataggtcttggttgatgaattggatgtggactggtggtaaggaggagggattcatcaaggaaaactcttaagtttttggcttaaaagctagaaggatggttctaccatattctgagatacagagtattgaagaccaagttttaccggggaagtaggaagaagatcatgcacccatttgatgtgccactggcacatcaaggagagagatgccaagtagcaggacatgtaggttggggccacagacataatttgagtaatgaatatatagattatctttgaagtcctggatgtgagtgagatggggccgaggggggagtccagaggagctgagaacagggctttgatgaactccagcatgtaaaggcaggtggaagaggatgaactggcagaggagaggacactgagaaagatgaggaaggaaggaagcagaagagtgcagtccttctggtccttctgaaccatgcacttgctcacggccctcccttatgctattagcccctcctcccctgatgaagttcagtctccagagcatggcctacaaggcccatcataaggtagccccaataaactttgatcatttatttccttcttcactccccatctccaatatcctagaattcagacactgctcacttcaacactaacctccagactttgcacattcatcaaatgttctttccctttcttctttttttaaaaagtctaatgtcacctcttgtacaaagtctttgtcaggaagacaaataatttcactcacatatttttaagacaatatttagcacactgtaatatactgtgttggccggtggcttaagcttatttgggctgggtttcctatcttatatgttgtttcctaaaactaagcacaatctgagaagattgtgtttgccaaataaattaatgtatgataattatatttttgctttgattgacaaaattaagacaaaatcagtctagattaagctggcattgactgctcccaagaggatatttggcaatatctgaagacagttttagttgtcacagctgggagaggtgctactggcatctcgtaggtaggaactagggatgctgctgaacatcatacaatgtatagatggcccctgcaataaagaattatctggcccaaaagtccatgacgcttaggctgacaaacccagttttggtttgccaccttaaacgttcttctatttatactgtaaatttcctgtaggatattttttctgaatgaaataagcactccaatactaataccattgattctaagatctacaaatatactagtcattctttag

SEQ ID NO: 95013 - DNA, 51310 bp, Homo sapiens
  misc_feature (1)...(51310): n = A,T,C or G
agtattccatggtgtatatgtgccacattttcttaatccagtctatcattgttggacatttgggttggttccaagactttgctattgtgaataatgccgcaataaacatacatgtacatgtgtctttatagcagcatgatttatagtcctttgggtatatacccagtaatgggatggctgggtcaaatggtatttgtagttctagatccctgaggaatcgccacactgacttccacaatggttgaactagtttacagtcccaccaacagtgtaaaaatgttcctatttctccacatcctctccagcacctgttgtttcctgactttgtaatgattgccattctaactggtgtgaaatggtatctcattgtggttttgatttgcatttctctgatggccagtgatggtgagcatttattcatgtcttcttttgagaagtgtctgttcatgtcctttgcccactttttgatggggttgtttgtttttttcttgtaaatttgtttgagttcattgtagattctggatattagccctttgtcagatgagtaggttgcgaaaatgttctcccattttgtaggctgcctgttcactctgatggtagtttcttttgctgtgcagaagctctttagtttaattagatcccatttgtcaattttggcttttgttgccattgcttttggtgttttagacatgaagtccttgcccatgcctgtgtcctgaatggtaatgcctaggttttcttctagggtttttatggttttaggtctaacgtttaagtctttaatccatcttgaattgatttttgtacaaggtgtaaggaagagatccagtttcagctttctacatatggctagccagttttcccagcaccatttattaaatagggaatcctttccccattgcttgtttttctcaggtttgtcaaagatcagatagttgtagatatgcggcgttatttctgagggctctgttctgttccattgatctatatctctgttttggtaccagtaccatgctgttttggttactgtagccttgtagtatagtttgaagtcaggtagtgtgatgcctccagctttgttcttttggctcagaattgactcgctctgtcacccaggctgggagtgcagtgtggcgatctcagctcactgcaagctccgcctcctgggttcacgccattctcctgcctcagcctcccaagtagctaggactacaggcacccgccatcacgcttggctaattgtttttgtattttttagtagagacggggtttcaccatgttagccaggatggtctcgatctcctgacctcgtgatccacccacctcggcctcccaaagtgctgggattacaggtgtgagccaccgcacctggccctcagtcatctttctaaatatttgaaacagcggagcctggataacaaccttggttaacagattcatacattaaatatgctgagtgcagtgtactcaaattccctcattgagcataaagctcagcccatggtttacaccacccctttccagagtgttagtgacctgtctgtggggccactgtggacctctggcatttccctagattgcagaactgattagaagatggtcaaaaaccaataaacagtacaaaacaggccgggcgcggtggctcacgcctataatcccagtactttgggaggccgagacgggtgaattacctgaggtcaggagtctgagaccagcctgaccagcatggtgaaacccccctctctactaaaaatacaaaatctagccaggcatggtggcgcacgtctgtaatcccagctattcaagagggtggggcaggagaatcacttgaacctgggaggcaaaagttgcactgagccaagatggcgccattgcactccagcctgggtgacaagagcgagattccgcctcaaaaaaaaacaaacaaaacaaaacaagtgagtagggtaataggttagctgagatgcagtcagaattcaggtttacttaacagatcacaaatcctgtttcaggggaggagaaacaacattaagggatttgaaaacctcttccatcacttactggtgaggtgatcttgagcaagctactcaccttctctaagcctcgatttcctcatctgtgaaatggaaagaaaaacagaacttgtcccacagagctgatgagaagattaaatgagtaatgcacattatgggccttgccagagtccttggaaaatgctagttgccgttttgataatctgaaagtggtatgccaccacaataggccctgctttgaaacatagtgggtattaatctgtatttgtttatctcatatctttctgtggtggtcactagaaaggacctcatagatgccccaagctgcaggaagcataaccgacccagggctccagatagccctgcagaggccatgcctccgggaggatgatcccaccaatgaccgagcagagtaccgtggactcctgacagcagatgccctccagaactgcccagcagcactgctggatcttcctgggactacagggctgtctgagatatgcccttctacccttccctctctctccccttcactctaggtcacactggcatcacagtctgatgctctctctggctagcactccccgtttttccctcccacaagcatttaccccagtaaaaaatcttaacatgtttaatcctgttttagcttctgcttctctgaagacccgaactaacacactactttctcatgtttttttgtatttccaacagtgggaaacttacacttgtcctatgagttctggactgtttgttcagctacttacaaacgccatttcgttacagcagccacggggaagcagtggatgagaagcaggaataatataggccattgtgagtaaggctgctataaacatgtgagccactgaaatctgatactttttcagggatccatagtttctggttctttctggtcaagagaggctaaaggaaaggtttttaaagatattaattttcttagtcaagtaacttaacctctcaaggcctcagtgtcctagactagcacagaacaagcagatgaaacaaagtttatatcagaatgtcaactgaaaaagtatcatttaccataaatggaagataattgtattaaattctagttagatgctaaaacttcaagaacttttagagtctgtacctgcattctgttaaaaatatagattaaaaaatgctaacatgttaacacaaaggactttccagaaagacttaaagaaaagtgaaaggggaataactgtcttgcaatgtaattcattgtcgtttaagactgggtctatggaacaccctaaatcacctggttccatcacgttcttttgaacatggagatggatagtttttccccatactctatatattgagcattctatagttcatgatttttctgcatagagaattgttcaagccgggggtgcaggctcaccgactggatagtgaatcaagaaaatagtgtgttcattagttcatcattaccctgagtttccaacaagaatttagtacaggaaagtagacagcggagctgggagccatctatttgaaactgtcttaagcaaaactaagaaaccgagtaagcttgcttttggtgtctttcatcccttcttgtgtgccccctaattattcactccccaatgcccagacattatgatgccttctcctgctcagagacctttctgggaggaagacctactcagacctggtattccctcatcctaggctctaccctatttttcatccagctgttaaagctgagtgactaatttcacacttatgtacgaatgacccataactggcttaatgctgtgaccatcttgggggtattcaaagctgataaacacttttttaagttatataataatcaaagaagcttatctttctgctttatttcaaatttcaccccacaggccttacttatttttaagatcaatgattttgatgggcccccccttcccactcttaattcagggtatttctggccccatccggatccaaactctaatgctcatctcttccatactgtcctttgcaggtcatcggtattgcaagagttgcataaggcccaattcagtctctgccccaaaagctcaagtccaaacttcagaatctgggaggacaaggattcaggaaattttgtcagaactatgagctttgaactttcacttttatggtgagggtcacatttggtctgaatcaattaatccattacccgcccccccccccccccccaccaccaccatgtgtgaattcaaaataatcaacttgggtttattataaaaaacaaaatatattaatataagtatactaagatttttctagaaaacttggccgggcgcggtggctcacgcctgtaatcccagcactttgggagaccgaggagggcggatcacaaggtcaggagatcgagaccatcctggctaacacggtgaaaccccatctgtactaaaaatacaaaaaattagccgggcgyggtggcgggcgcctgtagtcccagctactcgggaggctgaggcgggagaatggcgtgaacccgggaggcggagcttgcagtgagcccagatcgcgccactgcactctgcctgggtaacagagtgagaccctgtctcaaaaaacaacaaacaaataaacttagaagaatatatgtgactattggccgggcgcggtggctcacgcctgtaatcccagccctttgggaggccgaggcgggcagatcacgaggtcaggagatagagaccatcctggctaacatggtgaaaccctgtctctactaaaaataaaaaaataaaaaataaaaaatgcgaggtggcgggcgcctgtagtcccagctattcaggaggctgaagcaggagaatggcgtgaacccgggaggcggagcttgcagtgagccgagatcgcgccactgcactccagcctgggcaacagagtgagactccgtctcaaaaaaaaaaaaaaaaagaagaagaagaaagaaaaagaaaagaaaaaggaaaaagaaaacttaattctggcaatggactgtttctaaaataatatattaatactacttaatgaggaagaaaaaacctctgacatcctaaaatgccaagtgtttgcctttaccaaggtttaagcacacataaacacgcatattcaaataccacccaaagtggaggtgcaaagatcagcctgtaccgcacagtaacacagactgggttgttttttgtaaagaaggcaactagtccagtgagtaatcccttcattttccacacacatacccttctgttttctccctctcctccccccacaccctccactgcagttaaaacgtaattcgaagaagcctaaggtaaaagcccctgccgcataatgaccctagagcttcacctcacctactctgattcttagtaacctacctctaaggatgagagacagggtgctacgagcggggcgaactttggtccaggagttaagaaacctgaaccctggagtcctcaaaaaaaatgaatgaaaataacagaggcgccctgaggatccaagctggggcggtgccaagggctggcaagtgaggttgggacaacagaagtcaaacgtgccgtccttccagatcccggcgcttatggcggaagccactccaggtgagaaatcctaacagtcataatggcataacaaataaacatcggcaaaacagcagtctgccaacgacgtgcttccctacacagacgtcctcctgtctccacactctagaggggagaggcgggacaaatgctgcctccgcagattttggaaatccggaagggagcctccgagcccaggtcccgggctggcaggggtctcgccggcgcttggacctcgtctcccaccmccragcccactgcggccccagagccccgggaggggccgggcacttcctctgccctccggcctggggcaggggccgggacgcggtgggagtgcagcggggacggcaccgcccgagggggcgggccccaaactttcgtgcgcgttgaaagctgctggcgcggcggggcggactccacccctgcccggcagcccagcgcctccggccgcacttccagctctctgcgcagcccgccgcgcagcccgccgccccagccatggcgaagcccctgacrgaccaggagaagcggcggcagatcagcatccgcggcatcgtgggcgtggagaacgtggcagagctgaagaagagyttcaaccggcacctgcacttcacgctggtcaaggaccgcaacgtggccaccacccgcgactactacttcgcgctggcgcacacggtgcgsgaccacctggtggggcgctggatccgcacgcagcagcactactacgacaagtgccccaaggtaaccgggggcgggacggcgggccggggtccagcccggagtcggagtctccggccgcggccgggcgggacgaggtggagaacccctcagagtggtcccttgcacccggtccttgccccgaagtccagaggagacgtgtctaggctgtgggcgggcagcctgggggacagattaggcctcccaacagacgccgaactcatgtctccgaggtgccacccgccagtgtcccgcccaaaccactgtgccgtccgcccctggaaaccgccaggtgggcaaaagcccaggcccctctcgcctgtccacttcacaaacttttttggaactttgactctcagcatttaatcaagaggtgacgggggcctcttgtcctgtatgccggacactattctctgccctggacactcagccctaaacaaaagggacaaaaatcttgccttgctggagcttggtattttgggaggggagacaaacgccgagctgggaaaaggtcgtaagtctcaggcctctgggagtggctaagtgtggtgcagaggaggggcagggtcccgctccaagcgtagagcgccgcccacccattctcctgagtgggtgtagctcctggaattccgtgagtctttcgcaaaggcggcccagggccaggcaatgccctggactcgtcctccccgaagacacacactcccccgacccttagcccttccacacccgaggcctgcccccagagctgctgaggaaggctggtcagggaccacctccatccacggcgtgggggcgggagcagagacctccttagggtgattttggacctacagagggacaatatctctgcctgacagtttgcgaagagggcgagaggcagtggggaaggactggggaggacatggcagggagagggattgtgtgcaggctggagtgagggcgggtgtgagtctgtattgggagaggaaactggagaagccaggtagagacatattggaaagaataaaagattgggatacatcccaggggcagtgggaaatatatataaacatttattagaactttttaattatgtaaaggtgtgaagaaaaaaaaatggtctataatcccagtgcccaagaaaccccataggaatttttaagaaaggaaatgaatgtaaattctcatagtaagaaattgcaactgtaacagttttcaaatggaaagtaactcttcttcaccccaaagacctaggcctccaccaaggtagcaactgctaaaatgtatccttaaaaatttaaatgcaccttagaaaacactttatgtatacatatatttactgttttgttgttktgttttgttttgttttgttttgttttgtttgagacagagtctcactctcgcccaggctgaatgaagtgcagcggcgccatcttggctcactgcatccttcgcctccagggttgaagcgattctcctgcctcagactctcgagtagctgggactacaggctcctaccactacacctggctaagtttgtatttttagtagagacaaggtttcaccatgttggccaggctgctctcaaactcctggcctcaaatgatcctccttccttggcctcccaaagtgctgggattacaggtgtgagccaccacactcggccactatcttttaaaaatttatttacacaaagggaatgctactaagtacaccatactgcgcctctcattaaaaattatttttaacaattttaagcggaagggtgggacactgagcatatattagaaacacacactcacgcctctgtagcatttagcatcatagagcaccagagaatcttgtatgtttttccttcagtggcttatgcagtgctttatggttttcctggttctccggccagtttcttcactgggctctccttttctacgtgagtgcagatataagccaggaattccgacgtgtgtaaattctgatagcgatacactggggatacaacaatgaacatgtttcattccacacgtgttcatcaaatatctactccatcacagtcgtctgtctaaacaggatggttcctgccctcataaagwagagcaagtaggtgtgtccaagctcctctcccacctcccttgctctccaataactgtgcagatgaatcccaaatatggatccctagtctgaattccttttctaactctatgcgtacatttctgagtgtttagtgaacatatctagatatcttcctatttcctcaaactcagtacgttaaaaactcaaaccattatttctcccaatcctgccccatcttcccgtgttttgttttgttttgtgacagagtctcactctgtcacccatgttggagtgcaatgatgcaatctcggctcactgcaacctctgcctctcgggttcaagtgattctcctgccttagcctcctgagtagctgggattacaggtgcatgccaccatgcccagctactttttgtatttttagtagcgacaggattccaccatttggacaggctggtctcgaactcctgacctggtgatccacccacctcggcctcccaaagtgctgggattacaggcatgagccaccacgactggcctctgtgttttttgttttcatgccattgtcatcttgacaatccagacgcaaactttagtctcactttttgccgttcaactgtttgccaatttctgttgatttctataggttcccttgaatgacgtgctctcctccattatctcttcctgccttggtgaggctctagctacccatttgttgcagctgacttcacgtggttattttgctttccagaagtggtaaaaccggcagcctgaggctgaataaggatagcagacatactttgttggccaagacatttttcaggaatttaatttttagcgcctgtggtcaggacttgcacactccatttcttagcccagtactcttctttgttttatgtgacctcaattacacatttattttctctgcctagctcctgaaggcatttgagtatatgatcccrtctcattctgtgcattgtggtctgctcaagcttcctaaagcaamgcatcttgcccctgctcaattatcattggctcctcttgcctgccatagaacttaagcaagtattcgaaagcacttctcagtccaggtgggcctgttcttcccttgttatcttccattaccctctgtacccaccttgctctcccaacaaaccaatccccactctgggcccccgattcacttgcagtgtccttcctaccacatttctatgctcaactcttgcctgtcctgcaagtctcaggtttattgacaggtgttccagaggtcttcccrgaagtacccaggccctctgactaatgctggggataaaaataaaacatacaatttaaaaatatttgttatatcttctttattttattttacaagccttttgaaaatatccactttttacataaaatactagtaatcatagtacatgcatgtaatttataaagtatattggagatgctcatatattttactatcagtcatatgtaacaaatatttagagaccagtaagtaagagtatggccaagatctattttttgaagtcttatatattcccaaatataaggagagattacctctaagaagttatttgtgagaaaacagggaatcaccttacgttcctgtccttataaagtctgtcatgcaaggaagtattttctcatttactttattctgagcaaccacatatctctcaagagagactttgaaatatttttaagaagacttaagttcgtgctaatgtggaatcattaaaaaggaggcaaatttaatacagatgtagtcattattcctgggggtataacctcacaattgcaagtgtggaatatatactatataaacaagctttttgtagattacttaaaagaaaaaggcaaaacatcatggttatagagataatgaaaatacacacatggaaggatttttttaaactgggtaatactatgcaaatgggtatttgtggcttaagatactattacctgtgacagcggtcatcacgtactagagcaccagccattgcctatgtctgccccagagaaggtacttttatccaatcattcgaaggtatctaatagctggtgagggttctagtaacagcattatagacattcaaacaacttggatgaaaacgaagatgatgtgttctggaaagcagtgttaggtggcccgttaggtcatggatgttgaccatttgttgtgaaatttagaactcaattgttcataaaaggaaaatgggaaagaatgaaatttccaagttgacgttttcaaataatattttgttttaaatatttatgtgtaactagtatgttaaatatgataatacgcctttattgtactgaattctactcacaattttttttgattggccaaattattattttttctttttttacttcttatcttatggaaatggggcaatccctaaaatttgaggtaactatattggtgcatttacagatttttgccattttgttttgtgtctagtagagaagagaggatagatgattggagaataagatattgtaaaagggggcaatgaagttactcactggtgctttttttttttaattagtaaactgtgctgtatataaagaaggttttcagcaggtctgaactttgtacctctcaccttcaactctgatgatatttgcctgacttttaccatgtcaaaggcaaataatgtctaagtcaatagagaaatttccaatttcaataagaacaaacaccaataaaccttaggtagtcttcttgttcataaggaacttgccagtaaatagactttatagaaaaatttgattctaaaattaattgtaggccgggcgcttggctcacgcctgtaatcccagcactttgggaggccaaggcaggcagatcacctgaggttaggagttcaagaccaggctggccaacatggcaaaaccttgtttctactaaaaatacaaaaattagctgggcatggtggcaggcrcctgtagtctcagctactcaggaggctgaaggagaattgcttgaactaggagacagaggttgcagtgagctgagattgcgccactgcactccagcctggccgacagagggagactgtgtctcaatcaatccatcaataaataaataaattaattaattaattaaactgtaaaatttcttacagtaatcagccaaggaggaatattttctacccatgcggtgtgtgggagttaatctttgtgtttcttggatgacttgagatagtcatagccaactcagcttaccggcacccaccaaggtgccctataaatattttattaatgaatggtgagctatggccgtctgacttctgtttgtccaaaacctatgctttattcatgaggttcatgatcaggagagggaaaaaacacaaaacattgaatctacttagatgagtttgctttttttctccccgggggtaaaaaatactgaattacttcgccaaaaatagtgctttgccaaaacctgttgtcagtaacacttttatttagtccttcatacatctctataggagtgttagcagaaaggagtcaccatcccagactccaagagagggttcttggatctcgcacaagaatttgaggcaaattcatagagtaaagtgaaagcaagtttattaagaaagtaaaggggccgggcgcagtggctcgcgcctctaatctcagcactttgggaggccgaggtgggcggatcacctgaggtcaggagttcgagaccagcctgaccaacatggagaaaccccatctctactaaaaatagaaaaattagctgggcatggtggcgcatgcctgtagtcccagctcctcaggaggctgaggcaggacaatctcttgaacccaggaggtagaggttgcagtgagctgatattggaccattgcacttcagcctggtgacagagcaagactttgtctttaaaataaaaaaagaaaagattttgaaatatttttaaatatcttaagtccatgctaatttggaatcattaaaaaggaggcaaagaaaaccttttatcagcaaggtttctgtgacctgtatcttgtgcagacctcctatttcatcctgtgacttagaatgccaaacgttctgagaatgcagcccagtaggtctcagccttattttacccagctcctattcaagatggagtcactttggttcaaacacctctgacgggagtctcattcgaacctgtggtgacatagtcctgcctgtttgtttcttattggtgacctaacacatgaccttgtgtttttatgttaagtgaggttgatctcttrggggaaacattatctctcttttctttatttcagagggtatattacctctctctggaattttacatgggccgaacattacagaacaccatgatcaacctcggtctgcaaaatgcctgtgatgaggccatttaccaggtacattgttcctagatttctctcatcctgtctctttaaatttcatgtgcacttcaggaaacttggggacattgcacaaaaaaataaagtaaaataagagtgaaaaatcgcctctatagatgtggctattacaaacttttagaaatatacatcactggtaatctctcatttaagaggaacaaccagraaaagttagataactcgttatgactcatgagaattttcttttgcaatcaaagtctttgacagcattcctcacagattacatttcagaaattagtgtctgaacaagccttttaaaagtacttgagtcttctgctatcagaatcacaatctttactttgggcttctatctcatttttaagaaatgatcaaactttgttattcatgtatcaaggcaatttgtgaaaatgatcagctttaaaaattctgttgtcatactttctctgttgcttaatgagatgtaaaatacacttcctccttaaaggagaascttgaagtcttaaccctaatgtgctaagttgttttcatgaatatatttaactttttctttcctgagcttcaggcaccttcatacccaaaacaggtagcccttaacctttttgatgtggttgaaaggagaaatgtgtatttgcaaagacacattctaaatgagagactgttcaaacttttcatttcctttgccatgggattgtcccctcatgtgtccttcgctcaagaacaaatacgtctacaaccaggtcatagctaactcacatacatgtgggttaggtggagtatttcctgtgaaagaacccctgcaggtcctctccatgtcccttccctctccttcccctaatatcagctgaaaataacatctctcccttggagtagcctatagccaggcagggtgatgtgatccatgtctacttgctcaaaatttatatcatacttttttttttttttgagacrgagtctcgtcctgttacgcaggctggagtgcagtggcacgatctcagctccctgcaatctccacctcccagcctcagcctcctgagtagctgggattacaggcatgcaccaccttgcccagctcatttctgtatttttagtagagatggggtttcgccattttggccaagctggtctcgaactcctgacctcaggtgatccacccaccttggcctcccaaaatgctggaattacaagtgtgagtcaccgtgccagcctatatcatgctttagacttacgtttttagaatttaaaaattctgagtgttagcaccagcagttggcttacaccaggaacctagtaagctctaatctgcagagagcaaatttgaaaggccctttaacactgaacagaagcataaccaaggttgaactcgtaagatacagttgtcaagacctgtgtgacaggtaggaatccaaacaggtgccatggaaackggggcacaacttcaagcactggtgcatcttccacatatgtcttcaaatgtgcaaattatttttccatttaaaaaaaatacccagtttcatgggttgcctaacttcagataagaacccagttgtttcacagtaggccacctttagccatgcctgggctagattagcatctagtcaggatggaacaagtcatttgcctgaccaacaattctttcatcgtaaaatgagcaatccaatgtgatctccagggctgcagagctctgtcatgrgtgcccagtggtgctgtggactctgctgtgtgatccccagcactttggggcagggagctagctggcaatcagtcccatccgtgcccaagttcacagatgctatttggcttcccacagcttcttatccaccccagggaaaagtaaaggattttaccccatccagctggattgcaggactgcagtttccctgcctgctgtcaggacccaggtctccagggcagtaacccactaactggttttgagttgacaacttttgaccctactgagtaaatatgctgtggtcatgaaaagatgaactttagtccattctggaacgtctgaccctgagaccttttggtcattttcaaaatccctcagtccaattaatatcagcttggtactggactgtttctgaggttttaaccctactgtacacacacacacacaattttttttaatgataatagctaacatttattgagggatatctgcccaagaatagttctaaatgctttgtttgtataatctcatttaattcacggcaatcatcagtgaggtaggtactgttagcctccacttttttaaataggaaaattgaggcatagagttagtagcttgcccagggtcatgtaagaagtaacagagtcaataatggacttttagagcttacacttttctccatgctgcagctgcaccatctcatacagtttgcctctgcagtcagtayctgatgccagaacaagctgcaagggagctgacgctagattaggtacacagctaaacctgaatacctttacccagagctgtaggaaatggctgtccctctgaatggcctgaatttttatctgcttccaatattgttttcctttcattaccagcttggattggatatagaagagttagaagaaattgaagaagatgctggacttggcaatggtggtcttgggagacttgctggtaagtgacattgtgagtgtattatattgtctggccgattgaagacatctcagatgccatgcatgaccatgcttgcaagaaccaggcaggcttcctagaagaagcgcaaggtatgacctggttgtagatgtatttgttcttgagtttgcactttggtttgatcaattctagacaaatagtagagatgggaacttgaacaaaagagacactgcttaaaactcagttaaccagatccttcctatgcacttaagagtatgttaaatgttaacacactaaaaaatttattatgctagcacccsctttgatcactaccccagttctgtgctcctccctatagggggtcatagggaacagtttagtatttagaattccagaccttttttctgcatattcattcacattatatacatatgtacacacaaacacacacacayatatatatatatacacacacatacacacacatgtaaatgtctggaatatatatcttccagaccttttttctacatatttacacacacacatacacatatatatattcatagaaaatatttaattttttaaaaaataaatggtatcacactgtatggctttaatacaatgtgatttcttttttagtttggagatctatccagtaaagtacgtctaggtcaaaagtagtgtctttacttcactattatttgttcaaagcttctcaattcacatccttgtgtggcatgacctaagttaagttgctgttgttttattttattttattttttcagtggtagactccaggtcagaggcatgaccccagttggtcaaccattgtcttgccttgtgcacttgactgcttgattgactagtgggcaatgatacactaatattattggtatgattttgttaataatgtcctttttgtgtgtggatacaatttgagttctttgcttttttcagggaataatttttcatcaaatatataggaaagcactaaaaatacaataccagctccattagtttagaaaatacacatctctataaccaagtaattccacttgatatctaccctaaagaagcacacacataagaagacatgtggggaaaataattgttacagtgtagtttataaaagtactacactgattgttgaagaacaaaattgacctagatgtactttcctagctagatctccaaattaaaagcgaaatcaaattgcattaaagccatacagtgtgataccatttgttttttaaaaattaaatattttctgtgaatatatatgtatgtgtctgtgtgtgtgtaaatatataggaaaaagatctggaagatatatattccagacatatatgtgtgtgtgtgtgtatatatgtgtgtgtgtacatatgtatataatgtgaatatgtagaaaaaaaggtctggaattttaaatacgaaactgttccctacgaccccctgtagggaggagtgcagaactgggatagcgatcaaaggggatgctggcataataaatttttttgtctgtaacttttaatatttttaaggaagatgcattaatgtattatttgtgaaatttaaatttaataataaaaatgtactaccacacatgtatcagattgtattctatgaaaaataattatctcctctcttttagaaattgttcaaaaatcttctgattttgcatacacccaagttactagaaagccatttgcatctgtttcatttttttcatccttagtacattagtcacagtgtgctttaacattgycattaataatgaacaaaacaaaataaaacaatgcctgtgggatacttgccaccttcctgtgaagttaattatcagacaatttagtaggctttctatggggctgcaggaaggccagcagtgctgatgcacatctgagaataagaaccagcctgcctaccttttatgtgaagcccgagccctcagtctttgttagctaggttaactctgtgtctgacattcatgacatcgctccttgagttgactgatgaagtcagagtgaagaggctgatgaagctgagaattctcattagatgatctcatctaagttgggaccccctctaaagataatctgatcaggactcaggaaaagccgaagagccacagctcaaagagaacaggaatgggagcagagccaggccatatgtgagcacagggattggcgatgtaagaaaaacttgaaagcctaggccatttgtgtttgtggatctctgttttaagggctgtaccaccaacctcattcaatccctttctgtttgatctacagcttttaatattcttgtcagttttaattcctactgtacacttcctcattctgtgtatatttctcagcttaaattcctgggagggacaatctgattagtgtaacaccttagttttcatccagccacaagacagatccttacccagcctgttggttaactgttctggatcagatgccctgtcattaaataacagaaaacctagcaaaaatgcttcaatcaaaaaggacatgtgttatcatataacaagaactccagaggtaaggccattccaagactggtttattcagcagcaggagtatagcaggactccaggtctctggtccttttgtctttcccctcatggaaaaaagacagtggcagcaaggaaaatctttcccagaattctcctatacccaacagactttctagcaccactcatctgattgaatgtcattgtatgcccacggagaaggaaatacaattgctatgattggcttagcagattagaccaatccagcaagattcacttcctggttcagcctccctgaagcatatgatcacctaatatctgaacaacagtggaattccattagccaggaagaaacagagctggccacagaatatcttgtcagtcagttgctggaagggaatgggacacatataagttatactctcctgggactgtcttttccagtggggtgagtcttaggggaggatagagacagcttcccttagaaaaggcagtgtggggacaataatcgacattatctggtgcaggttggcttccttatctgttctcaaacaaaatgtacacaatagttatttctagatggtgaggtcatagatgagattttcttctttatacatttttgcattttctaacttttctatagtattaattttataattagaaatgagttatttttaaaaatcaatacccattgtgcagtagtatctgtgctttagaatacaaatgtggttcttcatataacaatgttttrtggctgccatgtgttttagggaaagactggaaattttggctcagcttaatgactctatcttttgcctgtgctctgttgaatgtagcctgcttcttggattccatggcaaccctgggacttgcagcctatggatacggcattcggtatgaatatgggattttcaatcagaagatccgagatggatggcaggtgtgtgagccatctttttaaattttgtcattaaggtacttctctttcatggtgctctggatgatttataatatatggacctttaacatagagctgtactaatttctctggcatttggttggtatcagtgagttctatctatccatcttcccacttcagaatgtatgttccccaagaacagagagccttccagtatcactcatcaccagatccattgcactgagggcagtggctgacgcacagggtgctctgaaaatatatatcactgactgcctgattgtggagcacctacaatgtgtgatgttccattctctgcagcagtcataatggaggagcacatctttgactcatgatctcagccaagaacccttgatgataggaagcacattgccattttgtaggtgagaacactgagtctctgaggaagtaaagttacctcagatcacactgctggccaatacatgtctgtatccccagattcccaggaccatattcagtattctattctacactcagagtcttgccttctttaatatgcyatggttacaagacacaaaccaagtgtcctgatttttttataagatgaaatcagacagtgttgttaactgttatagcaaataaatctggcacacatttaatatgtataattacactgccccatagaaatttgtacaaatctatccaaatgacactacttttactttatataatcaaaccagattgttaggtacttattttttttttatctctggtaactgtttgagtctacagtcgccctagtgtggacagtttttgctaatactaagtgtgatttaggcttcctctctccctatttttgtctcatacatacaccattgacagaaatatatatcttcagtttccaaaaaacttgagctctctgagcctttcccacacttatgagatgagtccaacaagagaacgctcagggactggatgcagagacctaggctgtgccaggataaaggaagataaccctatgagaatgagtttagtgtcaccactgccctctttcccctccctcagtatttggattstttgtgaaccaaaaaagggaggaactaaaaaatttggtttgatgagagaatgtgccaaggaaaaagactcaggagaatattagggatagagtggaagacaaacttccacattttgctaaggaccagagctgtttatctttagctacccccaaataaataaaagctgagaggcagcatcttgtagaagagaagcctgggtcctaatttctcatttgagacctaatgtcaacttaggagacctgattacttttatgaggtatgctgyctcaaytaggttaccaaacttccctgaacctcagttttctcaatggcaaaatggagatacaaactctacagaattattataaaaacatgtaaaatatctggcacacaataaaatgctaatattagtaagcacacaataaaatgctaattttgcctaagaaaaggaggatgctttaataaattgtgctattctataataaaatattagtgaagccattcatattatatttttaattaattttaacaaaataggaaatcattgtgttacctataagtagaggatatagagttataagggtaataaaacctcagctatccagagaaggccagaaasataaaggaaaagtgctagaaaaaaatacatcaaagcttcaacagaagttgtctctggaagatgggcaacttttactgtcttctatgtactcttctacatatctcattttcygtaagaaatatatatactatcttctatttactcttctacatgttttagattccataaataatgtgtattttgtaatcattaaaagttataaaaatgaaataggttgttcctctccccartggagtaacctagagttccatgttgagagcctatttagcaggcatgtccaggacaaccaacactttgacacaacctaaccaaacaacacatggtatctaattttagccttggaaaaggataccatgygctactcactatactccagaatttccaaggatctcatttcttatctcttaactattatcagatggaagatttaaaagaaactcagaaaacaaatctcaattttttttttgtctcaggtatattttccccttacgttttatgaagggtcactgttatcacacctacctttgctctttttaaatgatctttgttccaggaaactatctctttctctcctatcagaccaagaaagcatgtattccagtgttctttaaaaagaaaaataaagaaagaccaaataggttttgctcattcaaaatattgcaaagctggccaggtgcagtggctcacgcctgtaatcccagcactttgggaggccgaggtgggtggatcatttgaggtcaggagttcgagaccagcctagccaacatggtgaaacccccagtctctactaaaaatacaaaaattggccaggagatagtggcgcgtgcatgtaatcccagctacttgggggctgaggcaggagaatcacttaagcctgggagatggaggttgcaatgagctgagatagtgccactgcacaccagtctgggcaagtgagtgagaccctgtctcaaaaataaaataaaataaaataaaataagataaaagaaaataaattccaaagctaaccttatcaaccatcatcacttctttcattatgacttgaaattgaatcagaagggtatataattttacttaccacctccattgtttactgggatgggattttaaccgtcaaacataaaatatatcataccataaaaaagaaattatttccataaaaagcaaaatgcatctgtcaagaaagcagcaggccttttcagagtatagtcatgcccccactcaacacgtaacactgttcttacaaaggcagatttggagaaggctgatgaaaattccacatgctgggaagatttttaaaggttgatgggcttttaatttttgagtctcttcaaggaagatttgcaggcgtggmgtgttcatcgtgcaccccctgaaattgtgttgctaaaattctatatttaccatctcctctcatggggagtgcagtaacagtcctctatgaaaatagctggcctaggaggaagtggggagaaagacaattgcaacaacctcacagaagtttcacaatcacaccaaagccctgggtggaarggcactcacagtatgtatctcggagctggatccaagtggcttctgcaacccttctcttgcctcttagcacccacaccaagttcgtaatagccagtcatgcgtgattcacattacccagcaarcttctaattatcactgtggaattcttggtgtgccacagaaacatttatcagttattataacatcagaaagccaagttcatgggctctcctgrtgactgttcactggttctttgtcgactctgtatcccacaggtgcagagaagagcatttcttagaattcagtcracagagtcccctgggctgacctctccatccctgctggctgggacagattccattgagtcattcctctaaagaaatgcctagtccagctgccacctgcacccaggttggctcttttactccacagatccacgcttgctttcttcagccccgtgcagcctctgggatgaaacagctctgacagctcacttggatgtagatgaaagttctcccaccttggccccccacccctaccccttcatatgattggcatgttagtgcatttggggatcactggctacatggaaacctaaatttacagatcaatttgtcaattcattggaagaaagcaaggtagagagaaggtttatcaccatcttgcagcttctgtagatttagtggaggcagcaagggatagttctctcctcctcagatctactcaggtcaacttgttatgaaacgcttgtttctcaatctaccttaaaaacaagccttataaaattgatagaattattcaccaattctttattgaatcagcgggagattcacaataaagaacagcaagcaaataaactctcctacgagttgttagccccatgaagctaaaaccaatcatttacttggcaggaaaaaaattcaaccaacatttgatggcattaagaatctcatgtaagagtgtaccctcaaaagagcaaatgtggcttatcgtggtggctcacgcctgtaatcccagcactttaggaggccgaggcaggcagatcacttgaggtcaggagttcaagatcagcctggtcaacatggtgaaaccccgtctctactaaaaatacaaaaattagttgtgtgtggtggcgggcacctgtaatcccaggtacttgggaggctgaggcaggagaatcacttgaatctgggaggcatatgttgcagtgagccaagattgtgccactggactccagcctgggcgacagagcaaaactgtgtctcaaagaaaatgaaaataaaaataaaaagagtaaatgcaacctctgacttccacaggagtcagggactgagcccacaggaggaagttcagtgcccatcctctcttatctgagcatttcaggcttcttgggggcaggacagtatatcatcctgctgcatttctcagcaaaaaaatatgtcatcagttctcccatggtcatgagttttcagaggaaaactgtttctgcctcatcgtcttcctatttcatacaataccttcagatgggttttacaacagccctgcatgctgaaatgaggcaaacaggcctatggttctttcctgttacaggaagcagtgttcacattgctcagtattttaaaacccaaaattggcccttgcctaagtgcagcataaagtattttgtaagtcaagatgttttgatcctttgttgatgtcatcattttatttattatagcatttctagttatgaacccaagttaatggactttttcttttttttttttttttttttttttttttgagacagagtctcactctgtctcccaggctggagtgcagtggcacaatctctgctctctgcaacctctgcctcccaggttcaagtgattcttttgcctcagcctcctgagtagctgggattacaggtgcccgccaccatgcccggctaattttcatatttttagtagagacggggtttcaccatgttggccaggctggtctcaaactcctgacctcatgatcagcccacctcggcctcccaaagtgctgggattacaggcgttgccaccacgcctggccaagttaatggactctttaacaagcttcttgacaactggcaaacttcaactgtttctttattaaaattttattttattttattttactttattttttgagatggagtctcactctgtcacccagggtggagtrcagtggcatgatcacagctcactgtagccctgacctcccgggctcaagcaatcctcccacctcagcttcctgagtagctgggactacaggtgcacaccaccacactcggctaatttttaaattttttttagagataggttctcactatgttgcccaggctgctctcaaactcctgggatcaagygaccttcctgcctcaraaaaattttatctttgttctcttatgactgggatagcggaagtttagtttttaattctgaattacagattacagttattgactttgcattgccttgtagctcttggctgctctttgtggggttcagggaccagtagaatcaggagcccctgggagcttattaggaatgcagaatttcaggcccctccccagacctactgagaatctgcattttaagaagatgtgactttctgacgagctcagatctctctccagccttccctagggttcatcttgcatctgatacctcctccttcctccagtggctctctaactcctagctcttccaactaaagatgttgttgctatgagtcccatttccattcatcattacactggtagttaatattagtgggaagcttactggctttcttgataaacaacactatcaaaatttgaataagtgaacttgtattcatttctctggctgttgacaataatggttagtctaaattctcaaaagatagtggctgtgtttatttttgtctcttcacactgttcctgagacaggcattacactcatgtttaggtgatcatgagatgtccaacattgtgttgtaattcttaagcagtatcttctaaaactaaagctgagttttctaagaggtgaatatgaggtatcaaataggtaaaataaccatattggagattatctcattgacaaagctgctttgtttacccccttctggccagaacacaattccattttttaatgtatagtcatgcaccacataatgacatttcagtcaacaatacaacacatatgcaatagtggtcccataagatggtaatggagctgccccctgtgggtgtaccatttcttatgttttatactgaatttttactgtactatttctatgtttagatatacaaacaccatcgtgttaccattacctatagtattcagcacagtaacgtgctgtacaggtttgtagtctaggagcaggaggccataccatatagctcaggtgtgtagtaggcagcaccatctgggtttgtgtaagtgcactctgtgatgtttgcacaatgacaacgttgcttaagaacacatttttcagaatgtatccctgtcgttaagcaatccacaactgtatgtgtcatattttaaaggtttcaataatttaaaaatacatccccctccaatgtgtttggtggtggtggtgttcttattttgatgtgtttgtttgtttgttgcaaatgaaaatgtatttgatgtccaggatatcctaaatagaaaccatagtttaaaatcgtatataagaaatattttgttataaattgacataaatacctaggaaaatattgaaattgtcaataaaataagttcattacctcttggaatatgttattttcaaaataaactataatctatagttcattatcaaatcaaaattacataaggattgagataagcaaagactacataatgcaataatgttctgtacctataccaataagcttgattaaaagagtgttctgtaagtagcattttctaactgattctgtatattctagccacaagaatcttgactgaacccyttgtgtaggactcaacaggcccaggtatccaacgataaacatccctgtaaggcgtctgtctttagctgaagctggacaattggattcacagacgttaagacagaggctctggaacacagagacctaagggcagatcttatctctatcgtttactgtttgaccttgagatcttatctctaccgtttactatttgaccttgagcagttacaattcctcatctttaaaagaggattaaatgcagtaatacatataaaatatttagagctgtattagcgagtattattgttgatgtaggctgtaaaaaagttacaaaacagtactcagtattcataagttgtttcagttaaagatgttttaaatttaatataatataattgaagtgctaggttcatatttcctgacaaataaattctaarcaatactgtatccttttgcaggtagaagaagcagatgattggctcagatatggaaacccttgggagaagtcccgcccagaattcatgctgcctgtgcacttctrtggaaaagtagaacacaccaacaccgggaccaagtggattgacactcaagtattcagagtgctcgtatagccagcgttttgtatagtatttagtacagtagataatacattgactatgtagcatatagtggtgatattgagtatagggcatgtcgtgttttgaataatagaatatatttttgtaaataaatctgttacttctcttagcgcagcccagtcattttggagacaaaggagctgaggccaagagaggagtgacttttataagggtcattttgcaaccagctttgtcagaaaattgtcagttcttttttttttttttttttttttgccagaaaattgtcagttctatagtaaccagcatgcttacctctttggttttatattaaggtgttgatagcaaaattgaataatttgaaatgtcattcctggctgggtgcagtggctcacaactgtaatcccagcactttgggaagccgaagcgggcagatcacctgaggtcaggagttcaagaccagcctggccaacatggtgaatccctatctgtactaaaaatacgaaaattagccaggagtggtggcccatgcctatagtcccagctacatgggaggctgaggcaggagaatcgcttgaacctaggaggtggaggttgcagtgagctgagatcatgtcgctgcactccagcctgggtaacagagtgagactctgtctcaaaaaaaataaaataaaataaaataaaaataaaagtttgcagtttacacaatcaatcctggaagcattttatttacactgtgggtcccactgctgagctaacttgcatttacaaarcacctctagatactgtcataatgtatccagaaattcaattagagagagtgtgtgtttctgggccaacagaggcaaggttagggggcagaggtaatataagtgagctggcccaagccatgcaacttagcctcatagattgaagtcatcacatgaattaaccccaaactggtacccagtgatgtcagagcatgagtccagatgtgctctgtgcgtgcatgggatggcttccaataaagtcaaatgacacagtcacgtgtcagtttaggtcctctaggaaacagacaccagagagaatgagaagtgcaagtgacatattgggggatgcctatgaaagacaaaggggagagggagcaggatgaggtgggaaggcttcagactgtgacacaggtgtgccacctgtgaaaagtgaaggggaaagaagcagcattctcagggagagcctcagaccacagtgccactctgagcaagtggccaggctgatggagcctgacactaaagattgcccattagagaagtctcggccctagtgtcccagccacatggagtgtcccagagagcgcagctttggtgtgagctctgagggagcaagtcctctttgagrttctctgaaagaagatctaagctgtgcacttcttgggctgccttaattatgcttcaagggtcagaagggtccaactcttgtttgaaccgagactcaatcccagcctgcaaatgactttccctgattgattacaacttgctttaaaagtccagagacttttatctcttaatgaaagatatttaaatgagggtgatttattactttgaggtcgcggtgatcaygaaagtatgactgagtatatgtgattgatatgggccataatgcttcattcattcacaattcagcagaccaaattaaagagatgcgtgtttaagtttcaatcctgccatgactgtgaycttgggcaagtcacttctctctcagcttcagctccctcatgtccaaaataagtgggttgcactaaatgagatccagcatcctccagttcaattattctgtcattctccttccttcgagcttgactctgatgaggccgggaataaaaatgaatgatttctcacttgaattttcgatgcactgtgaaacatagttaatcttcctcttctctatttcagtgactgtcacaaagatcaagctagattttccaaagcttacctcttagactcaactcagctaattatcagctgatttggcagatcactgtaggaatcactaaaataactccttatgcaactttaaaaatctagcatagcattttaaatattatatgagatgttatagcttcataaatttcctattccatttwctttcatcatacttgaaatcagatcactgaaaaacctatgcaaaacatattctaagtgctattttttggtgggtacagattcacaatgtcactttgtttgcatatcatattttattattattagagcaatggctttatctgaaacatgaaagataaacttttttggctgggtgcagtggctcacgcctgtaatcccagcactttgggaggccgaggtggatggatcacgaggtcaggagatcgaaaccatcctggctaacacggtgaaacctcgtctctactaaaaatacaaaaaaattagccgggcatggtggcgggcacctgtagtcccagctactcgggaggctgaggcaggagaatggtgtgaacttgcagtgagccgagattgcaccactgcactccagcctgggcaacagagtgagactccgtctcaaaaaaaaaaaaagataaacttttttgaatacaaataccatatcattccattccactgcatttatatcagggcaagggcacatggagagtcaacatagaaatactgtaaaggaccatcagtgtggatggtttcagtcactagattgtaccaggtsggggaggaaccacatgttcctctaataccctctgcagccctgagaccctcttctccatttaggcctcacacaatttaagttggtaatggagccaggaatagaattccattgcagtctcccagccccttgttcaacctatgtcatcacacttgggaaacaatgagcagctgcttctgtttaatcccacaggtgrtcctggctctgccatatgacacccccgwgcccggctacatgaataacactgtcaacaccatgcgcctctggtctgctcgggcaccaaatgactttaacctcagagactgtgagtacagcacaggccttggtttctttatgcgtgtgcttaatctttttgattggtagttagaaccaaattgagcttgaaacnaacaaaaaagccttgagtttctgatctgaacttcastgactaagcaggcattgtatggaggaagtagggagggcatttttaaagcaattctcatgtgaagtccagcatgacggtgtgttgaaatcctttgggatttttaggaattttaggaatcccacatgacacacagcacagagccagtgagatcaagaggtttccaacaacaatggctggtttctctatttattgtttctctaactttcccctagttaatgttggagactacattcaggctgtgctggaccgaaacctggccgagaacatctcccgggtcctctatcccaatgacaatgtgagtgatcaaggttgctttcttagtggcaacagaggcagcttatttcacaagagcctgttcagtaacctataaaacacatttaatrttgatgtttttccatgtgcagaacaagctccgtatttcttcctgaattgtgtagatttctcctcccaaccaagtaaggaaaacaaatctgtatagtgcatgaaatcagaattggtattttgcccttgattagtgaccccatcactaattgggaagttattgagatgtattttaaaacaaaacctggatataagagatgaagtaaatcactggtgaagcactgcctcctttccagatagaaattttatctgcaaagtcagaagtcactgaatattttctgcctcgcctcttctctcactgactaggctctttctggtcctctgccctgatgctagatggagttagagaccctggggcagacccatgaacaaacatctgtttcttctgccactgacttgtatctttttcttatagtcaattattctaattttattgtaaatatagcttagttaaaaaaaaaaaacacttggggccaggtgcaatggctcatgcctgtaatcccagcrctttgggagtctgaggcgggcaaatcatttgaggccagaagttcgagaccagcctggccaacatgacgaaaccctgtccctactaaaaatacaaaaaaattagccaggtgtgatggtaggcgcctgtaatcccagctactggagaggctgaggcaggaaaatcgcttgagcctgggagacagagattgcagtgagccgagattgcaccactgcattccagcctaggtgacagagtgagactctctcaaaacacacacacacacacacacacacacacaccacttggaactggatctcagataactgctattgattcttggttgttttaaatatatgtaactctaaacttctctatgggtaaaatcattttcatgaagctgtaatgatttttttaaagtggtctcagaagcaataaaattagcactctgctttacaaagatggcagaagacaaggatcttggggggactaggacataaatagtccttaataccagatgtccacctggtgttaaatcataatctctcagaaaggaagatgattatgtggattttgctggagcatttttaggaacctaatggtatatgctattattcctttgtggaaaacattgtggcttcagtacatttcagagaaatctctaacccaaaagcaaaaagttattctatgtcagggtcaaagtaagagttcttccaagtctgggaccgtactgccaacctaaacccagtctgcaggggcttgaaattcatcctcctgtcttcagtaaggaccaaaactaattttactgggaaataatcgtctgcagtaactgacaatatatactaagttagcatggggtaaaaaattgactagatytgttgggtaaaagggagttctcaggatcatgtttttgtttgtttgtttgtttgtttgtttttaagagtaagctgaaaaatccttttatactgtaattacaataacaaattcattcttctcctcaacttggccatagccctggcataggtcagtgattatacttttaagtattagggagttcagagccccagatattctatatgcagacctctatgctcatattcattagttttaataagactctggtccaaggcttacatttgggggatggggtgctcatcattttaaaatttttaattttaatagttttaggggtacaggtagttttggttacatggataagttctttagtggtaatttctgagattttacgcacctgtcacctgagcagtgtacacccaataaattgtcttttatccctcaagtccccaaagtccgttacatcattctcatgcctttgcatcctcatagcttagctcccacttacaagtgagaacacacgatattcggttttccattcctgagttacttcacttagaataatagcttccagcttcatccaagttgctgcaaaagacattattttgttcctttttatgtctgagtagtattccatggtatatatataccacatattgttgttggttgatgggcrcctagactgattccacatctttgtaattgcgaattgtgctgctataaacgtgtgtgtgtacatgtgtctttttcacataatgacttcttttcctttggctagatatccagtagtgggattgctggatcaaatggtagttctacttttagttctttaaggaatctccatgctgtttaacatagtagctgtactaatttatattcccaccagcagtgtaaaaagtgttcccttttcaccacatccatgccaacacctattgttttttgactttttaattatggccattcttgcaggagtaaggtggtatctcattgtgattttaatttgcatctccctgacaattagtgatattgagcattttttcatgtgtttgttggctgttcatatatcttcttttgagaattgtctattcatgtcctttgccactttttcatgggatttttttttcttgctgatttgtttgagttccttgtagattctggatattagtcaaggctcacatttttartagaagttacagtttttaattctacgaccaggtaaagacagggcagctccatgatctataaaaatcgaagtgtgatggctcagggttaggaccatttcttggtgacatttacacggttgaggtgaccgacagcaaatctatgtgggaggaacttggaagctggccaccatcatggcctctaaggcctccaccctgcacaccatggcctggctgcaatcctgtctcgcagtcatgtagggcattctcagctagttgtggttctccacacggtccatggctgccagtgcttcctgatacgttgcctgccagcaggagggcggtcatgtgctggttgtgctcagctgcaggaactggggataaggtyggaggccaagtgtcctcaggctgtcattaaccttttccttcacttcttccctgcttcccagtacttggtactaccaattcctgagccttggggagctccaatgtacacactgagttgctttttggcttttccccactaccaggtcaggatttggctgtcttggatcttctgaatcacttaccactcatgcatctgtttttcagcctctaaaaggttgttgctattgtctttatcccaacctctttatcttttatctgtatgcctttagagaatcctttcactgccattttcatggggtctcaggaaagagcaaaggctcacagtttggcattcaaaccaccacccctcagcagatgtccaatgggccttagtcttaaagttcctagtgcaggagacaccagtcacattttggccacacctacaatatgaaccatttttattctatctctctggcttgaagttttttgaagggaaggagctaagattgaagcaggaatactttgtggtggctgcaaccttgcaagatatcatcygccgtttcaaagcctccaagtttggctccacccrtggtgcaggaactgtgtttgatgccttcccggatcaggcaagtatttagtctgtggatgcagttagggtccactgagggattgactgggatttcctatcagattaattcctctctctcagtgstaacaacgttgagcaggaatagtgtgcatcaagtctttcatagaaggtgggcatatcagtgctttctccagatgtgttaggacaaagaagccagaccctgagccatccgttgccttcatgttgatgtctttccccacccaggtggccatccagctgartgayactcaccctgcactcgcgatccctgagctgatgaggatttttgtggatattgaaaaactgccctggtccaaggtctggatagtttggcttctttttcctttaattaaccagaatggctgcagttgaaagactgccaaaaactccctttttagtttttcaaagtaagttattgttgctaactttcaacagttaaaggtatattttccctgacgctgacattttccatccttagagttttatagggagtaagactataaaataaatgagcacattcctaatgggacacaaatcaatagctatattaaggcttatattgtgtttaccatttttgtgttgaaaaagattaaaaattaaattatctaacctcaraagacagctaattgagtgtccccatagctttagaagtcagcattttacatactttgtacttgctgagagcactatttacgtttttatccctcaatctgtgtatttaataagtgaaagacacrtaaggatagtagatagattgatcagaatgctgtcttaagtttcaccagtagctttacaaatggcttccccctcacacccagaacatgtttctattatctggactattcaggaacttagtggaattgagtgctctgactatgcacacttggaatggtcctgttgcagacagggcagggttgaagaaggktttggcccrtgcagtggggtgcccaccttcagggcaagcagctgactccttcctttcccccaggcatgggagctcacccagaagaccttcgcctacaccaaccacacagtgctcccggaagccctggagcgctggcccgtggacctggtggagaagctgctccctcgacatttggaaatcatttatgagataaatcagaagcatttagatgtaagtcattttgagagattttctctgttcatgagcataagatcttaaggtgttacagatggctacagtgttccctcttaccaaacatctttcaatcattgatacagcaaaagtactcaagtccgaacggggctccarcaaaggcagctttttgaaagtgctgaaatggagggatggcacctccrtagagctaactcaacccctccctgtggtagtgaagtttatattgagtacaccaragattttgcttaagacatgaacagcgttatcccaatgttgcattaaacctgagtgaccagcaagggctttctcttcctttggctagagaattgtggccttgtttcctaaagatgtggaccgtctgagaaggatgtctctgatagaagaggaaggaagcaaaaggatcaacatggcccatctctgcattgtcggttcccatgctgtgaatggcgtggctaaaatccactcagacatcgtgaagactaaagtgtgagcctccattactctggcagtgggtctgacactgatccattaatggaatgatgctactaaatgcagggttgcacttagggatgaggaaaggccttgttcawatgtttaaaagtattttcttctatacaaaaaactcttgcctaaaaaaaaaaaagaaaagaaaaggaaagaaaagaatgctttcctctcagagccatcttaattctagacataggagscaaaacaaacaaacaaacaaaataccaaaaactattctactgaaagtgtagtatatatgtcagtgtgaagaagtcagatggaagtgactagatttggaatttttctggtaattcttttgagttgcaaatgaatttctatttaaatgacagccatagctactgtcagcctgtccctccacctttatttaacctttctaagcctgcacttggcttcttgaatataactccgaactttgtccagtgtgcaggaccctttgccgtttcagccaaattcagtgatgtgtctcctccatctccagattcaaggacttcagtgagctagaacctgacaagtttcagaataaaaccaatgggatcactccaaggcgctggctcctactctgcaacccaggacttgcagagctcatagcagaggtaactgggaagtgctgagaggaaaggaggcctgactcgaatgcaagaggcatatgactatacttgtaacttataaatccagtctgcagcagggctggcttcctcagcatgtggtttgtgcagtcacacaggrctccatgctgggtttaattctctgctgtagtcatcttgaaattatttattattattattattattattattattattattgagacagagtttcactctatcacccaggctggagtacagtggtgcaatctctgctgactgcaacctccacctcctgggttcaagcaattctcctgcctcagcctcccgagtagcagggattacaggcacacatcacaatgcccagctaatttttgtatttttagtagagacagggttttaccatgttggccaggctgatcttgaactcctgacctcaggttatctgctcctccttggcctcccaaagtgctgggaatacaggcatgagccatcacacatagccgtcatcttgaaattcttaatttttgaacaaaaggtcctgcaaattatgtagctagttgcagctaacagtattcataggacactcacatagaagatggttttctctagtaaaagaggataataaagctcatataaataactaacagaacctgggttcctggtcactcttataagtagatttcctgtttttaacactttaataccagtgaagctggccgggtgtgatggctcatgcatgtaatccagtgctttgagaagcctaggcaggagactcacttgaggccaggagtttgaaactagcctgggcaacatgagacccacccccaccaccaccacccgtctctacaaaaataaaaagattagccaggtgttgtggcatgcacctgtaatcctagctactcagaggctgaggcaagaggattgcttgagcccaggaggtcaaggctgcagtgagctatgatcacgacattgctttacagcctgggtgacagggtgagatcctgtcgccaaaaaaattaaataaaaataaaaataatttttaggccgggtgcagtggctcacacgtgtaatcccagcactttgggaggccgaggagggcagatcacaaggtcaggagatcgagaccattctggctaacacagtgaaaccccgtctctactaaaaatacaaaaaaaaattagccaggcgtggtggcaggcgcctgtagccccagctactggggaggctgaggcaggagaatggcatgaacccaggaggcggagcttgcagtgagccgagatcgtgccactgtactccakcctgggcgacagagcgagactccatctcaaaaaaaatgaataaataaataaaaataaataaataaaaataatttttaaaaactgctgaaactacatttaagatactagcaaaagtgttcttctcacatagactttatagactcttctttgagtcaaactatcccatgttctgtgtgatacgtgaactacactgtggtaggtgacagagagaaatactgacagaaactgcccatttggacttgattaccatccccaaattgaagtcatcttttcctttgaattgaaagaaaattggagaagactatgtgaaagacctgagccagctgacgaagctccacagcttcctgggtgatgatgtcttcctccgggaactcgccaaggtgaagcaggtgagccttccaggtgtgggtcccctcctgggcactcactgtgagagtttatcctgtagtttttgtttattttttgagacagagtctcgctctgttgcccaggctggagtgcagtggcacgatctcggctcactgcaacctccgcctcccaggttcaagcgattatcccgcctcagcctcccaagcagctgggatgacaggcgcccgccaccacgcccggctaatttttgtatttttagtagagacagggttacactatgttggctaggctggtctcgaactcctgacctcaagtgatccacccgcctcggcctctcaaagtgctgagattacagccatgagccaccacacccggcctatcctgtagtttttaaaaacagaccacccagccgggcgcggtggctcatccctgtaatcctagcacttgggcagccaaggagggtgaatcacctgaggtcaggcattcaagaccactctggccaacatgatgaaaccccgtctctactaaaaatacaaaaattagccaggcagtagtggtgtatacctgtaatccctgataggataatcgcttgaatgtgggaggtggaggctgcggtgatctgagatcatgccactgcactccagcctgggcaaaagagtgagactctgtctcaaaaaaaagaaaaaccagaccacccaattcttctaggccaaaagagctctggcaccatgcactgtcttaacaggagaataagctgaagttttctcagttcctggagacggagtacaaagtgaagatcaacccatcctccatgtttgatgtccaggtgaagaggatacatgagtacaagcgacagctcttgaactgtctgcatgtgatcacgatgtacaaccgtgagtcagccctgtagccaacaagcccccttgcaggtggaagcagcagactcagcataggtctcactgccctgaccgtcagctgtcttccatttcatccacttctccatctttttcaggcattaagaaagaccctaagaagttattcgtgccaaggacagttatcattggtggtaaagtaagttgaatctattcaatggggacttgagggctctaatctcttgccattcttctacttcatcatggctgccttctgtcaatgcrtttgaccttcttccccaaaggctgccccaggatatcacatggccaaaatgatcataaagctgatcacttcagtggcagatgtggtgaacaatsaccctatggttggaagcaagttgaaagtcatcttcttggagaactacagagtatctcttgctgaaaaaggtactaccctcattgcaaaatatgcaggggccagggcaaactctagagattacatggtatgaaagatggggcagccaacctccaggagctagtaacttaggatagaaggtgtcactcttgtgcagaataagggcctacggtaagaggttttaaagtgacccaagtcacaatgaaattgatgtcctggagtcagtatcacaggattatacttgcaagtacattttcttccaagccagtgagagctatgtgctgggggaggcagccctggggtttcagcatcattcagaacccgctctataaaacagaggaaaggtcttcagttcccagccccagttttgcaagagaacaccaaatccccagtcttcagatatttctttggtcaccctgtgagaagaagggctgtcacttgctcttgtatcaataataaatgagggcagatgtgaggctgccaaagcacgaggcttagatgtgcctcacatgggcacttcagcatcaagcatgatgctcccacatggggacagccagatgggcaagaagccagtgtccctttctcttccactgggacctttgrttatttgggtcacaagctcacagagcaccatccacatgcaaatgcccaactgtgtattcacccacttcccaaactgaaaaggtagaaagggagctttttctttttgtggtgtttttaggtcctctgatgttactgtttaagaactctctgcataaagggagaagagccaggttcctagggatgcaaaagaagatacatctaatccacaaataagctctcacagtaaagcagaaaagtggtcctgacctttgtagtcaaaggaagtgcttcaggcagctctaatttgcgtgcaaatcagcctgaaaggtcagaggctagatgtctagccccaggcacacctcaattacgtgtggcttatttccctgcaggraaagtggaaggaaggaggtgagaagtagaaggaatgcagacaatccagtctcctcaggttgccaaagaggagtcctggagggacactctgaatgttatggatcaagagagagaagttcagcctgggcarcatagggagaccccatacatacaaaaattttaaaaaattagctggacatggtggtgctcgcttgtaattgcagctacttgggaggctggggcaggaagattgcttgagcctaggaggtcaaggctgcagagagctgtaatcgcacmactgcactccagcctgggtgacagagagagaccctgtaccaaaaaagagaaagaaaaaaagagaaatttcaatatattttataaagtagaagaaataaaaataaaactgtaacaaaaattggaaggaataaaaggaagaagagaaatgtagtatcaatgtttgtcgcagtcaatagatactcttcaaagtttatagctcgagaaagaaatacaagcatataaaatggacaaaagtggttgcctgagtcaaggggaaagagtgtgatctgccttctagaccatttgaatgtttatcttaatgtgcatgtattactttaattatcaaaacagcccaacttaataaatgcttcankacaatacaagcagatctagacagacaaaattactaattttaacttacctttcttgcagtcattccagccacagatctgtcagagcagatttccactgcaggcacygaagcctcggggacaggcaatatgaagttcatgctaaatggggccctaactatcgggaccatggatggggccaatgkggaaatggcagaagaagcyggggaagagaacctgttcatctttggcatgagsatagatgatgtggctgctttggacaagaaagggtaagagaatagcttctctttgctaggcaggactgcccctcccccctagaaggtatgtgacctcagagggcttcctgcccacaccgatatcccactgaaattggatcacataagaggtggcagcagaacatctcccacgatgaggcaggagagcctcctggccacagattaatattattaaacccagcaaataaaagtacagacacatggaggagttgctatttgttatcggccattgcagagctggcctcaaagagctatttttcctccgtatgtatgatttttactttgatcaaaagatgaaccagtttctagttggaagggttgcctataatttaaatcatgatctagtgctcctttaagatatcaaagaaaygcactaaaatgtgatagagaatagatacgggtgtacagaagtaattggaaacatttattttcacttcatatctggatgggtttattaacctgagttcaagcacaaaataaagagtactgcccaaagaagtaacatttggaggatgttgaatatacttcctgacccttggaagtcagtttcactcagtagcaacaacttttgagaatctgtggatccaaaaagcaactgatctacttaatacaatgttcatttaaagccataaagtctgctttgaaatggaccttgctgtattctaccacatcagactcttgatgtttgactagagttttcattatctattgttcttagtgtctttggttataaggaatcaaatttacaggaagaaaaacttacagatctagttaaaagttatatatactcatggtgaaatctataatgaagtctttgaatgctagtatttctgaatgtattttttcacagtgaatgcagtgtctagtgtgttgttaatcacacaacacaataacagagcctttttttatcacccacccacccctaccccacaggtacgaggcaaaagaatactatgaggcacttccagagctgaagctggtcattgatcaaattgacaatggctttttttctcccaagcagcctgacctcttcaaagatatcatcaacatgctattttatcatgacaggtgagttcccataagaagatggtgctatttggatcatgaaagggggacaagaaaatcttaaaccaaccaactctaaaaccaacaagaaaatcttaaaccaatcttaaaccaacttaaacccactcatgtagattagcatagattagcgtgatctgctcaggtagtttaggcttggggaaaaagttagatattctccaccagcgatgccagtaaggtttaagaataacacacacaaatctggttctctttttctccttccactgatattcccaacttccaaatgcatccmagtgatgacattctcacatgtgagaaccataagaaggttgagggctggttaaaagtcttacaaacagaaatatgaatttggtaaaccagccatgcctgatattaagcaaaagatgattttacatggaattttagcatatatctattaatgaagattttgactgkttttttcctcttccactcacaaaataaaaggtttaaagtctttgcagactacgaagcctatgtcaagtgtcaagataaagtgagtcagctgtacatggtgagtaaattgccaagatttataaagaaaaccagtttactatgattcattaaaatgtgggttttttaattaaatgcaaatatcagatccccatgtaatatcagatccccattaagcaatcaaaaaaaaaacaacaaaaacaaacaaacaaccacaacaaaaaaaaaaaccttgtcttttcccaagttcaggccaaggttgagatttgacatttcagcaggagttgtaattttttttttttttttttttgagacagatctcgctctgtcactcagacgggagtgcagcggcgtgatcctgactcactgcaaccttcacctctcggcctcccaagtagctgggattataggcacgtgccaccacacttagctaatttttgtatttttagtggagatggagtttcaccgtgttggccaggctggtctagaactcctgacctcaggtgattcacccgcctctgcctcccaaagtgctgggattacaggtgtgagccaccatgcccagccagttgtaaattttttaatatccaagttttttaaaagtcacaaataattcaatatttwttgagcacccactctgtagcagacatgtcctggaagctaaggaaataaagcctcagaggggcattaggcgtcttttttatgccgggcactgtgctggcactgagaacacagcatgagcaaagttgaggtctctccctccctcccctccctcaaggagcctgtttgaacatcgagattcttaaccagaggtacacatcagaatcaccaaggtagcttcatcatagtacagatgccagcccccgcactgagagattctttcccagtaatgggtggggtcatcagtatttgagaaacctgccatgatgattctaaggctaaaacatggttttttaagataaggactgacccctattctctgaaaattgcaaaataggtacctcttctggacttctcatggagggggctgtatcaatagaatataaattcgtagaaagagaaaggtgttcataattgaatttttaaaaaaagaaagaagaataaggaagacaatactatactgaggggaaaaaaaagggatgggtagagccatgtgaataagcctctgcatgcaaagttatacgctttatcaaacaactctctagctgtgttttgtaaatatgtaaaaaggttgatcatctctgataggagagacttttagtgaatttcagataccctagaggaatggatactggagggggctagctctgtgccaagactccagggtgggttttactaacatttctttctactcctttcccaaggcagataaaagggtagttcctactgtcatcctaaatgtcccactgggattttaaaaaggatcattcaacgcctgtgctgctttacagcccttatcttctaatagaataatggccagtcccccagtggcatatagaccagaataagttcaagttaatggctacaaacaagcagggcagtgctagagctaagctcaggggctcactacctgcttcctgtacattggagagaaaagccatatacaggccgcaagaatgcaaagacacagggaagagaacggccacctcaagacagatcaataaaacagcacaggaaagaaaaatatgaacaagggcaaggacaaatgtgaatgtctcctctgttaaaattatggcccaaatccaaacgatgctcatctagaaacccagcatttgattcggtctttcttgttcattagtgctaattgcagctttttactcttaacaatgattgtattgttgagacttagtaaacatgacccatatgactgggaagtctattcattatccatttaaatagttaaagaaaatgaagagagaaagcttttatcctcctcttattacaggaagcttccaaagtctgaataaacaaatttcagatgctgttttgctgtaccttaaggaatgatggtagttttagtctttctcgtaagcatttataatgcattgataacatttttgaataatgttctgttcacttccaatacacttttagagttccttacaaaattaagaggctataaaataaattccttcttatcatattcttttatataaaaattatgagattttgatatatttttattaaggataaagactcaattgaccctgttttgaagccccagtggagtgtttgggactcagtgtaagcctactagggtgcgtatcttcagaaagaacaagaaaagctaagtaggtcaataaagcctctcattgaattgtttgcctgcattatagctaacattttagagtagtgtttttcaaactctatgagccataggataagtctcttgacatggcatttagcagacaatggattcctcccctatagtttaaagggaagyatcttcattcataagraagcatgggaaatatggcttacatgccaaaacattgtaaccatagcaggaattgccaactaggcaatgtacatccatggtttctcttagagtgaaaaatacctttttttcattcctaagagaattatactctaaatatgagaaaagtgcattctattctacctctcaacagacaaacaagaatatttgtaatttactataatttattcctgtcattttccctcatgaaatgtgtttggatgtgcttggctgatgttnattataaagctcactgcncactgggactctgggctgtatatgcatatgttgtttacagaatccaaaggcctggaacacaatggtactcaaaaacwtagctgcctcggggaaattctccagtgaccgaacaattaaagaatatgcccaaaacatctggaacgtggaaccttcagatctaaagatttctctatccaatgaatctaacaaagtcaatggaaattgaactctasaattgtctctagaaaacatagcttcttactgaacttgaacatttttacaacattcactggtttttgttttgttagctaataatctataatagttgagtatctctgggaatggggagggaaattatatgtaatagagcttaaaaataaagtgtcaatttccaagggctacatgagtgccaaaacttattttatagcaaatctagtgatgctttgctactgctaggatttaccccaaaactagtcataaaattagaaaactgcttagaactttcaaatgccatttaaatgaactaaactaaaatacaaaaaacttaactatgtagaagcaactttcttacactgctatctgagtccaaaccaaagaccaatgtcttagtccctgtgggccactaaaacaaaatggcataaactgggtagcttataaacaacagaaatttatttctcacagttctgggggctgggaagtccaagagcaaggcactggctgattcagtgtctgatgagggctactttgtggttcatagatgaaggcttctcactgtatcctcaaatggtaggaggagtgaagagctcttttggtcataatttataagggcactaatctcattcatcagagctcagtcccacctcctattaccatcacactggtgattaggtttcagcataatttgggggggcaggcccagatattcggaccatagcaactaccttattcacaaatatccacagaatgtttaataactacatatttttagataggatctagattttaccaaattctggttctccacagtgaggtttcagcatgttttacaaagtagattatgataagctaaataagaacattccatactgcctaacattcgtactttctgttgttaaaatggcaagtgatttgtagagaagtcaatggcctcagctcatccgaccagcccagtacaattttacattagaacaatatacatcacaggtggtgtttgggccaagtcttcattgaagatttccactcctcccagactcakgaccactgcttgctcaggaaatctctgtagaaaaaggacccagatcagctcacaccctttccctacctaaataagcaaaatattatacattttcatgttgtggcctaagtaagccagagcagccctaattgccttgaagggcaacatacatttagcaaagcaactcttacctcacggttattaacagtgtggggcttttacaaagcaggttgtgttggaagccaggagsaargataaccatcttgaccctctctttgttcctgtatgcattgcgtgcaatttcatagagctgcaagcgacagaaagagactcaaaggatggccattcaaagctgtagatttttctagtccaatttccctaaaagtgtacagaaacagctaacttggggagtttgttccattaagtcagagacagaaaactctccatgtcccagttgcctgtctctacagctaaagatctgaatgctgctcagctaatatagaatactgataaaacctcatccttccctgcttgaacctccctgcaaaatgccaaggaattgttatggacccactctagtagaagtttgtttaaaaggaaaaagtctgcgtcttccattttagagccactacagtagagacgacatggaggttcccacagcagcctgggataccctacacttgcagctccacacaatccagatgaggagccaggctctgccacaaacactcctttgagctaagtagccaaggatgctgatacccattttataaacctatagaggctatttaggggtgtagagaatctcctataatgtcagagaccctcctttcggctctaatcaaagtttggctgaatgaaaaaaatggtgaaatgagtatagtatatttcagtcagcattgagcccttagtttacctttttcccatactccaaaggcactgtcctgtcatcctctccatgtaagatgagaagaggagaagaaaggaatttaacactagggacaagtagaagaaaagcattcagttaaagaatgatacattgagatttctcctcttctaagttaaagctttagcaaaacatgaggcctgtctaaattacaagaaatttctttccttccttccaaggaataacaatatcatacatttaaaaatttcacatagtagctttttttctccatgcaagtttccctctctcccatttactcatgcaatttaactggctgtttaattaatttacttctgcatgatttttggaaatactaaaaaaaaaaaacaaaaaacactgaaacactgattttgtacagtgttagaagaaccttatattcttctttactccacctattttgtaacatctgaaatattttattaaaagactaaaaaagaaaacaaaactcaaaacctcaataaaacaaaaactatgacagaatcagagacctctttgtagcaatttgtttacttttctccataaatgtagaggatggacgtgcagttaacaggtctgattagcttcctggtcaaccccctagtttgctaattcaaaagggctatggcatgaagaatgtcttgtctcccactctagttactttctcaagcaatgcttccctgtccccccaaaattctgatacccatccatctctgccacagtgactcactgacacccctgagaatgttggattttctcaagtgtgttgacatagaaaaatatattgacaactgtctatttggaagcattcttaaattctctaactgtaacaggctaacttgataaattctagtcattggatttgctgtcacattagtaaggtggatggtagacgagttttcattatatggggaaaagggcctagaagtcagagatgcctcaagaaatgttaggctggttttttgtttgtttgtttgttttacaggatgtcactctgtcacacaggctggagtgcagtggcacaatcacagttgactgcaacctcaacctcccaggctcaagtgatcctcctacttcagcctcacgtgtagttgggatgacaggcacgtgcccccacgcctggctaattttaaaattttttggtagagatggtgtctccctgtgttgcccgggctggtttcaaacttctgggctcaagctatcctctcacttcagcctcccaaagtgctaggattataggcatacgctaacactaccaagccctttaaaaggtcttgataggctatagatatacaacttcgtttatgaattcagagagagtactgaattggtgaagtcattgaattagacatgaggaaaatagcaaatactaaaaattcatagatactttacccaaatcttagtgcccatctaagaagcgcagaacaatattctaagaataagaatgatattcaggatgtctcatgtcaccatccagtaagtcacatgatagttgcccctagaatcctttagatacagtaataatgcatgtcttttcatcattaacttacttttcatcattaggaaagaytattttgtcttttctcagggcatccataagtgtacgtaaaaatcctggaatgttccggtaaatctatttttaaaaaagaaaaaaaaattaatatttgccccatagctatgccatctgttatatagtctttcactatgaaccagggtaacacagagagtagtgcttctctaagtaaggtaaacttcacaaaaaacttctacgatttaaaaagtaatgcacgtcgggaatttggaaaaaaagaaaggaatgtagaagaaacaaagcacacataattctgccatcatagaccatcattgttaacattttgttttcacttcctaaaaatggcacaactaactcttacttctccatgtagaagcagtggtatgcaaaacctaaaattgcttctattgtgaacataactggtttagttggtggacagaatattctgattagtcaaaaattctgatgaaaatatacaatacatagaaaattgattttagagaatttgaacattacaaacttttgaatatgatttaatatgccaatgccttaaaagacattttagtttttaacaatgaccacaggattccagatataacaatgctcactctagacatactaaatttgttgtttaatagcaaaatccaagaaatagaatgctagctaaatccacttttacaatgttttgactcacatagtcaacatgtaagttagtttatatgccctagaaatatccgttttatctggaaataaggagtaaaggataaaaatcctgagcaatattgcacctttctcacaaactttgaatcctgcctccaaaactatatcctaaacccattcatttctccccatccccactatcacttagcctaagccacccttcatctcttgcttatactaagctgcaattccaagtggctccccgattctgccttcacccttccataatccagttcccacaggaaaaccagaatgattattttaacgtgcaaatcagatcgtagcactctttcgcttaacaccctccaaaggcaattggattaaacctgaacatgtcaccttggcctccaaggccctgaagaatccggcggcttcctgcctccctctccagcctcatctcctatcactaagcaccttcctgtccacctcctggctctgctgccttctgcttctggaacatgtcaggcctgatcccacctcaaggcgcttgcctttacttttaccccagcctgagatctctatattttcccatcagctggcttcatctcaggcaggtctcagctcagatgctatttcttcggagctgttttccataaccagctaccaaaccttgcccccaccacccagtcattctccatcacattattttggtgctttcacagaacttctcactattggatttcttttttaatgtatttatcttctatctgtttctccatcaacaatatgaacttcgtaggtaaatggaccacaactttcttattccctgtggtgtcctcaaaaactagaaaagttcctggtacataatagacacttcataaatatttgctaaagacaaaatgagtctattgtgcaaatatccctggcgtacactttgttattatctgtcattttcatttagtatgattgaatttcagatattacttattttatttatttgtttgtttattttgagacagggtctcagtctgttgcctagactgggagtgggtgcagtggcatgctcatggctcactgcagcgctcaaactcctgggctcaagcagtcctccctcctcagcctccatagtagctgggactacaggggtgtgccaccacacccaactaatttttttgtacagaaggggtttcaccatgtttcctagactggtcttgaactcctgggctcaaagccatcttctggccttgaccacccaaagggctgggattacaggcatgagccacagtgcctggcccagatttaaattttttttttcttttttttttttttagacagagtctcactctgttgcctaggctggagtgcagtggtgcaatcttggctcactgcaacgtctgcctcctgggttcaagcaattctcctgcctcagccacccaagtagctgggactacaggcatgcatcaccacgcccaggtaattttgtatttttagtagagatggtgtttcgccatgttggctaggctggtctcgaactctgacctcaaatgatccgcctgcctcagcctcccaaagtgctgggattacaaatctttgcaataaatttgcaaagaggaaaaataagcaaagtattatacattttcgtgttgtgcctgagagaggaggggtagagggggtagtaaatgggacatggccaagagaaggaaataggcacagaatagggaggttggacccaataaatacaaacttctgcttcacaattttttaaaaagaaaaagaaattaaaacttgccccatggctataatgtcatttgttaatagtctcctactatgaactgtaataatagaatagagactttctaaatagaataaacttaaatacaatttttctgattttagaaagtaattgatgtcattttagggaatgtggtaaggaaatgggtataaaataggtaagccagtgccactaaatacaaattgctgcttcatagttctggcttaggcctgctattcccccaggaatctccttggtttttggtttt

SEQ ID NO: 95014 - DNA, 27526 bp, Homo sapiens
acactaaatatatacttgttcttgtttctttcctcagcttctttattaaacataaaagtacataaattaataattataacaatatattactgaatttataacatagatacaatatataacaataacacaaaaagtagaaagagtaaacagttacataggagtaatgtttctgtatcccactagaattaagttagtataaatctgaagtagattctgataaattaatatatatagtaaactttaaagaaaatgctaaaaaaaactttcaaaatatacactataagaaattcttataggattatatgttatactagaaagtgtttattgtaaaagacgtagtaaaggaggaatagaggaatgaagtagtcataaaacatatagaaaacataaagtaaaatgacagaaatccaaccatattaacaataacatgccagttgtggtagctaatgcctgtaatcccagcactttaggaggctgaggcaggcagatcacttgaggtcaggagttcaagaccagcctggccaacatggtgaaaccccatctctctaaaaatacaaaaattagctctgcatagtggcgcatgcctgtagtccctgctacttgggaggctgagacaggagaattgcttgaacccgtgaggcagaggttgcagtgagctgagattgcaccactgcactctagcctgggtgacagagcaagactctttctcaaaaaagccaaacaaacaaacaaaacaataacattaccagtaagtggagtgtccaggcactccatcccggacaacagaatgagaccctgtcccccaccaaaaaagaaaaaaaaaaaagcaaatggattaaatatgtaatcaatcaaagggcaaacattgttagactaggtagaaagaaataaaaacaaaaacaaaaaccctcaaggtctagttatatgctgtctacaggagacacacttttcagattaaaaaatacaaatggttgaaagtaaaaggatggaaaagatatatcatacaaatagcagcaataagaaagctgaagtggttatgctaatatcaggcaaaatgaatataaaaccaataaaaaattctaggtgtaaagaaggaaattttatgatgagaagggtcaatcctcaggaatatataacaattataaagatatatgtcagagccccaaaatacatgaaacacaaactttcagaacgaagagcaaaatagacaattcaacaatatttggagaacttcaatactccactttcaacaatggacagaacaagtaggcagaatatcaacaagaaactagaagacttgaacaacactatacaccaatcagacctaacagacatctaactatagaacacccagtgatggaagaatgcaaattcttctcaagtgatggaatattctctgggataggccatataccaggccataaaacaaatctcaataaattttaaaaagattgaaatcatacaaggtatgttctctgaccacaatagaatgaaattagaaattaataacaaaaataaatttgggaattcacaaacgtgaaaatgaaaaacacactcctaaatagccaattgacaaaaaagggtatcaaaagagaaaattagtatatgctttgagatgaatgaaatgatgacacaacaaaacaaaagttatgggatacagctaaagcagggttgggaaatttagagcttaaacacatacgttaaaaaaataaagatctcaaatcaataatcataactttcatcttaaaacaatcagggtaaaagggggcataaacccaaagcataaagaagaaggaaataatcaagaagagaatagaaaaatggtagagaaaaccaacaaaactaaaagttggtgctttggaaaggtcaacaaaattgagaaacctttagctatactgactttgttttgtgttgctataacagaaggctgggtaatttataaacaaaataggtcatgattattagctcgtggtgcaaatggctgggaagctcaagggcatggccctggcttctggtgaggtcttctgtgctgggtcataacatggcacagaaggtcaaaagggaagcggacaagtgcaaagagagaaaacctaaggggtatcctggctttataacaacccattctcaagggaactaattcattcccaagagaactaatccagtctcatcagagtgagaactcactcactatgagaacaacaccagggccagcattgaggctatcacctttacttgggaggctgaactggaggagcacttgagaccaggagtttgaggttgtagtgagtcatgattgcaccatctctccccagcctgagtgacagagagataccctatatattttttttaaaaaagaacagcaccaagccattcacaagatccaccccctttattcaaatccctcccaataggccccacctcccaataccatcacatggggaatcaaatttcaacatgagttttgatggagacaaactcaaaccatatccaaaccataacactgaccaataaataaaagaaagaagactcaaattactaaaaccagcaataaagagaggacattaatatcaatgttacagatataaaaaggattataatactatgaacaacgttaggccaacaaattagacaacttacatgaaatggacgtattcctagaaagatgcaaactaccacaaccaactcaagaagaaatagaaaatcatagtagacttataacaagagattgaattagtaatttaaaagctacctacaaaggaaagcccaggcctaggtgacttcactgctagactctatcagacagttaaagaagagttaatacaaattcttcacaaacacttccaaaaaatagaaaaggagggaacacttcccagcttattttacgaggccagttatatcctgatagcaaaaccaaagacattacaagaaaactacagaccaatatctctaaggaatatagacataaaaatatgcaacaaaatactagcaaactgaatgtggcaatatataaaaagaattatacaccatggctaagtgggatttataccaagaatgcaaggttgatttcatgtcccaaaatcaatcaaygtaatacactgtatctttgggaggctgaggcaggcagatcatgaggtcaagagaaagagaccatcctggccaacatggtgaaaccccgtctctactaaaaatataaaaattacctgggcgtggtggcacgtgcctgtaatcccagctactcgggagttgaggcaagagaattgcttgaatccaggaggcggaggttgcagtgcgctgagatcacaccactgcactctagcctaatgacagagcaagactccgtctcaaaaaaaaaaaaaaaaaaaaaaaaaaaaacaccatatcaatagagtaaaggacaaaaaccacatggtcatttcaataaatgcagaaaaaggatttgtcaaaattcaacacttcttcaagataaaaacagacgaccttctaggaatagaaggaaacttcctcacctgtataaaaggcaactatttagaattcacattaacatcatacttagtggtaaaagacaacgcttttctcctaagaacaggaacaagataagtatgtttggccactcttgccatttctattcaacattgtaatggaggtctagtgtcttagcttgggctgccataataaaatatcatagactgggtggcttaaacaatagaaatttattttctcacaaatttaggaagttctcattgtactcaaggcaagaaaactctggactagggtgttggctgttgagatggaaattggtggtcagattcaggatacgttttgaaggtaacgtttacaagatttgctcataggttacaagaggagaaggtgaagagagagaacaataaagaattaacatgtacatgtttggctagagaaacctggtgaacctcggggctctttagtggatggaagaccaggagaggaagaatcaagaatcatcttttttggccgtttgatgtttgagcttctgaacccccaaaatctgagacaggtctcagtcaatttaggaagtttattttgccaaaattaagaatgcgcgcccatgacatagcctgaggaggtgctgaggacatgtgcctaaggtgggtggagcacagcttgattttatattatatattttagggagacatgagacatcaatcaacatatgtaagatgaacattgtattggcctggaaaggtgggacaactcaaagcaaaggcgggacaaactcgaagccaggaaggggcttccaggtcataggtgggtaagagacaaatggtggcattcttctaagtttctgattagccttccaaaggaggcaatcagatatgcatttatctcagtgagaagaaggatgagaggcaggtttgccctaagcagttcccagcttgacttttccctttagcttaatgattttggggccccaagatttcttttcctttcaccagctattacatacccaagagatgtttagcaaggagttgaatacatatgcctgtagttcccagaaggatcagagtctgaatgatatacagttgaatacatatgcctgtagttcccagaaagatcagagtctgaatgatatacagttgaatacatatgcctgtagttcccagaaagatgagagcctgatgatatgaagagaaaggtggcgggagatggggggcggggggcagtaaagcatcctggagatgccgatgtccggaagtaaaggaggaccagccaagaagtttgagaagaatcagctactgtaggacagaaaaaaaagcgagctgcccagacagcaagatagtaaagtgtttcaagggtgtggtagaatggggctaggagtcatgctagatgcattgagaagaaacaattgggatttatcttgctggtcgctggtgtccttgagagggctattcagtggaggggtggggaaggggactaattggggttagttaagttgaaaaggtgaggtaagatagtggcaactatttccttgagacttagtctctctctatagcccagattggagtgcagtggaatgatctcggttcactgcaacctccgcctcccgggttcaagcgattctcctgcctcagcctcctgagtagctgggactacaggcgcctgccaccacgcctggctaatttttgtatttttagtagagacggggtttcactatgttggtcaggctggtcacaaactcctgacctcaagtgatccgcctgccttggcctccctgttttgctaggattacaggcgtgagccaccgcacctgcaactattttcatttgactgatggggcagtgcacattttggtttgcatttgtatttacgaatgtttgagagaaaaaactcaaatatcttacaagcctatgtgtctggttccattttgaagtactgacctaggatctctgtacctactgaattttttttgagagataacatacacctgaaagtgcataaagtgcactgtcttaaaatgtacagcttgatccttctttaaaaaaaatcatatacgtacgcccatgtaactactgttcatatctagatgttgaacacctccaacacatccaacataaccataatgttcctctgcaccttccctgtctataatctctcagaagtaaaccaatattccgactcctataaaatccattagctttactacatgtttcaaagaaaacaaatgagaactctgaaggacatttaattggaaaactgctttagcacattataaacttaccaatttgcttgtaaacgctaaccatttggcgccaaaatcctgggagggtcttttaaaccgttcttcctcaaagcaccgccccactttttacaccacgcctccttttgctctgttccttcccccacaatattgggacaccctaggcggtagaagcagccgcttttctgtcatgcgcattgcggagagtcgttcttccctctttcccgacttcaccactcactgggatcagacccctgtcatgcgcattgagagtcctctagacaggcgctcctcgcagcaccgtagtgcgcttgcgctgagcagcccgcgagggcggaagtgggagctgcgaccgcgctccctgtgaggtgggcaagcggcgaaatggcgccctccgggagtcttgcagttcccctggcagtcctggtgctgttgctttggggtgctccctggacgcacgggcggcggagcaacgttcgcgtcatcacggacgagaactggagagaactgctggaaggagactggatgatagaattgtgagtgcggggcggccagggtcctacgtccgtgcctggacacacgacttcaccccgcacgttcctcgtgcgggtcrcaggctccccaggactgcgcctccgagttgcggagcgagcgtccccgacttctgcagctccccaaactcttgggatctgccgccagcttggtcccaccccctcgtctcttacccgtgaatgttaagtttcttctggggtgcaccctcgtttcgtttcttgggttgtggtgcgcccaaagggttagtgccaatgcgaattctgacatttttcatgactttgaggatgcgactggggcgcggggagggaggtgtccgactcgtgtctaagtagttaaagtgattcttcacagacttctacacttattttcaccacattttacataagagaatattgagcaaaatttctcctctcgttttgtctgtccttaaaagatagtctctttatggtgttggaatttggcgcttttaagctttttttaatggattaggtacgtttcttttttattgtaaatactgagtcaattcaagttgggttatttttaagttttcgttttctctttttgcctcctcttttgctttctctttttttcactcctcatctcatttttcctttgggtgtctttgtagtgtagagaataccttgggttgtgactcctaggtctttgtaaatggtattacattaaaagataatgtattaatgtatacactctcaagagcgccaggtcatcatttattgctcgaacgaaatcatgtattttgtgtggtgatttcaatttaataatatctgttctgccgcggtgggaaataaagtatctgtctttgctttagatgctaagtcgttgttgatggtggtattatacatattagcagtatttactgataatagtaaaagcataattattaacagtgtactggacaccactaagcacctttacacgaataccatatttaattccctacaaattctctatgacaggtgtttttcacgttttacaaatgagtaacaagatacctaaatactttagttaacctatgcagatattgctgtgctggctttctttgggtcttcagagtaggcatacaataattgttgttagaacaccttcttctttaaaaaggttcagctggaagtggcgtacgctacccaggagattgaggtatgaggatgacttgagcccaggggttcaagagatcctgggcaactagcaaaataaataagtaaataaataaaaatgaaaagacaacagggttcaggtgagtgttttcttgtgtcacgaatacagcaagggttgtcaagttaaggaggccagtgaaagtgacatccccaagggagaacccagaaggctaaatcagtaagtcctgtgttattttttaaaaaaacaaaactggccggcgcggtggctcacgcctgtaatcccagcactttgggaggccgaggccggtggatcacgaggtgaggagatcgagaccatcctggctaacacggtgaaacgccgtttgtactaaaaatacaaaaaattacctgggcgtggtggcacgcgcctgtagtcccagctactcgggaggctgaggcagaagaatcgcttgaatctgggagtcagaggttgcagtgagccgaggtcgcaccactgcactccagcctgggcgacagagtgagactcaatctcaaaaaaaaagtagaacatttatatggagggtaagataaagggaaattttcatagtatgcatgtagtctgcaattctgaaatgaattttcattcaggcaccattgaaagcttcaggggagaggaactgtgacactttttcagtcatcatcatgagtaacttgttttagatcktgcctgtaaaatagtgttataagcaatatattaagcaayagtgatcgtgtgtgtatatgcaaaatacagtcaagtattactcaaggatattttttaactcattatggtccaactatataaatacagcaatcagaagtagtattaaggagaacaagactaacaaaacattgagtatgaggtaaatccacattggagcatctatctgaaattatgctatagagtagtagtttttctttttccttaagtagagattctaaagtaagtttttagaaagcaactgacagcctgggcaacatggcaaaaaccagtctctacaaaaaaatacgaaaaattagctgggcgtgtgggcaggcatctgtagtcccagctacttgggctgaggtgggaggatgtcttgagcccgggaggttgaggttgcagtgagcccagatggcgccactgccctccagcctgggtaacaaagcgagaccctgtttcaaaaaataaaaaagcaactgagcaacaaaacgaacctgaaaaagaaggactctagtagttttagtaatagtctgctcctaattacaagtgaattatctacagtaaatccatttctgctcagaagttttgtcatggagatattttcattgtaatacgatttattgttaggagcttggcttttatactaccagtttgtcttgttctacaatgtctattttaggagtttggttttcataaaacaagtgaagaaaatgtgaagtacagaaagtatagttttgtgtttaactgctttaggctttattcttcctggttctgttaaaaaaaaaaaaaaaaaaagaacaaccctgtggtgtattataagataaaatacaataaagtggaaaaataagatcctcaggagataataccagaggagtaatttaaatgctaatatgcttgcatttgtaaatccaaggtcttggaaacaggatgacctaactggccaagagttttgtttggcctgcttagtatttgtgtgtgggttattttttgaggtaacattctcatataaaaatgcagctctccatcttcttttaaatatgaatagccagccttagtgtgccagcatccttagtggcaatcctacttaataatggttgccactttaagatggaatatgtgctttcttattcaccacagcccaggacacttctgtttttccaacaccttgcatttgtgactctgcattataaattattaaaattggtaagctctaactttggtcttgagctttctggtggccacaccgttaatagagaaatgcaaaagttttctaaagagctgttttgcatgtgaaaaaatcctgtgtcttattctcagaattttatttgattagcatcatcagttcatcattcttgatttccggattgttagatctacccttaaaagtttttcatctgcataaaattaaccaccttatcatcttcagtgttttcatatgaaatattcttcataaattatacatttaaattttttaatcccaagataaatggtcatactaaagtgcttaacttttttwwwaaaaaaatctgtatttcttagttatgccccgtggtgccctgcttgtcaaaatcttcamccggaatgggaaagttttgctgaatggggagaagatcttgaggttaatattgcgaaagtagatgtcacagagcagccaggtactgtaagtctttggttagttttgtttctttgctgtttggkttgatatatttatccttttttctacattgcatagtcttaattctacctttctttaggttttgaaaacctaacagtctgcagctagttaacctgacttgtccacctccctgctgggggctcagtgtgcartggttgcaaaatggagattccctggttgtgtatacacctcatttcttgaatgtgttgctttaagggttcttgaagacattaccctctttttattcttgcccacataactgcctctgatttgttgttctttgcatcccaggccccagactagtatgtaagatgcctttgagaagtcctaggacactgtggttcaggtgaacattggccaagccacatttgcatccataccaggcttcagaataaggagcatgtggttgagtgtttttctggagtcaaggtcacgttccctgacaaaagaagacctgaatctctgaaattgagttttaaatttagtacctatgatttgaggatgtgggcttctaaatataaagccctcgtggttgtgaggtcaagtgcactcctgacttggtccctggacaagtggcaggtcctgcccttaaggaggttccttccacagaccaatctcatcttaccgttctcggtagtcacactacccttggattcttggctgtcccatcccaaatggtaataataggtaatatttatcgagcgcttgcctattatagcactcttccaaatatcttgtgtttattatttaatccttatacaaccccgtgaaatatgtaatgtccccatttcacagataagaaaactgaggcacaggtcaattctctgtaatatcagtgcttgacacatggctaacaataaatgttagctgctattatttttgcctgtctcatgaaagattcatagtattttccatttttagcagcaccataaactgcctttgtttgttgaatgtcaagtacaattccattggattttagatctaagaccctattaccttgtgctctcccatgagcacaaggtgctcttattactagtagtcttaattttgacagtgatataaatgttgaagtgtttttatttaaaaatgtattcagtactctagttctacatactttttaactgagataatgtgcagtattgtgttttttaaagttgctttaagtacataattcatttttaaattatgtattacgaagctcaactattaggtataatttcatattctttcctattagtatgtatttaaataattcaaagtcacgttttaagtagtcagtgattggcctatgtaaaacctgctgtgtgttctttatttgtaggactgagtggacggtttatcataactgctcttcctactatttatcagtaagtatttgaagaytctaaattatggagaaggatgcattatagtgtaatcagaagtagtargcctctggcttggatcatgctggaagagctgaggtaatctcattatattcagcaggtattttagagggcttgttttgcttagtgttatcctaggtgcctttargtagttgagtgatgtgtgaaacagtctctgttctcaaagatttacagttgttttggaaagtgatgttcttgtgaaatggtgtgatcctgttcagcgtgttaagtcattatgcatccaaagtagtggtgagtcctgtaggtaattggataaaggagaaatcacagttacctggattggttcccagagaatatggggtttaaatgaaaccttggaagtagaattttaagagtggagcgtaagcattttattgtgaggacaatctcataaacagtcattaacaggaacatgttatgtccaaaaagtagctaagaaagtgctgttgtacagccttgggtagagtaataggtgacagttgggtaataaaacagaatgagcaagattatgtagtcttcagtgtcaggtctattagtttgactttatcttctaaattgagggtatgaaatctcaagtctgtgtaccccaacatcatgtagctggtaggttaaataccaggaggtactgaaaataagttgacaattctttgtatttatagcttgcttttctttgcccttttttcttttttttatggttttaaaattcacccctactccctttacatctatataaatttctgttcgctgtctccataagtgcttctgtcctgcccttctcattcagtccttttccccacgtgccccttcagtctctccctttgcttttcacttcttagtgccctgtgaccttatttggaatttcctgccctttttcttttagtcaaaattgtttaccatatcctttctcctgtttcctgcctgtcgaaatcttacctatgcttcaaataatagctcaaatgacacttcacaaaaactttgtgttttggggtggggggcttcctcgtggtttttacctctgagtggataaagggtcccttaaccctacttaacaggtccctagtagggagctgatgagtttttgcacttaaagatgttggagccaagagaacatttgtgactctgacagaactttctacattgggaatgggaaggaggaggtggatctaaggaaggctgcaaagctcactaaatagtcactgaaatgagaggaagggaagcaccrtaccagatgcctccagtgatttaaagcagggtgtctgaggtgatgctattatagccaaaagtactagaaaaatgccttaaaattttaagttatagcttaacagctaataattactatgtgccaagcactattctaataatttttatataattcttttaatatgtgtattayacataaggcttaaaagtactttcctgagatttatctacttactgtatttcatagtttcattacttggaagaataacagtaattacattttaaggcttatgatttaaaaaaatgtaacctcattgttaaattgggggctaaaatgtcatgastaggtaaatagtataatttgctattaatacttgtacattgctaatgcttttgaatgttagaattgactgtaaagtgaagtgaaaaaatagcaaaataaatattaaattatttctcagtgctggataatatttaattctgattctctttagttgtaaagatggtgaatttaggcgctatcagggtccaaggactaagaaggacttcataaactttataagtgataaagagtggaagagtattgagcccgtttcatcatggtttggtccaggttctgttctgtaagtatgagggctttttctcttacccatttcataattaattggaacagataattatattttatgtaaagcattcatactcagtttgtttcttgagctgttaaggtatatccacatttattacatgtttgatttttttttttttttttttttttgagatggagtcttgctctgtcgcccaggctggagtgcagtggcgcaatctcggctcactgcaagctctgcctcctgggttcacgccattctcctgcctcagcctcccgagtagctgggactacaggtgcccaccgccacacgtggctaatttttttgtatttttagtagagacggggtttcactgtgttagccaggatggtcttgatctcctgacctcgtgatttgcccacctcggcctcccagagtgctgggattacaggtgtgagmcactatgcacggcctacatgtttgatctttttagtttgaccttctaagtcaaacatattttcatgcttcttgagttagagaaggcattttatagaagtaagttgtacaccttttcaggaatattttagcttgctagatttggtcatatgtatcatcaaaaactaaatgcccctaagagtcttcacagtgtaatgggtaaagctatcactcgagtgtaataatttgaatgagtaggctcaaacttgtactcatgctacctccagacttcaatttgtcttttaatgttctgtctccatagagaccgtcaataattgccgataccaactaaattaattacataaacttcaactcttgatgtcaagcgactgaattatgtttggttggttattccacctgtctgataacttcttatatgaatagtgtgtataaacggtgaccgtaatagtgtgcctaagcactgagctttatagatatctagagggtagatgaatttcctcgtagcaactggctatggagtgataaggattggaagtagcaagcatgctttctgctttgctgttggagtacaaggcctcactggtcatgtgagagacctctgggaacagtgagttttgctgaggtcaccatggactgatcctgtgtggccatctgtctcttcctrtcctctcaccacacttacctttggaggatagggagttgggacagtaatcacataagagaaaaatgctctagattctggggatgggagaaagattagccctgttaacactcacccattgaactaccatgcccaactcaattttggatcctactgtttctgaaataaattactgcagactacagtgaggctatacagtgctttatgtttcagttccttgtttctcttctcacttggcttttaaacaacagaagcaacatgattaaaatacctttctgtgtcgaactaaaagtataactgatttttgttctctgaaatctcatctcataaatgaatcttgtccttccagtagaagaaagtagttgcttgtaagtctattttcaagcagctacaattgggaactcacagacctttcttatttctgaaacatgcctttttaaaactggccatttaattatgtaaaatactaatttttgcttatatgatgacttagcatttatttcctatgtaataattttgtatatcattaaaagatgtcaaactaatgmtcttgtaaattttaattaatttcaataaaaaagagggatagttcttaaatggaaagaattggcttgacaattgtttccagtccttactttagcctccctttggtcttgctttgaaggcttttaagggtgagtaagagttgccttttccaactggtttcatggaacttgtaaccctttactcagtgtattggagaaatcatcagatgaaatacaaaatattaacatcaaaacagtgggagaaaaggaaaaaaatactgtcaagtatttttatttatgaggctgtcacatggtagtgtcaatttagaaacagttttcatgaagaaggcttattacaggcatgaaatcagtgatgtgtcactagtcttgattaacagcaataaaatctgtcatattggggaaattatagagtagaaaatagtatgtatagacaaatctgtgtatgttactcagttttttaatcatctcttttatttttaggatgagtagtatgtcagcactctttcagctatctatgtggatcagggtatggactaaaatatttttatcttaaacatttttaccactatcactttaacaaaaatgaacagatttttagtttttttttttcttttgattttagacktgccataactactttattgaagaccttggattgccagtgtggggatcatatactgtttttgctttagcaactctgttttccggactgttattaggactcgtaagtatttcatttttggagtgctaggaagaaagatatttaaaaatgtgattatttaaaatagttacattagctgtggcatatattctacattcagatttcttacartgtttatttttacagtgtatgatatttgtggcagattgcctttgtccttcaaaaaggcgcagaccacagccrtacccatacccttcaagtaagtatattttaaaatgtttattttttattcacgatagtcctattcatttctgtaatcacaatcacacatttcacaggttgctcttccagcttagaattctaactgtggattgttggtctttatcagctatggcataaaggaaggtagaggagatgtatatttcatataagaatgtagcccagtggattttggaacattgttattttcttgactcttatattatggggaattttaacattgcatatagcatgtagctatttaataatatttatttggtgtcgttttataagtggagtatattctactcttgaagtctttcattagtataccggccgccacatttgaagattattctttgaatgccagccaactgtaagttttttctggtaggatattgggaaaagcaatccctatagttgatttaggatgccactgacactgaactgtactacagaacaatttaaataattacaagcatttaccaatcttgtaattgtactgttaatggaagcatttatatttgcagttcttaaagaacttttacttatctgttacctcgtttgctcttcagcamctctgtagtagagtgcataggtgttactgctcccattttgtacttgaggagactaaggttcacagtcacacagaagtgacaaagctgattttaactaaatcagacttgtggcctgatattccttcatttattatgtcttttgtttgtttgtttgtttgtttgtttttgagacggagtctcgctctgttgcccaggctggagtgcagtggcgcgatcttggctcactgcaacctctgccttccgggttcatgctattctcctgccttgccctgccgagtagctgggactacaggtgcccaccaccacgcccggctaattttttgtgtttttagtagagacggggtttcactgtgttagccaggatggtctcgatctcctgacctcgtgatccgccagcctcggcctcccaaagtgctgggattacaggcgtgagccactgcgcccagccatgatgtctttcttaacttagcttattgagatcaaaatttccgaaatgaagtctatggagattgaatttatagtgtaccttgtcctttcatactggtaggtcatcttttcatttcttagatagttgcattgatactaaaaaggacatgcataggggatggaatcattttatccaaaaagggccactgatgtctaggaaaaaaacgtaagcacagattacttaaaagacaaatgtattgttaggtttaaggtttttgaagtgaaatgaatataaaatgtttactcaccaacttttaaattgtgaataaaatgtaagatataatttagtagatacaaaagatagatatataaaagtagctataccgatggtccctgacctacaatcattcaacttaaaattgactttacgatggtgcaaaatgaatatgcgttcagtagaaaccgtactttaaattttgaattttgacctattctgggctactggtatggagtacttttgtgatgctgggcagattaggttaggttaggtgtattaatgtatttcaacttatgtaaggataggttagttgtattaaatgcctttttgacttatgatattttcagcttatgatgatttatcagggtataaccccatcataagtcaaggagcatctgtattatgttttgtttttttatattctgtcttcaccctcacataaatcatatggccgtcagaaaatccgttgtgtgataagtgtgcaactagcattggatcccataaatgtaccaaagtacctactaagtcatgtgatgtgcaggctgttactgccactgttgccaggtcgtcctcctgtctcccaagagtttactttgggagtctgcatagattgatttctctgaggatgtaggtgttggagtctgagtcatcttaccacttagagcaaacttgagagtgtctgagacttgcccgaagaacttgttcaaacagattgctgattccccaccctgggttttggactcagaagttctgtattggggccaagaatttccatttcttaaaattcccaggtgaagttgatgttgctggtctgaggaccactatttgagaacccctgtcttagagaaagtggttaccaatgggaaaatctataggccccggggcctgaaataacttgtcttttggtgttgaccatacaaactttttaaaagaatactgactctgatagaatcctttctgtgcaatatygtggaatacgtaactggtgtacacaaagaggtaagtgttctcaaacaagatgggtaagtcagtgaataggcacaattttagaaactttaaaagagttgaacctaaggaaatgacagagataatactctacctcttttaggaagttacaagggaattcatttcttggaaatgaaatttttaaaatgacttggctaattaatgtcaagctacttaagtttttctgtcctctattatgatccacagtaaaagtcactaaagaaatctttccctttaaatatctgttaatttggagggattgaaaggtataaagtaaagggttttttgaatgcctttccaaatcattcaaaaagaaggcaagcatggtctatgagccagagagatctgattgggcatcccaactctaccacttagtagcaaagcagtatgacagacattttttaccctctgagcgtgtaacctcctttgtgaaatgaaagtaattaaatttgcccctttggatcattatgacacttaggagataggtatgtaatgctcacattatcctagtaacatataagcagtaagcactatgtatatgattgtgtaatttatttttctttagtaatacaactgatattaatccagactttaaagtgatattgccatgccccttccgtaatggaacacatgatttgaattgtttttcagtatgtgtgcttgtcttgattttgagttgctagggttgctaaggaaacccaactcaatctactgttaagcaaaattggaatttattggtttatgtagggatgaagtctgaggtcagggttgactggatccttaaggctcaaatgatgttgttaagatgctgtttctgagttactcagttctccacaccttgacttgttcaattctcagttgagtgtttagaattttttattttttatttttctagtttttttctgctcacaaggacatctggatcagtttggccctttccagtcactagcataaggtggttagagaaaaccatagtcacaatctaagaataagaaggaaattcattttttttctacacccacctattttttggagaaattctggtgcactctgcttgtgtaaaggtctcattttttggaaaccagggtttctcagccttgacactattgacgtttttggccagatgattcttagttgtgatggactgccttttatacactgttgaatatttaatagcattctacttgccaatagcactgcccttctgaggtgtgaaaaaacaaatatctctagacattgttaagtgttccttgaggagggcgagaacttrcccttggtagggaaccactgctgtaaactagtattcaccaggaccgcctggggtgtggcatagaaaaggggctgttagcccaaaataaagatggatgccaggcagactaaacaacagatggttcattactggtaatttttccccatggtttattctgccttattaacccaatccttccttgcgggtgtcccctccctggccccaccattcttgattgcctaggattgggggcagtctgagatcattgaacagagtaaagctctttgacccagttctgtctcctgtatctcaccatggtgtgctctaagcttaagttaactagcagctggccatataaaacatcgaaagggtgtgtatttattcattgagatgtacacttaagatttgtacattttattcttgtaactatgttgtaataaaatcatacatatgggggatgagtaaggggaagcacatttataagaccagaagaagatatggacagaaatacaaccttcaactgtaaatgtgtgatttctgttcccctgggaactgaaacaaggatactgtttaagttttagtatacttgttgaccagaagtttaatagcaaattaatatgagatagtttttttaaaaggcagtcaaatttagcagtgggggttgtgtatcaccattagtgacagtaatagtaagttctgataacctactaccattggaccaaccagttttttttaatgctgtatattttctcacaacttccatattcacaacattaatgctgattcattaatttcagttcagtttataaataggtgggtaattagaatgactttgataactaaaatggctcaaacaatttttatttttataatattcatggtttttttkatcttatcttgaataactttccttttggacatccaaacatgataaatttatgccaaagcagttttggggcatatgagacattgtatcttgattttactctaaagcaaatctaatacatcaacaaaaatacatttttggtctttgtctttaagaaaaattattatcagaatctgcacaacctttgaaaaaagtggaggaggaacaagaggcggatgaagaagatgtttcagaagaagaagctgaaagtaaagaaggaacaaacaaagactttccacagaatgccataagacaacgctctctgggtccatcattggccacagataaatcctagttaaattttatagttatcttaatattatgattttgataaaaacagaagattgatcattttgtttggtttgaagtgaactgtgacttttttgaatattgcagggttcagtctagattgtcattaaattgaagagtctacattcagaacataaaagcactaggtatacaagtttgaaatatgatttaagcacagtatgatggtttaaatagttctctaatttttgaaaaatcgtgccaagcaataagatttatgtatatttgtttaataataacctatttcaagtctgagttttgaaaatttacatttcccaagtattgcattattgaggtatttaagaagattattttagagaaaaatatttctcatttgatataatttttctctgtttcactgtgtgaaaaaaagaagatatttcccataaatgggaagtttgcccattgtctcaagaaatgtgtatttcagtgacaatttcgtggtctttttagaggtatattccaaaatttccttgtatttttaggttatgcaactaataaaaactaccttacattaattaattacagttttctacacatggtaatacaggatatgctactgatttaggaagtttttaagttcatggtattctcttgattccaacaaagtttgattttctcttgtatttttcttacttactatgggttacattttttatttttcaaattggatgataatttcttggaaacattttttatgttttagtaaacagtatttttttgttgtttcaaactgaagtttactgagagatccatcaaattgaacaatctgttgtaatttaaaattttggccacttttttcagattttacatcattcttgctgaacttcaacttgaaattgkttttttttttttttytttttggatgtgaaggtgaacattcctgatttttgtctgatgtgaaaaagccttggtattttacattttgaaaattcaaagaagcttaatataaaagtttgcattctactcaggaaaaagcatcttcttgtatatgtcttaaatgtatttttgtcctcatatacagaaagttcttaattgattttacagtctgtaatgcttgatgttttaaaataataacayttttatattttttaaaagacaaacttcatattatcctgtgttctttcctgactggtaatattgtgtgggatttcacaggtaaaagtcagtaggatggaacattttagtgtatttttactccttaaagagctagaatacatagttttcaccttaaaagaagggggaaaatcataaatacaatgaatcaactgaccattacgtagtagacaatttctgtaatgtccccttctttctaggctctgttgctgtgtgaatccattagatttacagtatcgtaatatacaagttttctttaaagccctctcctttagaatttaaaatattgtaccattgaagagttyggatgtgtaacttgtgatgccttagaaaaatatcctaagcacaaaataaacctttctaaccacttcattaaagctgaagaccagtatgatttctggttgctttttgaaggtatgctttattactttgtatttaacgatgttcagatgagtagttgtgtgttcctatatatgtacttgatatgtgtaatcaaaagactgccttctttttctattgagatgtttaaggacagtaatgctcattaatcaagcattttttttttttagtgttctagtatatgtgacatggccaatttttttattagaaaatatgtgaccagaaagattctatagagtaaaaaatcaaagcaaaacaaaaaccacaaaaagacccctgtactatagaaaatgtaaagttggctgaacagatagggtcttgaaatttcaggaaacatataatctcacggttcttaaagattgtcactgtagacatctgagtaattaattttcagttagtaacaggcttatagaaactttgggattatttacaaatggtttaggaaagaataaggtatagtaaaagtaatatcctggagaattctgggccacctacccaccataatcaattcagctgtactactgaagtattgtaaaatctgatctctagaggaaaatacagtattctaccttacgttgtgtaaatacttaatgattatcagaaagactgaaaaaagttttaatgaagaattctggctacatctaacagctgccatttaccaagtacctactggagctttgttgttttcttgtatttattaatttagtcctaatgacaactgcaagacaggtaagcattgcacatctttcaggtgartcagcccagaggtgtggtacaaataggtaaaatttgaatctaattcttgttccaaatctttttttgtttgtttttgtttttgttttttttcttcagtgtgggtacatgaaattcagcaatctcttattttggtcttttttttttttttgagacagagtttcactcttgttgcccaggctggagtgcaatggcatgatcttggctcactgcaacctccacctcctgggttcaagcagttcttctgcctcagcctcccaagtagctgggattacaggcatgtgccaccatgcccggctattattttggtcttaaaatttcactcctgtcagaatgtaggagtgaataaatgctattcataaataaccataattattcagtatttgcagtctcgtgatgttggttattgcataaagtaagttattgcagtaaatgatgctttagaaagcaattttctctcatcagtttcgtccttattcagccttacacaaaaaaaggcatagttctgggcttaattgtgatgtaattaaaattattgagtgaacattttggctcatattttatgacattgtagttcatccccatggtcaatttaaggtagagttcttacaatatattactttcaatataggtattttattaataagaatttatttcagttggacttattaaatgagtggttttgctgagtgtatgagtctataaataaaattttaattgaacatcattggagatttagatatgttggtactgcttatctagcaacttttgtatttgtgaaaccattaaaactagagtaacaataaatttaagttggaattttggtaatatgtaaatagcaaagtcagattatatatttgaacaggtgtaacatatccccttttttcttatttatttatttatatttttgagatggagtctcactctgttgccccggctggagtgcagtggcatgatctcggctcactgcaacctccgcctccagggttcacgccattctcctgcctcagcctcccgagtagctgggactacaggcgcaggtgcccaccaccatgctcggctaattttttgtatttttactggagttggggtttcaccatgttagccaggatggtctcgatctcctgacctcatgatccgcccacctcggcctcccaaagtgctgggattacaggcgtgaggcactgtgcctggcctttgtcatttatttttaactgacaggaaataattgtgtatatttataggatacaatgtgatgtttttatctgtgtacatgtagaaagatttgaccaagctaatatatccatcacttcaccagtttatcattttttttgtggagaaaatgttaaaaatataagttagctattttgaaatatgcattaactgtggtcaccatgccatgcaatagatcactaaaatgtattcctgttgtctaactggaactcagtactgtttgatcaacatcttctctttctccattcctcccttacttcccagcctcttgtaaccacctttgtattgtttctatgagattaacttttttaggttctacatataagtgagatcatacagtatttctttctcttcctggcttatttcacttagcataatgtccttcaattctgtctatgttactgcaagtgacagaatttccttccttttttaaggctgtatagtattccagcatgtatactacattttctttacccattcattcattgacagaaacttaggttacttccctatcttggctactgtgaataatgctgaaatgaacatgggagtgcaaatatctcttcaacatactgatttcagttccttggatacatatccagaattgggattgccgggatacagggtaattctgttttttttagttttttgaggaaacttcatactattttccaaaatggctgtactaatttacattcccaccaagagtgtacaagggttcccttttctcaaaattctcactaatacttatttgtctttttgatcataaccattgttaacaggtgatctctgattgggttttaatatgtgtttccttgataattagagatgttgagcatttcttatatctgttagctatttgtgtgttttgagaaatatctgtttatcttttgcccatttaaaaaagttatttttcttaataactggaattgatttattaataaatcattagaaattattagacattaataagaaattatttctaaataaatagaatttagttccttatatgttttagatattggctctttatcagttatatggtttgcaaatattttctcccaatatatggattatgccttttcctgtgcaggagcttttcagtttgatgcaaccccatttgtctggttttgcttttgttgcctgtgcttctggagttctgttcaaaaaatcattgcccagatgaatgttgtagagcttccagtaactttatagttacaggtcttaggtttaagtctttcatccattttgagttgattatggtgtgagataagaattccatttcattcctctgcatgttggtaaaagcacttattccaaacaccatttgttgaagaaactctttttcccattgtgtgttcttggcatcctctttggaaatcaattgactataaatacttgggtttatttctgtgctatctatcctattccgttggttgatgtgactgtttttatgccattaccatactgttttgcctttttgctttacattttcatggaatatcttttttcataccttcactttcagtctatatatgtccttagaagtgaagtcagtctcttttaggcagtatgtagttgggtctttttttcttttttcttttttttttaaaaccattcatctgctctgctttttgattggagtgtttaatccatttatatttaaagtaactattgataggtaagaacttaatactgtcattttgttaattgttttctggtcaatattgtggatcagttgttcctctcttcctctattgctgtcttcctttgtggttccttgactttttatagtggtatgctttaatatttactttttattttttgtatatctactaaggatctttgctttgtggttaccacaaggcttgcgtaaaacatactaataacgggctattttaagctgataacaccttaattttgatcacttgcacaaattacacttttactccctactagtgtttttcttgacatgttttatatattttatagtttgtgttccttaagaaattattctagctatggtttttttaatagttttgtcttttagcctttgtactagatatataattgttttttataccaccatcagagtatgagtgttctgaatttgactgtatacttttaccagtgagttttctatcttgatatattttcatgttgctacttagcggtattttttgaagagtccttttgggatttcttgtaaggcaggtctagcggtgataaatcattagcttttgtttttcaggtaaagtttttggaagacaggattgctgggtatagatagtatcttggttggtaaggttttttcctttcagctttttgaatatatcatcctatttccttctggttggcagggtttcttttgaaaaacccagtgatagtcttatggggcagcccctttgaatgtagcgagtcactttttccttgcagctttcaatatcttctctttgtctttaacttctgaacagtttgattataatatgttttggtgttggtctctggattcatccttttacatcattgaacttcctggacctggctttctatttccttcttcagacttcggaaattttttaccattatttgtttgaatgttttgtccctttctctcttttcctggcacaatgataatgcataaattctgcttgatgatgtcctgtatgtcccttaggctgtcttcactccttcttatcctttttttttcctctcttcaggctgaatgatttccaatgacctgtcttcaaatttgctaatcctgctgcttgatctaatctgttgttgaaccattctgagttttttagtttagttattgtatttttcagcttgatgatttctgtttggtacttgttaatattttctatctttttattgaatttctctctttaagaatggctctccttaccttggtgagcatctttatgactgtccttttgaatttttgtcaggcaaatgacatatctccatttccttagggttggcttctggagatttatcttttttttttttttacttggaatacatttccctttttcttcattgtccgtaatttttgtgttagtttttgctcattagataaaagaatccccctccaagtcttggtagactggcctcatgtagatgttctccctcagtcagccccaccagagattctaagtgcctctaaactctttgtgcttgtccaaagaatctttgttcttagtggaccccaagaaattagagagcatcaagtcatactattgccttgtaagaggcaggatagaaggcagtcctttggaatgcaactgcagaggttggagtgtgagatatgattcagttcttcccttgcagagaagctgagagccagagtttatctctgactctttctatcttacatcaaggacgggtcagaagcagatccttaaagtcttgttcaggttgtgcactttgaacctggggagatagctgctgaacgtacaagtttaaaagtcatctgtttgttctctatggtccagaagactcaggaatacagagctctgtcagtttccagaactaggtgatgtaggtgccagtaaaggcttagtgaaggctttacaagttggggtgctagatgcatgtggaaactttccacagagtttgcaggttggatctgttgttggaacaa

SEQ ID NO: 95015 - DNA, 23851 bp, Homo sapiens
  misc_feature (1)...(23851): n = A,T,C or G
atttgcctattcatttaaaaggatatgtcaagtgggcagttggatatatgaatgtggagttcagaggactgacccagcctggatatgaaaacttcaaaactatcagcatattgttgatatatgaacccaggatgcaggacaaaatcaccaaaggaggtgtctgtgatttgagccctggggcactccaacatttccaggggttggaaatgaggagcattgactgagaattgaccattacattaaatttagcaatgtgaggatattggtgattgcaacatggtggtttcaaaggagtggtgagagtaaaagctttttggagtagactttagacagaatgtgatgggaaaaaatagagattgcaagtgtagacaattctttcaaggaatcttgtcgtaactaggaatgtggaagtgtgttagcacctagatggggataaggaagtcaagagaaggtattttgtcatttaaaacatggcagaaattacagcacatatgtctattaataggaattatcaaatggagagaaggaactgatcataaggagcaaagagaaaactgctggggcaatgttcttgagcattggagaggaaaagagagctaggacacaaaaggagcatttagtcaggtgggaacagtaactggaggaaatgcagaggaaaaatgtatgttttctacatctctatactttctcaattttcttccactggctcttaatcaaactgcaggctgtgcaaagctgacagctcaataccaatgacccagtcatagcccttcctccaaaagcatcacttaacatctccaggcctcagctttaccagctgaaaatggggagcttctttcaatttgaaatcagaaatttaaatttgcatggcattaaaacaaaagtgttatttatgcatttgctggcccacaggttgctgtggtgtaggggaagaacactaggctggatttaggaacatgggcttatgtcccagctttgctactgtccagcgatgtgatgttggagaaggcagagaatctttccgagattttttcttctccaaactaaattgtttgtaaaaagattataacaatttcagaatgatgtttcattgtaatgctttataaactatatagctctatgaaaatgaaggttttagaataacgctcagaatggagactttagcccaatttgctctattttcacttgttttgctttttaaaacagaaattgtcatcacaaacaaaactcttctctgaaaagctcctgtttttgcccccataaaagaaaaggaagcagaggctggggcaaatttgtgaaaaaccaaagtcctggtcatgtttaagtaggagtctggaatgcgtcccttcatttttctttttttttttttttttttggacatttcccccttctccccgtcctggaagccagcttttctcctattacaaatctgaagcgcccatccccaggcttgtccatgcaggtggaattctccactggaaactgcctcacttactcctggttgtctccacagcccaagctgtgaactcacaagcaattccttctsgaggctctaacccagcccctaccacaacagatgccgtttataaagagttgaagcaactgctgtaaatattggtgaagtaattgactagtatcattaacacagctctgtacacatagctgggtgtggaaggttctacaggaataggaccctgcaagcggttctgttgactcttcccaaccacactatttctagcaaattctgaccactccaggtgtctcaagactcttgcctttatacagtctatcatgcccatgttagccccacgttgccaggagtgcacaaggttttccatgggcacatttatgttgcataagtaatggttgaagatattccagaaagcaaaatattgccattgctttatacctgtctatagtgcttcttagagaattctgaacaggtagcattaacatattttagtctaaaatccttgaaaagggaagctaatgaaactgatttaagaaatattctgcattggtcagcattgagtgtctgagtgggctgggtgctccatcagtggtccctaatgaagctcagcccagtcaactgtactagtcctccgagcctctttgttcaggatgacattttagcaaaatgcacaaaggatgggccagcgccagggtgaagaggaagagatggagtgggtggtctgcttacaagctctggcagagacaatgagctgaagatgtgactgggtagcagggggcacattggaaaagaggcccacaatcaaagcaatgagaacatcagaacagggggctcctcccttgggggacttctgagccaagccctaggaaattttttaatagagtaaattcaagtataaataaataagccctctgagacaaaaacaatcattcatttattgtattagtttcctattgctgctgtaacaaattactacaaatttagtggcttaaaacaacacacatctattctattacagttctggaagcaagaagtatgaaatagtttcacagggctaaagtcaatgtgtcaacagggctgattctttctggaggctctgaggggaaaatccatttctttgccttttagcctctagtggttgcctgtatcccttggcaggtggcccctccccccatcttcaaagttcattctgccaatcagtcgctgcttctgttatggcactgccttctcttctgactctcttctactgtgactctcttataaagacccttgtgatcacatcaggcccacccggataattgaggagagcctctctgtctcaagatctttaaattaattgcagtttgagagtcagaaaaaaaaaagtgtttgtcctgttctttccctcaatgatcaacacttctgtgaccctagatttgtggaaatttttccccacgcaccaggtgagcaattctccagtagacactggctgactgtcctctaattcaattcatttctgacattgtctactggaagtagcctaagagaccacacattgagggctcagtccctaagactgccacccacctcggatgccagtctcaaggctgggcttccagaatttctgactgattggctatgaagtggggttcccatgactccctcctcagattagattaatttgctggagttgctcatagaattcagggaatcatgttagttatgttatcattttctaataaagcatattccgaagaacacagtygaacagccagatggaagagattcacagagcaaggcatatgggaagggtcacggagctcccatgccttctcccggcacactgtgccctagggacctccacgtgttcagctatccagaagctccctgaactcagccctttgaggtatttatggaagctttgttatgaggcataattgattaaattattgaccattggtgggcaattcatctttcagtccctttcccctccctggaggttggagagtgggatgctgaaggttccatccaactttctgtattagtctattttcatactgctacaaagaacatccctgagactgactggataatttataaaggaaagaggtttaattgactcacagttttgcatgtctggggaggcctcaggaaacttacaatcatgtcagagggtgaaggggaagcaagcaccttcttcataaggcaccaggagagagagaatgagggaggaacttccaaacacctatgaaaccatcagatctggtgagaactcactcactattatgagaacagcatggggaaactgccccccaatccaatcaccaacctccctgtttccctctacacatggggattataattcaagatgaaatttgggtggggatacagacctaaaccatatcaccctctaaacatggggttggtttccttggcaaccagcacccatcaggaggctattcaggagcccccaacaatcagtcaactcattatcatacaaaaagatccatatcacttgggagattccaaggattttagttgttgtatgccaggaaactgggaggaagaccaaatatatatttcacaatatcatgcacagctacaaagtcccttttgtcataaaaggtagcattcataggttgtgggcatatctggggtgccattattcagtctaccccaatttaggcttaacagctaggacctaagaaatggtcatttatatagaggataaaatggaaataaattattttcaagattaaacacttaatgaaaagttcacagctgcctggaaactgttttgagagcaaacattcatttaaaaaaaatgtttgccttttattttagatccagagggtgcatgcacaggtttgttccatgcatattactgcacgatgctgaggtttggagtacaaatgatcgcgtgacccaggtaatgagaatattagccaataagtagtttttcagtccatgcctccttcccttcctctcccttctagcagtccccagtggctactgctcccatctttatgtccatgtgtgctcaatgcttagctcccacttataagtgagaacatgcggcattaagttttctgtttctgtgttaattcacttaggataatggcctccagctgcacccacattgctgcaaagaatatgattttggtttcttatggctatgtagtattccatggtgtatctgtaccacattttctttttccattccaccactgatgggcacctaagtggattccatgtctttgctattccgaacagtgctttgatgaacatgtaagtgcatgtgtttttttggtagagtgatttatttgcctttggggatatatccagtaatgggattgctgggtcaaattgtagttctgttttcagttctttgagaaatctccaaactgctctccacagtggctgagctaatttacattcccaccaacagagtataagcgttctcttttatccacagcctcaccaacatctgttattttttgactttttaataatagccattctgattggtgcaagacggtatctcattgtggtttttatttgcattcctctgatgattagtgatgtggagcatttttccatatggcaaacactcattgaccaatgacttgggcaggacatcagttccctccagaggtactcagcaatgaaggaggcctcgttcctgcacaggaagagctgaatcttgtggggtggagtctcacagatgttcaaacagtgacaacagaggttcatcttgttttgtttttttttcctcagcaaacgcttgttgagagcctacccttgccaggccctattatcaagctggggatttacagacatgagacttgtgctcatggtttatttcaggggattagtagaaaatgagccaaaatccaggcagcacatgagcatgtgagggacacatttacagtgtttacgagttaggagaagagaggcgaatcactgccctttcaagattactgggagcccagaaaaatgccttttatcctgctccaagaatgaataaagagaatgtgcttgctatctgcctctctaataacacagagggaacaggcagagaaaatgagagggaagaatgaagggtagaaacaaactactaagaaaaccacaggaaaaggtgaggtgcctccggatttcaaagctacaagtaaaagcttttgacagagtccaagggggaaaacaatgtttgttcattcattcatacatacatgcaataagtatttattgagcatctaccaattgccagacactgttctagggatatagcagtagttaaaacagacaaagtaactcctatcctcatgaagcttacgatacggtttggctgtgtcctcatccgaatttcaacttgaattgtagttcccataatctccatatattgtgggagggacccagtgggaggtggttgaatcatgaatcatgagggcaattcccctcaggctgttgtgatagtgagtgagctcttacaagatctgatggttttataaggggcttttccccttttgctcagcacttctctttcctgctgccatgtgaagaaggatgtgttcacttcccctttygccatgattttataagtttcctgaggcctccccagccaagctgaactgtgagtcaattaaatctttttcctctgtaaattagccagtctcgggtatgtccttatagcagcatgagaatggattaatacacttacattctatgtaacaaataagtaaaatatgttgtataggtaaaaaaatatatcatctggtgctatgtcttatggagacaaattaagcaaggaagggggacagagtgcgatggaaaggattattcctctcctaggtgaagaagtatttatggagtgtctatcatgtgtgctaaatgcacacataaggcagagatgaattcattcatttgttcattaaatatttattgcatgttttctttgtgacagtcagtgtgctaaaccctaggaaaacaaggtgtctgccataaaggaacttccagactagtgtgaaagtcagtcattcaataacgcactgttcaaatgcacaattacaaacgaaagtaaaagctatgaatagggccgcgtgtggtagctcacacctaaaatctcaggactttgggaggccaaggaggaaagatcccttgaggctaggagttccaggctgtactgtgcaatgatcatannnnnnnnnnnnnnnnnnnnnnnnnnnnnnnnnnnnnnnnnnnnnnnnnnnnnnnnnnnnnnnnnnnnnnnnnnnnnnnnnnnnnnnnnnnnnnnnnnnnnnnnnnnnnnnnnnnnnnnnnnnnnnnnnnnnnnnnnnnnnnnnnnnnnnnnnnnnnnnnnnnnnnnnnnnnnnnnnnnnnnnnnnnnnnnnnnnnnnnnnnnnnnnnnnnnnnnnnnnnnnnnnnnnnnnnnnnnnnnnnnnnnnnnnnnnnnnnnnnnnnnnnnnnnnnnnnnnnnnnnnnnnnnnnnnnnnnnnnnnnnnnnnnnnnnnnnnnnnnnnnnnnnnnnnnnnnnnnnnnnnnnnnnnnnnnnnnnnnnnnnnnnnnnnnnnnnnnnnnnnnnnnnnnnnnnnnnnnnnnnnnnnnnnnnnnnnnnnnnnnnnnnnnnnnnnnnnnnnnnnnnnnnnnnnnnnnnnnnnnnnnnnnnnnnnnnnnnnnnnnnnnnnnnnnnnnnnnnnnnnnnnnnnnnnnnnnnnnnnnnnnnnnnnnnnnnnnnnnnnnnnnnnnnnnnnnnnnnnnnnnnnnnnnnnnnnnnnnnnnnnnnnnnnnnnnnnnnnnnnnnnnnnnnnnnnnnnnnnnnnnnnnnnnnnnnnnnnnnnnnnnnnnnnnnnnnnnnnnnnnnnnnnnnnnnnnnnnnnnnnnnnnnnnnnnnnnnnnnnnnnnnnnnnnnnnnnnnnnnnnnnnnnnnnnnnnnnnnnnnnnnnnnnnnnnnnnnnnnnnnnnnnggcttgggtagaaatagacaagtcccaaaaatcactaaccataacggcaaaaaaattgaagattggtatatttggttatactgcaattcaaatttctattcatcagactacaccacaaaaaggtgggacagaaaagaaagaaagaaaaaagaaagaataagttacaaattacgagaaaacattactaattcatgtaactggcaaagaagggatatctaaaacatataaaacccctaaaaatcagtaagaaaaagacaacagaaaaatgagcaaaatttatgagcaggcatttttttttttctgaaaaggaaactccatgggaaataaatatatgaaaggtgctcaaacttattagcagttattaggtaatgcaaattggattcctgatacatcattttacacttatcgcattgtcaaaaattaaaatatctgcctataataaccaagcacctgcaggtaaatcaaaagtaaaggcatttgattaagtcaaagagagaaaattaagtttgtttattcattcacacagcaagaatttttgagcctgtggtggtgtgtgtcttggggagaagggttggtaaagtgttatgggttattgttttcaccctgattcttatgttgaagccctaagccccagtacctaaggatatgaccttatttgaaggtagagcctttacataggtaatcaagttaaaacaaggtcattaggatggaccctaattgaatatgactggtgtcttcataaaaggggaaatttggacacagggacacacacagagggatgaaaatgtggagacataggaagaagatgccccttctcctagcccctctcctacaaacctaggagaggcatggaacagatccttccctcacagccctcagaaggaacccactctgcccacaccttgattttggacttccagcccccagacctgcgagacaataaatttttgttgtttaagccgctcagtctgcggcactttgttacagcagccctagcagagtcaaacaggtggggatctgcttctgggcttctctgtttcacacaggtcctgaggcaagaatttgcctttgcctgtaatcaagggcgagccgggcagccaaggttccgaaacgcaccgtgaagaccctctaactgtgcctactattctgctcccctccgatcggcgcggggctcttgtccttcctctctccacccagcgaatgaatgaacgcaggagcgctcggagtacacgtcttcaactcggcgacgcccctgcttcggccccaccccgcaaacacccgccccggaccaggcccagggtaggcgcccatgaggtatgtcgaatgaatatattcgcgcgctctttgcagctgcctgaattcttccttccccagcatccccctccgcccggtcacccagacggccttctccagccttgccgagcttaagtaagctgaggggcgctcagtgtggcagctctgcgtgtgcagggaaggggccaggatgcagaggggcagcgcaggagcgaggacgccrcggctcagcgccccgccagcctcatgatggagcgctgccctgggggcagggctgacccagagccagcggctcgtgagtgagagccccccgaccacggcccttctcggggagcgggccagccgccggggtcccagcctgcggggtccgcccgcgcttttgtcctcccgggcgtgcgtgtccgggtctcggccggttccccgtcggccaggcggagctgcggggcgacgccacgagtctgcgggcccgcggcggggagcggcccccggccaaccccagttcgacgacgtgttgggcgtctcactccgggtgggttccgcggcggggtgtatttatggagtrttgaagaaatatctccgtcgggacggccggaaggaaagaggccagaggcgcggaggccggcyagagccgggaacgaacgtccgaccgggaggttgggggccggagcgggaggcgtggggagaggtcgtgggcgggaccgcgaagggcggggagyggggcgggccggctcggattccggaaggctgagactccagtgacccggcgggaggagaggcaactttccctgtcgggcttgagttgggagaggagcagggcggccttgtagggtagggacagatgcggggaggctcccgagtctctggcagttgagtgcccaggcccccttcgccctgtccaggagactgttggggagtccccaggccctaagtcacggggcacctcttagagctacgcaccctagttctgtctttagggactgggcccctcattccggattgtgtgttaggggtgaygtcctcccccttcacctcaaggaagggacttccagtgtatgaacstttggctgtagccaggaggggcctagtgacctgagcaccccaggccatgtgtgctgcctgctccaggrgcctgaaacatccttcctgtgtgacctgcagctgacccctccctaccctctggtccacsacaggctctcccagccgccttctgtgtcactactgttctctttgcctatttcctgcaggcagagctcagctcctgtgcctttggtgtggggagggtgttctgcgcctgagagctgccctgtccagggcgggcaagacctgaggtgctctgttcacattgtgtctgccaggacccgtccctgctcctgaccatcaccgtcactggggtcactgtgctcgtgttggtcctgaagagcatgaactccaggaggagagagccaatcaccttacaggaccctgmagccaagtacycgctgcccttgattgagaaagaggtaatgggtcagccctgtgggtggaaggcagtaagtggatgatggctgggatggcagggcatccagacagtcatctcatggcctccagttcactccccgccgccctgtgtgtgtgtgtgtgtgtgtgtgtgctggaatagcgccaaacggacctcctttcccaggcatctcagctgcccagcaaggcttctagaaagctgacagaacctgcctatgttttgttttatcagaaaatcagccacaacacccggaggttccgctttggactgccttcgccggaccatgtcttagggcttcctgtaggtgagccgggcttgggtcatcaccaggactggggcctctgggggctaggccctcctctcttaacagaaacacaggtttcccacgtcctgaggtgtggaagatgccctcttgctcctcctgagcctgtgagctcagggagatagatagggggatggatgtgggacagaaaayttcttcattattccaattgggctgacacgagagtggtacctcagtgagcattgaaaagaactgaacctagagccaaaaggcctaaaatctcatggaaggctccttgctggggaacttaagggaagtccttcaatctctctgagcctcagtctatgaaatgggatttcccaggcctgcctgtctacctcacttgggttgttgtgaaagtagagtgactgatggatatgaaaattcagaaactacaaagtattgtgcacctgggagggatgggaggaaccagtggtcggggaaaggcccagaatgtgcgggtaggcaggaatgagtcaggtgtgccctgcccccaaggtcacttagattctctgcaggggcctcagacccacataaggagggaccagccctacgagttgcagattccagccctaggagtcctagagttgagttatcccatttctaatctgtaacaccactagatagctgagtcagtcttagtgcagtagaaaactgctagaatcagggattcagagcagctttgtataatctgctagtgctgcttgcctgcctggtggatcctactccgtggcctatttgtcttatatgcacaggccaaaaccttgacctcagctctatcaggtggtgagattacactctagccagctcgctgggcccctgagcctccttgctgttccctcactccatctctatgcacgagagctcagtgttgtgcgtgccgtctctcagctccctgctcggcctgtcaggcaggtcctgttggcagraagcctaaaagaatgaaaaactttgagatagagaattgcttagaaactgccttgacccactatctcctcagccttggcctaggccgtgcaaagttagtgggacaaggtaatgtagaggcctctgsgagagtctaatatgaggcctcagagttcgctgcttcgtcccagcccagtggaagtgaagcaagttagagatggggcttgaaggaccagccagggagccccatttgccctggggacaccctcaggccaggcctaggtggctgcatatgaaagagcctttccaggtttccagtttcaggttctcagaaggaagctaggtgtctcacttactcctggctatccctggtgcccagagggaccatgaccagagtcattgagcctgttctgagcccagagtgttggcacctcaaagacttggctcatccccttgaatcagcttcagggaccagcccctctagtgcctactctgcctgcttttttctcctcctgcctcctcctcctccctgcaccttaggtcttggtttctatccatmtctctgttccatcttccttgtctcttgactaatttcccgtatgtagtccactcagtttctgagcgagtagaaactgagggagtaaactgactacatacatacaggaagttagtcaagggttagggttacaaaactttctcttgcstctagctcttagtatctcttgattgcactcctgtccctgccactaattgccttagtaatttgagtctcacattttggatccaacaggtcgtagctgcccagtgtgtcatctgacagtgggatgtagtcatgatccataggtctctggccacacctggtttattgaattctacccaggaagggcagagttacatggttaaaaacttcactgctactcctcacaaggccataggccaggaagacatgatattgttgtttcatttgctccatgggtacccaaatcctagggccctgtagtatctgtgagcccaggcctgctctgtgcctagtaccaggatacagatggagtagttgtaatttattcacagatctcagtgatacatccagtttaggaagaaaggagtttgtgaaggccacatatttttcttgaatagacaaatattcctaattttttttttttttttgagacagggtctcattctgtcgtccaggctggaatgcagtggcacagtctcagctcactgcagcctcgacctcctgggctcaggtgatgctcccacctcagcctcccaagtagctgagactgtgggtgtgcaccaccacacctggctaattttttgtatttttttgtagagatggggtttcgccatcttgcccaggctggtctcgaactcctgagctcaagcaatccacccgcctctggrctgggattacaggcgtgagctaccatgtctgacccctttctgtaatttttaatactcactctccaactttaatgatcttttcctgctcyaaaaagcagttacactaagatcacaggtgggcagacatatcacccccattttacagatgaagagaccaaaacccagagaggtgaagtgacttgcctagggtagcacagggaggcagggcaggcctaggatccgggcatcccatatttgggytccttccctgctctcttcttcccacccctcttaacattgtgcccccagtatttgctcccttcactgaagctcagtcctttattcytgggccttatttaagctaaatatgctttgactcagtgcttsatgccttttctataggtaactatgtccagctcttggcaaaaatcgataatgaattggtggtcagggcttacacccctgtctccagtgatgatgacagaggctttrtggacctaattataaaggtaaatagtgcccaccatatctggctagctcgtgcttccaagcctactgagggtggtggggtggaggggcagtgctttttctctgagggcacatatgccctaggcagggctttccagcagtgaagctacagttaaccttgtggcagcttcatcttcagggattgcgtacarcaattcagagaggagaacactttctctgcaaagcttccagcagtaaatgcattttctmgttgtacgkggctgtggcattgtgtctgggaatgtgaaagcagtgctgccttgcttttcagatctacttcaaaaatgtacacccccaatatcctgaaggtgggaagatgactcagtatttggagaacatgaaaatcggggagaccatcttttttcgagggccaaggggacgcttgttttaccatgggccaggtactggaggggttaatacttgggctcccagctgggaggaagattcctgcaatggttccattgttctcgtacactcctcagatttgagtcacatggggttgtccttagtcttcattcattcacacacaatgcataatgatcacacttgttacacattcacacacccacttcatgaggttgtcagcttttgtaaggtaggggaatgacttggtgtttcctcgtcattgtatcaaaatctccagcacaatgcctgatacataaatggtgcctgctaatactgaaaaatggatggagggagtccatgctccttggttactcacatagccattgtttactcactggttcacctccgtgagtgagaatgctctttgagtctctgtgttaacttcagcttgcccctctttttcctcagaacagaaggcccggcgattccccgaccaagcccaggctctattcccactttgtgcactggagcaccagggctagctgaggagactgccctggcctgcttctccagcttaaaatggtgcagacagtcccttagctggacrtgcctcctgggagtcctaaggaatgtcagtgatcttttgcagtctctttaggcaagaactgcagaggtcataagcattctctgtgtttccagggaatcttggaatcagaccagaccagacgagtgagcctaaaaaaacactggccgatcacctgggaatgatwgctgggggcacaggtaagaggcttctaggggctccatccagagagtgagccccgagacccattctgacttgggagtcatttgatcctcgaagggacaacatgagagatttcgcctccagctgtagaaggtgggaacgatgaaccagtgacaggtcttgaaactgaccctgtgtaccctgcttcccctaaccaatatggtggctgctcaggagccttgtggggacctttcaggtcaggcttgggggcaagctgggcaggcccacccatgctgtcccaggggctcctagatccagttcaagcctgactctccccatcccttgaaaatgactgcctgaagaaagagagcagtctttgaaggagacatacaatgtgccaggcactgtaataggcattcttaaaacgatcacatttacccgtcattgtttgatgaatgaggacactgaagaacttagagtgttctttccatcttgccatatgaaaatgagaaagactacctgacttactgttgcattagaaaggaaaaccaaaatgaagggctgtttcctgctttgagttttggggacagaagtgagaaaaggataacttgggctgggggaaggtatgaagcttgctgcaggtcagggactgtgggcttcagagacagggagaaagctggctgctcsctcactgtgttccaggcatcacacccatgtkgcagctcattcgccacatcaccaaggaccccagtgacaggaccaggatgtccctcatctttgccaaccaggtcagttcctgctgagcttgcagtggtaggatggaatgtttgctgagctgggctcttgttttcatttctcctgcattgactgagctcatgctgcttgggtgcctgcatctgtgggagggcttagtgggatcaacagggctgctggcagctggagaagctgagtccaggcctgctttttgcatgtatttaactcttttgtgtctcctcagccagccctaagcactaagcattccttttttccttaagatgtactgctgtatttttgctaagtgtaaaatcacagatgtcctcagtggacacttcagaaaatacagaatataaatatttacttactttttaaatcttttttctatatatgttatatatttgtaatttatatatgcttttttttttttcactcagcattaccacaacaggcattttcttctctttaagatgctttataaatattttcatcatagtttttatcaagttgcactataatttactaacttccacattcaggctgttttcagttctaaataatatggtgatgaataattgtgcctacgcttgattacttttagattattttctaaaacagaatcccagaagtggaatgactgggatgagaatcatgaggagttttaagatccaggtcttctgtgcagttatctttgaggctgtgacaggttatttttggctttggttccctttcccccaaatggggctccagactgttttcctctccttcacatatccagtgctgttctatcacaggactttctgagcccattacatttcttccagaagatcctgggcctgcactgagcttgttccagttaggtttgctgtgctagagctcagtgtagatgtaggaggcagggctggagctccgagtgaagccatcctggccagcgcttggctaaggtccttctagttggaggcggtcactgcagctccatgggaacctacatcccatggaggttcttcatccacatggaggaacttcatccacaaaacaaagggtttgagcttcaggagcagcagcagaactcttgtttgccrtgggagttggcagcgagcactccagctggagtggtggcagctttggccakgagtatgctgaccggtgtagtcagtccagggaacaagaggatggccctggaggrgctttttcagtgttgcttcttttctagacagaggaggatatcttggtcagaaaagagcttgaagaaattgccaggactcacccagaccagttcracctgtggtacaccctggacaggcctcccattggtaygacatccaktgccctcactcaccatgggtcagcaccaacccttgaccactttgaggactggtctctgtctctttgttttgttttagttttgtaggaccagatgtgggggttaagcctggggctctggctccagatgggaaatgtgagaaattgagggagaaaggatttgggatggcctgcttttaagggcaatcgagagcaggtgtctaatacatcagcagcacctcacgctgcactgaacatcaaaagggacactgcccctgtccactgtgaacacccacccattccacacagccatcacatacacatctaatatgggcactgaccccttcaccactcacccttctgcttacggccaccacaccccttaccrcccacctcacctggacatgctgagcccccagacagctgctgcagcccagacagcatcccagcaaccactgtgcacagagcaccccacaggcgcgcctctcacactgctcccggctgtacctgcttgtcatacaggtccctggtcggcagagggcgctaccctactgagcaattctgcgcagttccactaacaccaggccacaccctgccggacaactccagctggctgtactgattcacacacctcggtatacctcgttgtgttctccttcctcgtcaatgctgacagctgacagacagcagcagggcttcagggtccctgcagtgagcctgggacctggggtgaytgctgcagagggctgtttactagttctgaggctttttgcagggwgcagtagtacagacttctaagcctttgtagagcagcttgtcacctcctccctggctsagggtgggtgtgcaggcggcctgggatyaggaactccacctggcatcsctcagcttgctcctgcatctccttcatttcaggctggaagtacagctcaggcttcgttactgccgacatgatcaaggagcaccttcctcctccagcgaagtccacgctcatcctggtgtgtggcccgccaccactratccagacggcggctcaccctaacctggagaagctgggttatacccaggacatgattttcacctactmacacctccaygtgctcagcaawtttgcatgtcccttttcatctgtttcagagtaagttcaatttcaccacggtaaactgggatgttttcaaaagtgccttgccatgtaccttsrcgcacacactggttctcctcttttgggtgtgggcctaacaaaaagggctcaaggggctggagactggctgctggggcctccttgcttggaggctggmaagagctccatttcagtatctttctccgtggttttgtgaaataaactcaagtacaaagcagacagcccatgaagtgtggctctgtgggggacgtgctaggcagtcaggaggccgtggcctggcctgtgagttggcttctgcatgcccatgggggtcacaactggcaagtgtcggggcagttcctaaaaaactccaagtggggtcacatcaactctcaagaatctctccatggcactaggggtcatggtaggagtggttacacacagaaacttctcaactttcaaagtcaggttccagaaactgccttaaatcctttgtatcatgaaacccaaacgagggtctgtcggggtgggggggagggacagccaacctcacccatccccctgttcactgtctccttggggatccttcactgctttcaagggagaccccactctggccacccccatctctccaggacacactccagggcctggctcccaaggcccttcttggtttgctcctgccgactttatcagatttttctttccctgggcccccaactccgaccccattctctcacctactggttctcaactgagggtgattttgctgctcagggaacagataacaaagtccaaagacatgttggttgtcagctacagaaggggtgcatctaccctctattagcatttagagggtagagaccaaggatgctgctaaacatcttaaaacccacaggagagcctccatcacagagtatttccatcacagagtattacgcagcccaaagtgacagcagcacagaggccaggaaaccctgctctagcctaccaacttttggcaatccctaggttgtactgggctgtttcaagtctgtctacctggaatgcccttcctctccggcatacctgggaaaatatgattcatgtttccaaattcaagtgtcatctcttccatggaacctattcagactccttccccaaacccccattaaaaatgacaacatgcgagggaggagccaagacggccgaataggaacagctcccgtctacagctcccagcgtgagcgacgcagaagacagtgatttctgcatttccatctgaggtaccgggttcatctcactagggagtgccagacagtgggtgtaggtcagtgggtgcgcgcaccgtgtgcgagccgaagcagggcgaggcattgcctcacttgggaagcacaaggggtcatggagttccctttccgagtcaaagaaaggggtgacggacgcacctggaaaatcgggtcactcccacccgaatactgcgcttttccaatgggcttaaaaaacggcgcaccatgagattatatcccgcacctggctgggagggtcatacgcccagggagtctcgctgattgctagcacagcagtctgagatcaaactgcaaggcagcagcgaggctgggggaggggcgcccgccattacccaggcttgcttaggtaaacaaagcagccgggaagctcgaactgggtggagcccaccacagctcaaggaggcctgcctgcctctgtaggctccacctctgggggcagggaacagacaaacaaaaagacagaagtaacttctacagacttaaatgtccctgtctgacagctttgaagagagcagtggttctcccagctcgcagctgcagatctgagaacgggcagactgcctcctcaagtgggtccctgaccactgacccctgagcagcctaactgggaggcaccccccagcaggggcacaccgacacctcacacagcagggtattccaacagacctgcagctgagggtcctgtctgttagaaggaaaactaacaaacagaaaggacatccacaccaaaaacccatctgtacatcaccatcatcaaagaccaaaagtagataaaaccacaaagatggggaaaaaacagaacagaaaaactggaaactctaaaaagcagagcgcctctcctcctccaaaggaatgcagctcctcaccaacaacagaacaaagctggatggagaatgactttgacgagctgagagaagaaggcttcagacgatcaaattactctgagctacgggaggacattcaaaccaaaggcaaagaagttgaaaactttgaaaaaaatttagaagaatgtataactagaataaccaatacagagaagtgcttaaaggagctgatggagctgaaaaccaaggcttgagaactacgtgaagaatgcagaagcctcaggagccgatgcgatcaactggaagaaagggtatcagtgatggaagatgaaataaaagaaatgaagcgagaagggaagtttagagaaaaaagaataaaaagaaatgaacaaagcctccaagaaatatgggactatgtgaaaagaccaaatctatgtctgattggtggacctgaatgtgatggggagaatggaaccaagttggagaacactctgcaggatattatccaggagaacttccccaatctagcaaggcaggccaacgttcagattcaggaaatacagagaacgccagaaagatactcctcgagaagagcaactccaagacacataattgtcagattcaccaaagttgaaacgaaggaaaaaatgttaagggcagccagagagaaaggtcgggttaccctcaaagggaagcccatcagactaacagcggatctctcagcagaaaccctacaagccagaagagagtgggggccaatattcaacattcttaaagaaaagaattttcaacccagaatttcacatccagccaaactaagcttcataagtgaaggagaaataaaacactttacagacaagcaaatgctgagagattttgtcaccactaggcctgccctaaaagagctcctgaaggaagtgctaaacatggaaaggaacaaccggtaccagtcgctgcaaaatcatgccacaatgtaaagaccatcaagactaggaagaaactgcatcaactaacgagcaaaataaccagctaacatcataatgacaggatcaaattcacacataacaatattaactttaaatgtaaatggactaaatgctccaattaaaagacacagactggcaaactggataaagagtcaagacccatcagtgtgctgtattcaggaaacccatactcacgtgcagagacacacataggctcaaaataaaaggatggannnnnnnnnnnnnnnnnnnnnnnnnnnnnnnnnnnnnnnnnnnnnnnnnnnnnnnnnnnnnnnnnnnnnnnnnnnnnnnnnnnnnnnnnnnnnnnnnnnnnnnnnnnnnnnnnnnnnnnnnnnnnnnnnnnnnnnnnnnnnnnnnnnnnnnnnnnnnnnnnnnnnnnnnnnnnnnnnnnnnnnnnnnnnnnnnnnnnnnnnnnnnnnnnnnnnnnnnnnnnnnnnnnnnnnnnnnnnnnnnnnnnnnnnnnnnnnnnnnnnnnnnnnnnnnnnnnnnnnnnnnnnnnnnnnnnnnnnnnnnnnnnnnnnnnnnnnnnnnnnnnnnnnnnnnnnnnnnnnnnnnnnnnnnnnnnnnnnnnnnnnnnnnnnnnnnnnnnnnnnnnnnnnnnnnnnnnnnnnnnnnnnnnnnnnnnnnnnnnnnnnnnnnnnnnnnnnnnnnnnnnnnnnnnnnnnnnnnnnnnnnnnnnnnnnnnnnnnnnnnnnnnnnnnnnnnnnnnnnnnnnnnnnnnnnnnnnnnnnnnnnnnnnnnnnnnnnnnnnnnnnnnnnnnnnnnnnnnnnnnnnnnnnnnnnnnnnnnnnnnnnnnnnnnnnnnnnnnnnnnnnnnnnnnnnnnnnnnnnnnnnnnnnnnnnnnnnnnnnnnnnnnnnnnnnnnnnnnnnnnnnnnnnnnnnnnnnnnnnnnnnnnnnnnnnnnnnnnnnnnnnnnnnnnnnnnnnnnnnnnnnnnnnnnnnnnnnnnnnnnnnnnnnnnnnnnnnnnnnnnnnnnnnnnnnnnnnnnnnnnnnnnnnnnnnnnnnnnnnnnnnnnnnnnnnnnnnnnnnnnnnnnnnnnnnnnnnnnnnnnnnnnnnnnnnnnnnnnnnnnnnnnnnnnnnnnnnnnnnnnnnnnnnnnnnnnnnnnnnnnnnnnnnnnnnnnnnnnnnnnnnnnnnnnnnnnnnnnnnnnnnnnnnnnnnnnnnnnnnnnnnnnnnnnnnnnnnnnnnnnnnnnnnnnnnnnnnnnnnnnnnnnnnnnnnnnnnnnnnnnnnnnnnnnnnnnnnnnnnnnnnnnnnnnnnnnnnnnnnnnnnnnnnnnnnnnnnnnnnnnnnnnnnnnnnnnnnnnnnnnnnnnnnnnnnnnnnnnnnnnnnnnnnnnnnnnnnnnnnnnnnnnnnnnnnnnnnnnnnnnnnnnnnnnnnnnnnnnnnnnnnnnnnnnnnnnnnnnnnnnnnnnnnnnnnnnnnnnnnnnnnnnnnnnnnnnnnnnnnnnnnnnnnnnnnnnnnnaaaacccttcaaaaaattaatgaatccaggagctggttttttgaaaggattaacaaaattgatagaccgctagcaaaactaataaagaaaaaaagagagaagaatcaaatacacgcaataaaaaatgatacaggggatatcaccaccgatcccacagaaatacaaactaccatcagagcatactacaaacacctctacgcaaataaactagaaaatctagaagaaatggataaattcctcgacacatacactctcccaacactaaaccaggaagaagttgaatctctgaatacaccaataacaggatctgaaattgtggcaataatcaatagcttaccaaccaaaaagagtccaggaccagatggattcacagccgaattctaccagaggtacaaggaggaactggtaccattccttctgaaactattccaatcaatagaaaaagagggaatcctccctaactcattttatgaggccagcatcattctgataccaaaacctggcagagacacaacaaaaaaagagaattttagaccaatatccttgatgaacattgatgcaaaaatcctcaataaaatactggcaaaacgaatccagcagcacatcaaaaagcttattcaccatgatcaagtgggcttcatccctgggatgcaaggctggtttaatagacgcaaatcaataaatgtaatccagcatataaacagagccaaggacaaaaaccacgattatctcaatagatgcagaaaaagcctttgacaaaattcaacaacccttcatgctaaaaactctcaataaattaggtattgatgggaagtatttcaaaataataagagctatctatgacaaacccacagccaatatcatactgaatgggcaaaaactggaagcattccctttgaaaacgggcacaagacagggatgccctctctcaccactcctattcaacacagtgttggaagttctggccagggcaattaggcaggagaaggaaataaaaggtattcaattaggaaaagaggaagtcaaattgtccctgtttgcagatgacatgattgtatatctagaaaaccccattgtctcagcccaaaatctccttcagctgataagcagcttcagcaaagtctcaggatacaaaatcaatgtacaaaaatcacaagcattcttatataccaacaacagacaaacagagagccaaatcatgagtgaattcccattcacaattgcttcaaagagaataaaatacctaggaatccaacttacaagggatgtgaaggacctnnnnnnnnnnnnnnnnnnnnnnnnnnnnnnnnnnnnnnnnnnnnnnnnnnnnnnnnnnnnnnnnnnnnnnnnnnnnnnnnnnnnnnnnnnnnnnnnnnnnnnnnnnnnnnnnnnnnnnnnnnnnnnnnnnnnnnnnnnnnnnnnnnnnnnnnnnnnnnnnnnnnnnnnnnnnnnnnnnnnnnnnnnnnnnnnnnnnnnnnnnnnnnnnnnnnnnnnnnnnnnnnnnnnnnnnnnnnnnnnnnnnnnnnnnnnnnnnnnnnnnnnnnnnnnnnnnnnnnnnnnnnnaactgggaaataccatttgacccagccatcccattactgggtatatacccaaaggactataaatcatgctgctataaagacacatgcacacg

SEQ ID NO: 95016 - DNA, 41421 bp, Homo sapiens
  misc_feature (1)...(41421): n = A,T,C or G
ccaggtatggtggctcacgcctataatcccagcactttgggaggctgaggtgggtggatcacctgaggtcaggagtttgagaccagcctgaccaacatggcaaacccctgtctctactaaaaaaaatacaaaattagctaggcatggtggcataagactgtaatcccagctactcaagaggctgaggaaggagaatcgcttgaacccaggaggcagaggttgtagtgagtcgagatagtgcaattgcactccagcctgggcaacaagagcaaaactccatctcaaaataaataaataaataaataaataaataaataaataaataaataaataaaatggttaaagtgagctgggcacagtggctcacgcctgtaatcccaacactttgggaggctgaggtgggcagatcacttgaggccaggagttgagaccagcctgggcaaaatagtaaaaccccatctctacaaaaaaaaaatacagaaattagtcaggtgtgttgtggctttcatctgtagtccagctgtttgggaggctgaggtggtaagattgcttgacactaggaggttgaggctgcagtgagctatgatcacaccactgtactccagcctgggtgacagagtgagaccctgtctcaaaaaaaaaaaaaagttaaagtggtaaattttattttatgttatgtgcgttttatcagtatttttaaaaggcttcatctgcctatccccactgaaaataagactcgactctacctatgatccgaacctcagaatgaatgagaaagtccagagaggagcactgtgtgtctcctgagcacccctaggaagaggtacatgtcccctgtcggatctaccctgttcattctgtgggtacgttagcccagattcttcaccctgagaacattaagccctgtattagtcaaagtcaagctaaactcctgtggcaagttattccaaaatacaatggctaaaactatagaatcttctctctaaagtaacagctacatggtgagccatccaggttggagggtggcactgatcttcccggtcattctagacttgggttccttccctgtcactgctccagtggccccaaggtccctgtgggggtctgcatggtagaagctggggtgccccaagtccaacaattccgcctggtggaagaggaacaggacctggctaagcagttgggattatcacctcctctcccattccattggcaaggccttgggcgcccaccgggggagctgtgtggtgaagtgtggcaggcagtatatacctggctgcagttctgcgactgtggaggaatttccagaatctgcaactttgattttcattgcttgcagtctcttccacaagccctaaaacaagagtcactctcaactctggtgcttggggacagttctttattctaacccagaaagatgacctgagtgactagaactcagaataggcacctgggagtcccttaattagacacagggggtttgcagccatagttctacctgccgtgttgtaacagcgtcaccatcagctgctgaggcagggcaagtgacttgctgctaataacataaagtactcatgtctgcaaaccacttactcttttaactaaattagagagtaatcaaggttagccttttaataacatcactttcacttatgaaaaaccatacaagcttcctgagtggaataaaaagggagagtgatcctagcgggctggagcagccacgggtgtgtgtgtgtgcgtcggcaaagaacggcaaaggtgaaggattgcagtagtcaaagaaatctcacaggaggcagtaggttttaggggaaagagcttgaatgtgggcatcaaggaacttgggttctggcttttgatatgtcattaactaagttgaatgaggacattccttgaaagcctatagtgtgccaagcacatgcccagtgtgggtcttgggcaggccacatgacatctctcccttgcccatcgcctccaccctccgcccccaacaaaacagaatgttgaattcatgtcctctgagactttcttcagctctgctacaacatgattctaggaagtagaagctcaccttctgatcttgggaagcaaaataactgcggaaaaaaggaaggctgtacaaagaaaaaaatcccagtcacatatgtggtcttcctggcaagagggcatgacttgagtccaatcgcaagaaaatttcagataaacctaaatgaaaaatgctgtatttttaaaagtggggaggtggaattgtgtgcttccaaagtgtcaatgccaaaaaaaaaaaaaagaaagcacaaaaagggcatgaaaatgttgcaaatgaatagaggctgaagagacaagataatttaacccaacacctgactctaggctggagcctgtaaaaaagagaggaaaatggtgttttgaaaaaaaaaaaaatgatacaggccgggcatggtggcccacgcctataatcccagcactttgggaggtcgagacgggtggatcaccctgaggctgggagttcgagaccagcctctccaacatgatgaaaaccctctctactaaaaaaattttaaaaattagccggacatggtggtgggtgcctgtaatcccagctacttgggaggctgaggcaggagaatagcttgaacccgggaggcaaaggttgcagtgagcccagattgcaccactgcactccagcctgggcaacaagagtgaaactccatctcaaaaaaaaaaaaaaaaaaaaaagacaaatgatttctcttatatgaagtacctatattagccaaattcataaagaaagaaagttgaatagaggtgaccagggctggggacagcagggaagggggagttactgcttaatgggtacagaggttctgtttaaggtgacaaaaaaggtctagagatgattagtggggatggttctacaacattgtgaatgtatttaatgccactcaattgtacacttaaaaatggatgctgaccaggcgcagtagctcatgcctgtaatctcggcaccttgggaggccgaggcaggcggatcacatgaggtcaggagttcgagaccagcctggccaatgtggtgaaaccccgtctctactaaaaatacaaaattagctgggcaatggtgatgtgcacctgtagtcccagctactcgggaggctgaagcaggagaatcgcttgagcccaagaggtggaggttgcagtgagccgagattgcgccactgcactccagcctgggcaacagagcaagactgtctcaaaaaaaaaagtaaaagggggtgttacagcttatttagaatttgtctagcagattttccagcttttactggaagccccctcacccccaaaaatgtgtgaaatggaaaactgcatgtatattttaccacagtgaagaaacaaaaaaaagaagttattcctctgggctccactgtaccaggggcttctctttgtcagagcatgaggaataccgcagtgtaacgtgcctctctgttggctgtgtgctccctggggccagtgactgtgcctgagacagttgctcgtataattaggttgttaatgtgcatttggttttaatgaaaaaagaaatgagcaacacgccctggtgcatttccrgaagcctgtgcatttccagaaggctgtgcatttccagaagcctgtgcatttccggaggcctgtgcatttccagaagcctgtgcatttccagaagcctgtgcatttccagaagcctgtgcatttcccgaagcctgtgcctgtacagtgggcttcacaggggtgtgtgcctcgtgcagctgcgcattcagcccacggtccagagcagccagtgacctgggatatttagcagggagttatgatctggcctctgttttctccacgaggatcagccctgaggccaactgggacagagaccacacagcacacaaagggcactggcagtgtgggccaccgcagttcgagggttctgttccaagcaggattgctacccaaacacagcaggcctggagaggctgcgatcaactcacaaccctgagaaaacaaactcgatcgtgagtgcgttgtggaagctgtgatgtctgtggcccatggggacaaagttaactgtcttaatgtaaagacaaatgaaggggccctcttctggtaagagaattaaattcctccatccagggaggaaaagcatgactttccaggctgagaggaaaaggaaggacttcgctgtaatccagtcagcaacagcagcaaatttaaggggggaaatgtgtcaaatgcaggaaaggggtcagaaaaacaaacagcattcattgcccctcaggcgcccttcagggaaagcagacaggcctggaggaacaggctcgcagtccactgccctttgctgtgaatcccaaacagccctgcgatcaccggttgggcttcccacgcaccttcacattcaggaggagctgcccggggtaccaagctgaggatttctgtcccgggacaagcagcctccctggggaaaatcaatgctggcatgtggcttccaggagaggcccccgtgacttcagagggctgctgtgcctctgagttcagtttgcctgaaaaatcttccaaacgcagctctagtgccacttcctccaggaagcccaccagccggcccccaccactcctggacccctgcctaagaatacttatgccttacacactacaatatggagaaattactaatacaaaaacaaaatgtccgagtccactccaaacataggagggagaatcaaggcggaaagatacagtggtcttaacttgtgcttgaaagattttacttttaggtcgggcgtggtggctcacaactgtaatcctagcattttgggaggccgaagcaggcggatcacctgaggtcgggagttcgagaccagcctggccaatatggagaaaccctgtctctgctaaaaatacaaaaattagccgggcgtggtgacatgcacctgtcatcccagcttctcgggaagctgaggcaagagaaaccctgtctctgctaaaaatacaaaaattagccgggcgtggtgacatgcacctgtcatcccagcttctcgggaagctgaggcaagagaatcgcttgaacccgggaggcagaggttgcagtgagccaagaccccgcctttgcactccagcctgggcaacaagggcaaaactccatctcaaaaaaaaacaaaaaaatttttacttttgccgggcgtggtggcccatgcctgtgatcccagcactttgggaggccgaggcaggaggctcactgcagcccaggagttcaaggctgcagtgaactgtatcatgccactgctcgccagcctgccccacaaacatattttttttcacttttgcatattttacaaagcacacacccacgtgagcgcattgccagccccctcgccccccaggacaaagtggagaccctgtcagcgaggaggctaccgcttaagtccctggggttctccagagaaggaggagaaggctctgcagagccatgcgccctggacggaagaactttcaaaagtaattcaacaaaatagaaacttgtcgaattacattgcagacagcgcgtgcggagcaaatgtgtgtccacggaatattcgtcgggcacaagaggaattccctgtcagctcccaggaccgtgggtgccctgaggccgagtcacgctcccccgggataaagagggtgggggcgcacacaggcaaggaggaggcggggtgggggggtgcagaataaggaactaaggtaaaaacgcccagtactggactcccctccgagcagcaccccgagagggcccggaggagctgaggcggtgcgagccgagactgccagccccgcccccagcaggccccgccttccgctgctcgccaccgcccccgtgaaaaaaaaccaaaccggtaacctctacccggccgcctcccattggatatgtgagtgagcgatgtccgcccggaccaatgagccgcagccacggcttggcgagcgccttccggcccgcccccgcgcggccgcccctcggaccaccggactggcctggggcgggacgtgggcgcgggggcgcggcgtgcggcacgctgcagggctgaagcggcggcggcggtggggactgcacgtagcccggcgctcggcatggctctcctggtgctcggtaggtgcgggccagcggagggaggcgggcgagctggggtcggcctgaaaggtttcgaatctctaggccgttccccggcgggccgcggccgcaggcggccggaagtgggcctggcgggcgggaggcgcgggcctcggcgtccggaggagctgctaggttgccccggcggaggtgcgggtgcgcgggagactcgggcgcccgtggggaggggcttccgcagccgcggggggcgggagcctcgtgcgctggagccgggcgcggggtccagggccgggcgggagagccgcggagcccagccccggccggatcccggggagggggtcwgtattcccggagagtcgcaggggagcttgttcygggctcttctcgaactcgtgcgtggggacrgaggttggcgggcgtcctgcactgcwgcttgtttctgccacctgytttatgcagctcctmcttttaaaaactgaaatgttaagccgggcgcggtggctcacacctgtaatcccagcactttggaaggccgaagcgggtggatcatctgaggtcaggagttcgagacmagcctgaccaacatggcgaaaccccgtctctactaaaaatacaaaattagtcgggcgtggtgtcgcgcgccagtgatcccagctactcagaaggctgaggcaggagaatctcctgaacccccaggaggcggaggttgcagtgagccgagatcgcgccactccagcctgggcaacaagagtgaaactctgtctcagaaacgaaaaactgaaatgttaaatctcagtcctgaaataaggacccatagttcccttagaaagggacagtgccttccaaaagctgggcttaagacgcaggggcgcttcgcatgtgatcggactccttaaaaacgaaatggaacscggcgtcttasgaattctgtaaatgtctgcttcttagtgggcgaggccgagggtcctgtccttgccgggctcgccttggtcacagccttggctctgacagtccttaacctcggctytggcctcagaccaccttccccctatttactggctctgtgacttggagcaagttacttaaccactctgtgccagtgccttttcaacggtgttcaccattttagggactgataatagtactcccttagggttgtcctgaggattaatgagttagtacatgtctttctgttttttgagacacggtcttgctctgtctcctaggctggagtgcagggtttccatcatagttcactgcagcctggaactcctggtctcaagggatccaggcacatgccaccacacctggctaatttttaaattttttgtagagtcagggtctcattgtattgctcaggttggtctcaaactcctggcctcgagtgatcctccttcctcaacctcccaaaatcctgggattacaagtgtcagtcacctggcccagctagtacatgttttaaagagatgtaaatatttgccatattactgtggagagagtagatgaggggaaaagagtttagtctgtttagtttcctgtgagtgaattcagactagaccctgaaagagtccgtgagtctattaattaactcattttaataaatggcagcctttctgggaaacctcwtggtttctagatgactgctctgggacygtagackmctcctagcagatgtgggacagagatgttactgatgtgaatttatagcatccttaactgccatggaggaatggaaaaccacagatggcagagccatctgctcacagagattctagacactcactcggatggtccaatttcccattggtgttcattatcactgagtggaatggtgatgtgaattttagaaacagaacgtcattggtcagcattgacctactttgtcatcttaagtgagcccagggttttttgtgttcttgggggttggaggtagttgttggctacttttatgcattcagaatgtccacatcttttgtctgttctttctcagtagtatgttaggtttccttgtaaccctgctaggtcacattgcctttttaggaattttagtctcaaaccttaatcaacacagcattttcattgggtagccgtgtacaagcagaggaggctcttgtgagaactaggcaaaatttaaagacaaacaaaggtccctcaccrttactagaaaaaagaataacccaagtctatcttaatactgtcagtaaagagcgtctttatacggaaagggaaggacattcctaaggtgaaaaaccctggtctgttctggtgactgcagcctgcttgtaacagcatgaagaggagaggactgacgttattgctgtccttgattggcaaagagaagtgaaagtacctaattctgccacagtctacctaatgatgctctgtggattatacccctgcattctccagcccttcggttagaaatttgggtctatctaattatatgatcttaggtaagttatcctttctgtgttaaagtttcctggtctgtgaaataatgggcaccatgacacataccacatagggttcttaaatgasttaatatatgcaaaatgtttagaaaaatgcctgatacagagtcacgcaagtgttactgttttgtctcgccagaaataaagaccccagtttctggagcatagtgtgacaggtatctcagaatgttagccatactcccagatctctcttrtaagaatttctcttgaaacagtcatactagtttgaggggaggaggaaaatataagaattttccctgctgggctgttagtgaaaaactggaaacaatcaaaattcagtcagtagtggattgactaaatggttcagccattaaaaatggttacattggagtaattttaaaattcttaagtagaaaatatctgtaacttactcttttgcttttccatttttgaaaatttcacaataggctcagtgtactgagcaagtaccaaattcatatcgattttacaaaaaagataaagttctttaaaagtagtacatctctgtagaagattatcctattttttgggttttkttttttttttttttttttttttgagaccgggtcttgctctgcctcccaggctcaagcaatcctcccacatcagcctctggagtagctgcggctacagatgcaccctaccatrcygagctaatttttgcatttttgtatttcatattttttctctacaagagatggagttttgccatgttgcccaggctggtctcaaactcctggctcaggttatccacccgcctcatcctcccaaagttctgggattacaggcctaagccaccacacccagccttagtcttactttcaagcttattcagagttaggactgtcagtgcttatgttcttgatttacttggctttgttaaacgtgtcaaactctacttcaccttttctgcagcagtgaaaagattaatgagcagtgccatccaatagaaatataatgcaaacatatatgtaattttaaattttctagtagctacatttaaaatggccaaaagaaacaggtgaaattaatatatttactgagtatatctaagatcatttaaacatgtgttttcaaaatgaaaaataatattgaggccgggcacggtggctcacgcctgtaatcctcrcactttgggaggccaaggtgggcggatcacctgaggtcaggagttcaagaccagcctggccaacatggtgaaaccccatctctactaaaatacaaaaattagccgggcatgatggctgatgcctgtaatcctgagacgggagaatcgcttgaacccaggagacagtggttgcagtgagccaagattgcaccactgcactccagcstgggcagctgagtgagacgccrtctcaaaaaaaaagaaaaataatgagattacatttttccctccattaagtcttcagaattcagtgtgtttttaccagcatatcttagtttggggtagccacatgtagctagtggctatcatgctggataacctgttactgagrgagcagccccgctttggttagcctggcatccattcacaggcatcctttcccacctcttgaaatggaaaaggagatcatcctatcaaaggctactccatcactgactgggttcccgctcctcttctgactctgggcattttattcagatactccctgtattttatctttggcctctcccactgcatatgtcttcctctcctagatcactcccatcttyaaagaaaaccttccttgttttctacatwtgcctgcctctggtctctataatgaaacctgcttaaakagttacctatattctctccaaccttctgcagactgcatgcctgttattttcactccaccacaactgccagggctcccagtgacttctttgtcactaaatccaatcagtagatggttttaagtctttgctactttatctyccagtagcatttgttagtgtggccccttccacatgtatcttggtttatgtgacaccactctggataattctcccaatccaccttccacatggcaactggaatactccttctagaaagcataaatctattctttcctctgaatgataaccctttagtggcttcactattagtaaaattaacagttttataagttcttacagtattggctatatctgtgattcaaatgcagtgtaaatcttgaataccataattgttcattcatacctayagcgtacagaaccactttatcttgagcactaaaaagacagcatggtgtaataggaaaagcttggaaatggagagctgccctgccccttatatgtatgaccatagatgggccatttggtctagacctttatttacaaaatggggataaktcctactttctagttagtaatgctgtcaaaaattaagtgatctaacatttgawagtgatttgaaaaattgaacgtgttgtatgatggaggatttagcagtaaaacaatgaacaatggtgtacactccttccagaaraagtgtaccatttagttattccaaaaaggtccatttgaaatcttccaaattctaaytgtgaagcaagcatgtgaaaatgtaactaagatggcatgtacacacactacttgagaacacaggccagtctcacttataatttgctatatcaacaaattaaaaggaagaaatgatatgatcaacttcagagatgctgaaaagacaggaatagatagaaatttcgttaacattgtaagtacattttggcctggcgtggtcactcatacctgtaatcccagcactttgggaggcagaggcaggaggatcacttgagaccagcctgggcaacacagggagaccctgtctctacaaaaaatttaaaagttagccagggatgcacctgtagtcccagctactgggggtgctgaggtgggaggatcacttgagcccaggaggtcagggctgctgcagggagctgtgtttgcaccattgcactccagtctgggtgacagatcaagaccctctctcaaaaaaaattaaaaagtgtatttatttcaatccaaaagccagcatgatgcaaataggaaaaccttgttgaagtcaagaatagtctgaggatattccattatttaccttgttctagaggtaatcagcaaatttttgtatattgtcatgtgttgcttaacattagagacgtgatctgaattatgatcaacttcagagatgctgaaaagacaggaatagaaatttctttaattgctrttgtatcagacgatttcttcattgtgaataacatcagtgtgtacttaatacaaacctagatggcataacttactaaaaacctaggctacatggtatagcttatttctcttaggttayaaatctgttcggcatgttactgtactgaatattgtatgcagttgtaacacaatggcaagcatttgtgtatctaaacatagaaagggtgcagtaaaaatatgatataaaagattaaaatagtacacctgtacaggacatttaccgtgaatgcagcttgcatgactgggggttgctctaaaaattttatttcttggataatagattaaccttaatttactgtaacgtttttctttctttctttctttctgtctttattttttaggagatgtggttttgctattctgtgttggccagcctggttttgaactgctggcctcaagcagtcctcccactttggcctccaaagtgttgggattataggtgtgagccatggcatctggtcaacattttactttctaaacttaattttttttttttaactttttggctcttgtaaaaacacttaccttaaaacrcattatacaaaacagcagtacaaaaatattttctctcttttttttttttttttgagacaaggtcttgccctatcaggctggagtgagtggygcatcacagcccactgcacccgtagcctcgacctccctgggytcagtgatcctcccacctcagcctctcgagtagctaggactataggcatgcaccaccatgcctggctaatttttgtactttttttagagagggggtctcactatgttgcccaggctggtcttgaattcctgagctcaagcgatctgcctgccttggcctcccaaagtgctgggattacaagcatgacccatagcacctggccagtattttcttttatatccgtattctgtaaggtttttttygtttttttttttttttttttaattatactttaagttttagggtacatgtgccatgctggtgcactgcacccactaactcctcatctagcattaggtatatctcccgatgctatccctcccccctccccccaccccacaacagtccccagagtgtgatattccccttcctgtgtccatgtgatctcattgttcaattcccacctatgagtgagaatatgcggtgtttggttttttgttcttgcaatagtttactgagaatgatgatttccaatttcatccatgtccctacaaaggacatgaactcatcattttttatggctgcatagtattccatgctgtatatgtgccacattttcttaatccagtctatcattgttggacatttgggttggttccaagtctttgctattgtgaataatgccgcaataaacatacatgtgcatgtgtctttatagcagcatgatttatagtcctttgggtatatacccagtaatgggatggttgggtcaaatggtatttccagttctagatccctgaggaatcgccacactgacttccacaatggttgaactagtttacagtcccaccaacagtgtaaaagtgttcctatttctccacatcctctccagcacctgttgtttcctgactttttaatgattgccattctaactggtgtgagatggtatctcattgtggttttgatttgcatttctctgatggccagtgatgatgagcattttttcatgtgttttttggctgcataaatgtcttcttttgagaagtgtctgttcatgtccttcgcccactttttgatggggttgtttgtttttttcttgtaaatttgtctgagttcattgtagattctggatattagccctttgtcagatgagtaggttgcgaaaattttctcccattttgtaggttgcctgttcactctgatggtagtttcttttgctgtgcagaagctctttagtttaattagatccatttgtcaattttgtcttttgttgccattgcttttggatacaaaatcaatgtacaaaaatcacaagcattcttatacaccaacaacagacagagagccaaatcatgagtgaactcccattcacaattgcttcaaagagaataaaatacctaggaatccaacttacaagggatgtgaaggacctcttcaaggagaactacaaaccactgctcaaggaaataaaagaggatacaaacaaatggaagaacattccatgctcatgggtaggaagaatcaatatcgtgaaaatggccatactgcccaaggtaatttacagattcaatgccatccccataaagctaccaatgactttcttcacagaattggaaaaaactactttaaagttcatatggaaccaaaaaagagcccgcatcgccaaagcaatcctaagccaaaagaacaaagctggaggcatcacactacctgacttcaaactatactacaaggctacagtaaccaaaacagcatggtactggtaccaaaacagagatatagatcaatggaacagaacagagccctcagaaataacgctgcctgtctacaactatctgatctttgacaaacctgagaaaaacaagcaatggggaaaggaatccctatttaataaatggtgctgggaaaactgcctagccatatgtagaaagctgaaactggatcccttccttacaccttatacaaaaatcaattcaagatggattaaagacttaaacgttagacctaaaaccataaaaaccctagaagaaaacgtaggtttttttcgtttttaaagtttgttttagttttttaaacttttttgtcwaaaactaggacacagggccgggcacggtggctcacgcctgtaatcccagcactttgggaggccgaggcgggcggatcacaaggtcaggagatcgagaccatcctggctaacacagtgaaaccccatctctactaaaaatacaaaaaattagccaggcgtggtggcaggcgcctgtagtcccggttactcaggaggttgaggcaggagaatggcgtgaacccgggtggcagagcttgcagtgagccgagatagcgccaatgcactccagcctgggtgacagagcaagactctgtctcaaaaaaaaaaaaaaacacaaaaactaggacacaaacacgcacattagcctaggtctactcagggtcagagttatcaaggcatcacaaggtgataggattttttmagctccattataatccacaggaccaccctcatatatgtgttctctccttgaccctgtggatgtgacygtatatgtaaatttaaaaggtgaaattttgatagtaatgccatttcagagaacttttgggttcttaagatactagtaagttcagaatttgttttcctaaattattgttgtaaattgcatgtaagtttccagagttgctaatgaaaatgctcttgatccacaatgtggcagaactgtgtggtcagcaatacagtcgacactgtatcctgtctttataaggttgttcacacgaacagtgtttctgataatgtgttatggatagtattaagagaaataaaactatttataaaaataaacattggctgggcgccatggctcatgcctgtaatcccagcactttgggaggccgaggcaggcggatcacctgaggtcaggagttcgagaccagcctgaccaacatggagaaaccctgtctctattaaaaatacaaaattagccgggcgtgatggcacatgcctgtaatcccagctacttgggaggctgaagcaggagaattgcttgaacctgggaggcggaggttgtggtgagccaagatcatgccattgcactccagcctgggcaacaagagcgaaactccgtctcaaaatataaataaataaattaccattgcccttgaaagagtcacaatctagtggaagagacaataattattttcccttcaaaaatatatttgaataaagataatgtgctaataattgcaactgaataacatgaggaatgattactacgtgattgcccagggttacacaggcagaagtgacctcccaatttttcagcgtccatgccataaaatgacagtagtactgcctcatggagcggttgtaaagaacaaagacgttgatacatgaaagccactaagaataatgcttcagcctttttccagtgcagcccarggagtgggagtggggaccgtccgttcctttcttgctcagcgttgcagcaatgggagtgaaattccaggggctccaactgcagcaggaagggcagaggggccagagctaggccgtcctcctgtgtgaagggccctggtcagttaaagaggactctggttccccagggtttccagtcaaagcatgaacagtgctgttaatggtgcacttttgtttttatcttcaggtctggtgagctgtaccttctttctggcagtgaatggtctgtattcctctagtgatgatgtgatygaattaactccatcraatttcaaccgagaagttattcagagtgatagtttgtggcttgtagaattctatgctccayggtaagtawtataaaatagttgtagattatttatagtactttctgaaattggagraaaygctgtataaaaatctgattttattaagacatctagtttagcttagtrtttgtttaaaagaagtagagaagagggaaatgggaaatgcaaagtatctagtctgttgttaaggaagatctgtcttttgatgaggtgatgcgtgtggaaggaaaactgmttttatgaggaaggaatcytgagcaaagaaaatggaggggccagtgattaacttcaytctgtttcttgaagagaattrtttcctgaaaaaatgtagttagaaaatctggtttaatttaaaaattcttttcttaccttacattcaatgctggaagaacccttgtggggtaaaaatgtaatcaccattgaaactaacagcacaaaattatatacagtcaaaagtacaacattgcactagttatttgtgtgattaaagcatttaatgcaaaaaaacaccaaatagaagagtggaaactgtgcaagatgtatatgaggctgtctctgctgtaaaccagcaggccacaagtatcctgagaggagaaccaaaccctagccagctgtgtgtctgtgaagaactgtgtggttatctgaaatcccaaggagtcctttgacatgtgaacaaggctttgtaagcttaagtgagggatattagaacctgatgggtacattttagggtatgcctgatgaaactttttcctttctcactttaacttttttctttgaaactaagttttagaaactaaccaccagtcctcatggaccattttacttcatgctcagtgtagcaaatggaggtaaaaacgctctattttcaaagtggatgttgccacattgtgcgtcctgtccayctaatgcctttactgttttaraggctctggtatatatgtgttcagtccaaatgctaattctgtgtggattagctcaattatactagcaaatacataaatagtaattgtacaaactgttgtattgttaaacgtctctgtatgtggtttttacaagcttatcatatatggcataggtaatttaccttgtttctgagagcgaccatacragagaaaactctgcaagacagcataattgagaaggcaggatctagatccactagttaatcattattacactggcagagttttactttgtggtgtttgggtgactgaatgtctgattagagcaagcgctttttttgagagacagggtctcactttctcccaggctagagtgcagcagcatgatcacggctcactacagccttgatttctcaggctcaggtaatcctcccacctcagcytccccagcactggtactacaggcatgtaccaycacrccctgctaatttttgyattttttatagagacggaatttcaccatgttgtccaagctggtctctaactccagggctcaagcaattcgcctgtctcggcctcgcaaagtgctgggattacagctgtgagccactgcactgggtcaggcaggtgctttttaacttccttttgtgcttggattcctttagcatcttggtgaaggccttggattcttataataaaacttttacggtcaggcatgatggctcacgattataatttcagcaatttgggagaccacggtgggtraattgcttgagcaccagagttcgaggccagcttgggcaatgtggcaagaccctatcgctacgaaaataaaaagaaaagaaacaaattacccagacgtggtgccgtgtacttgtggtcccagytactcaggaggctgaggtgggaagatcacctgagcctgtgaggtagaagctgcagtgagctgtgattgtgccactgcactccagcctgggcaacagtgagagcctgtctcaaaaaaagaaaaaaaaaaagatctcctttaaaaaaaaaaatmaaaatcaaaccttcacgtttaaataaagcttatagaatcgcaaaaaaaaacctaaagtatggaaatatgattattgaaatattaaaattttgatgttaatgtagtactttacaagaacagtaagtacaggttgaacatctcttatctgaaatgcttgggaccagaagtgtttctgattttggattttgtcagattttggaagatttgcataatacttagctgtagagcatccgtaatctgagaatacaaaatctgaaatgctccagtgactgtttcctgtgagtgtcatgttgtcgctcagaaagttttggattttggaacatttcaggttgtgggtttttagaatagagatgctaaaccggtaccaagatccagcagcaggcttgacagctgcaataattctgaatagtgatgggcataaatgatgtttgaagatacctgcagcaactatagtggcgatcatgaaaacagctgtgattttcattcatgataaagtcacaataattgactgtggagtgttgtttacattcgtaaggaaattctaaatttcgattacagattagtgaaaataaagactttttttycatccaaattcatagactccctcccctaaatttttcctaaaaggccaccttggcttcagatttattctttttttttttttttcttttttttcctaaaagggattcccaaaatttttatccaccagccctttgggagtctggaccccagttgcagaacccctgggtagactgtatgccatatttatatgtatgtggcattatgatgtatgygcagatcaaatagaagagaggatgaactctgacagtctctgaatttagtcctcctttcttaaactgaaattaaagaggcacaaaaccctgtaaaaatctgacttctgaattttttagtatctcacytaaacaacaaaacatactgtatgtaaatatgtagaagtagcatttcaggacattcccccgatagaccctaacttcagatactgggattgagtttaggccccaatactcagttacataataattacgacttctacctgtatgattgtagtgtttggaatcaaaaacttgtcaggcagctctgacactggatggctgtgatattgggtaaatttcttctcaacatcarttccatcatctgtaaaatgaaataacaagaggacctgccctcagcttcatgctgattaaatgaagtcatctataagtgttttcatcatggtgctggcacctagcatttgtgcatttggtycttagagacctaattagaagagaatttactttgtttttaaaaatgcatyaaatcaccaatggataaactatggtgtctgcatacagtgaatgttacacagcaataaaaataaacagtatagctacctacaacctcaatgagtggtaagggctaataggtttacgcacatgtaattttttaaaagcgcttttctgtgttgtatttcccaataatagtacctgcaaggttaaggttgtttttccttgtgttctcttctctcctcctctccccactctcttccgctttccctgcctccccccacctcagtcattcactcacatcgccatcttgtggtgtcacgtcatgcttttcggcttgttaggctcactaacgtgggtttatgcatgtgtttctaagtccagaagcaatttgcgggacccagaragtattgagatataggcatagttgatctgggccagatacytcatatataaaattaaaaagttggactagagactatcaaaccccagtaggtttaagaatcactagcagaacttaataaaatgcacttcttccactaggaagtttgggtttgtggaccccaagaatctgcatcgtgcctaggctttcagctccacacagtgaagcacattggaccagatagattctaaagggcttgttgagggtgtagagttgtaaattatagagtttaaatgtgatttaattgagcagtaattcggaagcttttttttttttttttgggtgggggacagagtcttgctgtgttgcccgggctggagtgcagtggcacgatctcagctcactgcaacctccgtttcccgagttcaagcgattcccctccctcagcctccccaatagctaagattacaggtgtgtgccaccatgcccagctaatttttgtatttttagtagagacagggtgtcaccatgttggccaggctggtcttaactcctgagttcaagtgatctgcctgccttggcctcccaaagtcaggcgtgagccactgcacctggctggaagcttttttattaggatgatatgaaaagtgattgttgtaagtaataaaatggtgagttcatccaggttgctgatcctattttacttatttatttttatttttattttttgagacagaatctcactctgttgcccaggctggagtgtagcggcatgatctcagctcttgcaacctctgcctcctgggttcacgtgattcttgtgcctcagcctccccagtagctaggattacaagcgtgcaccaccacgcctggctaatttttgtatttttattagagacggggtttcaccatgttagccaggctggtctcaaactcctgacctcaagtgatcctccctcctcggcctcccaaagtactggagattacaggcgtgagacaccgtgcccggccttgatcctgttttatttgtgcttgtcctctttgcaggcatctcattcaatagaccattgatggggttttttaattgaatttttgaattttttgaattgagaatcaaaggctttaatggttgctttgtgttgtcttcccccaaaaggtgtggtcactgtcaaagattaacaccagaatggaagaaagcagcaactgcattaaaagtaagtttcttaggaatgcaaaaggcttacaaaacttttttttacagtaagtttctaagatgtccatattcacctgtgtatgtttaagtaataagtatgcagatggtttaatgttcaatgggaagctagtttgcatatyagagttgaaaatactggttctgttgtcaaaatcatactgagaacaaggggataatacacatttaaatgtttacattgcctgtttttgtttattgtktttcccagataaatgacagttactctcagccctgccaattctgtgagctgcagagttccctccatgggctttgatttcccccatcattccatttagattctcttctggtgttcaaggctaaagcccttattgactgattgcaaactgcaccctgtgctttattacctttttctgagtctatntgaagcagataaygagttcttgtggagtctgctttagcggaaggaaaaattgttatttcttttacatttccacaggatgttgtcaaagttggtgcagttgatgcagataagcatcattccctaggaggtcagtatggtgttcagggatttcctaccattaagatttttggatccaacaaaaacagaccagaagattaccaaggtaaggacttttcctagctacttcattcccctggtagacaagaacctactgttctttaacaagcttgagaacctgctctacctgcaaggttctcaacctcattgtacctgaattatctataaatggtacacagtgattcctrtaccctccgagtcattctgaagatgaamtatgtgtcacacaggtttgtctcatcacttaacgcttgcttaggtctatgctacattrgcaatgatagaaaatagtgttctgtgctaccctgttgtctttctcattacagtcacttgtatttaataaagatctacatgtattttcttgctctaatctctcttccctttactgtaggaaaagggtctaacataacactatggaaaaggagactgtaatttgagagtcttagtstcctaaactgtcaataataaatggataccacaaattctgttttgtagataagtaaattgttagtgtctgctgtgagccactgaggcaactaaagawagaattcaggtttcaccctcccaagactaaatgttatttcagccacactattctttttttcttttcttttttttttttttttaagagacagagtcttgctgtgttgcccagcctggactcaaattcctaggctcaggcagtcctcctacttcagcctcccaagtagctgggattacaggcaccacactcttagagaattgtcttgttatttaattaagatatcacaaacgggctgggcatgatggctcatgcctgtaatcccagcactttgggaggccaagacgggcggatcacgaggtcaggagatcgagaccatcctggctaacacggtgaaaccctgtctctactaaaaatacaaaaaattagccgggcacggtggtgggtgactgtagtcccagctactctggaggctgaggcaggagaatggcgtgaacccggaaggcggagcttgcagtgagccgagattgtactccagcctaggcgacagagcgagactccgtctcaaaaaaaaaaaaaaaaaaagatatcacaaacagattattctatttaagataatcagagttgctgggttgggccagatccatagtgctagtaaaagtattgggcataatttgttygaagctgaaattatgactaatttggtaaaggtttttgttgaagatttatatggaacatatgagtgactgaactttgtcatcttaggttttgctttatgtgagcagtatcagctcatgggttgggtggcagcatcaacatcrtagtaaaagagttgtctgtcatcggtgacttgcctgagtccagctaatagaaggcagggaaggtaggggtgaggggtacagaatctgtcrtgtgtgagctgggaaggcagcccatcctggctgcctggctgctagcctctccatactccagcgtcgtaactaaacagtacttagtgtcttgcttctctgtataatggggatgtgcaaacctattttaaggtaccagaagcttaattgaaatagtacacataaagcatatgagacaaatacttggcaaatatgtgtcgttggcaaatctcgaggctggagggctcatcttcgtcttcgtcttcgtctgaagatgaagatgtggccttggacacgttgtctctgctaggctccccagctccaaagttctagggagagacttttttttcccctgartaaacacctgcttttctgcctttgaataataatttgttttagttttcctcacttatgaaaatgcacatgtttttagtgcagtcagtctgctgctgtttttataaatttagtttattggaacacagccctgcctgtttgtcaacatattgtctctggctccttttgcactggaacaacagaattgagtagttgcaatagacagtatggcccaaaacgctgaaaagtttttttcctagtatacttcatgatttggcatatgtccagataaagactcggggaaggggcagtggttcagatgacggaratacctgacatagataaggagcagaggctgtttcatgttgaggccttgcccttctgtgttatcaagtgacatacttggtaggctcagccagcgatacagtgcaagattatctgaatagatgctgagagttgctgtaatatattttgtgggtatttttgttttgttttgttcgagatggagtctcactctgttgcccaggctggagtgcagtggtgctatctcggctcactgcaacctccgcctcctgggttcaagcaattctcctgcctcagcctcctgagtagctgggattacagacatgcaccactacacccggctaattgttgtatttttagtagagatggggtttcaccatgttggtcaggctgctctcgaactcttgacctcatgatccgcctgcctcggcctcccaaagtgctgggattacaggcgtgagccaccgcacccggcctatattttgtttcttgtgtcaggtctggtgtgttctcaaaagtttctcttcctgggcagaaaaaaaggccggctgccacaccttagatctctaatcccagcactttgggaggctgaggtgggaggatcacttgagtacaggagtttgagaaaactctaaaaaaaaaaaaaaaaaaaaagaaagttttttttttttttcttgacacagagtctcrttctgtcacccaggctggagtgcagtrgcgcgatgtcagctcactgcagcctccgtctcctgggttcaggtgattctcctgcctcagcctcctgagtagctgggattatagatgtccaccaccacgcccagctaatttttgtgtttttagtagagacagggtttcaccatgttgggcaggatggtcttgaactcctgacctcaggtgttccacgtgcctcygcctcccaaagtgctgagatcccaggcgtgagccaccacagctggccagaaaatgaactttctaaagagattctattagatctagttttgcctttaaactgaagaaagcagatggcatatgttattccagtacttctgtgttagttaatagcccctgactgtcttgagcaaataagtttttggtgaacttccaaagactattatcatcttgcctctttgagttttaatgcagatttgttacttatattaggattaagttcagcttaactgtttcaagcaagatagaaaaaaagaagcctggaatggtttccagttacttggcttyaaagacacctcatacctactttttccatcttttctatctggtatctcacagaaattgttccttttttatttgggaaattcccctgctttcycagctagatattaagcttcttattcatccatgttcatgttcggtaaacatttgtgagttattctcattaggagatggtgtttgagcagggagttttygttcacactacgtaaaacttaagaagagaaatcgggctggacacggtggctcacacttgtgatcccagcactttgagaggctgaggtgggcggatcacttgaggtcaggagtttgtgaccagcctggccgacatggtgaaatcctgtctctactaaaaatacaaaaattagccagaaatcactcgaacccgggaggcggaggttgcagtgacctgagatggtgccactgtactccagcctgggcaacagggtgagactccatctcaaaaaataataataataaataaaaaaggaaaaggaattggttttccaagtgttaagtytagtgcaraatgcattgtggggagaaagtgtgttctgtcagagatacacgtgtcagaactgtgtcacacctggtgaagcygacagtgaggtaaagacacagtcttgggccgggccagatgaggcacttgctgaaggccgggctgaggaccgcctaccttccgtctcctgtaggtggcagaactggtgaagccattgtagatgctgcgctgagtgctctgcgccagctcgtgaaggatcgcctcgggggacgragcggaggatacagttctggaaaacaagtaagaccataaaatgtcagtttttaatgtgtcataattttgaagccagagtggataccttgtataagatagttgttttttaacagtatgttaaagtggtgaactctcaattaaagaataatagaggattggatccaccgatcccagagggaaccagccctccagcctgctcatttggcctcctcagaattgctgttgccaaagccagtcagtcccagggcctcttgccacayctgcagtccaagtaccaggcccaggagccacgtgctggcatcccatggcacttgyaggtccagagtggggatgggatggacgggttttcctctaggtaggctttggcaaaccgtgatgagattggwttacctcttggcctgtatctgtggcagtcagccccaaatccatggaaaattctacacaaatggatagggaagaagagagagagagaggagcagattggtgttttagatgcccttrtgtgaaatgtgaagcttacactgatgttcttgtgaaaagacaaacttgaagatctatcaatattaaatgggcttttacttttaggagaccagttacactagcttctttatacaggctcagagcttacccagagatttcatgctcttgccttttattttaaacttagacatttaatgagcatagttgcctggccccctgcaccctgcctggcaacagaaagcaatgctgactgcttcttagatttagtactgaagaacattcttcgaaaaaagaaaaggattaagtgttatttttagctctgttgactrgtagggactttgtctatgaaagatgtaacataacatcctaggatgaagcagcagctgtacttgagtctgaattagaacagtgttgttcaggtggttttttgagccatgttgaggtttctctctaaaaatagctggtgacrgcattcaggtacaggttatgtgttgtactgaatgtattgataattacttgaaagtaaaagactatttgccaagcaaaaattacagtgctgagkaatgtacccaatttgaatacaacygttttcactattttattcactaaagaaaaaccctaaaactttgttaagatgtagcagtagtgttattatttaaaacaggaaaagtgttcttcttggcccanttgtttgatgtttaatgtcataaatgacagggcagaagtgatagttcaagtaagaaggatgtgattgagctracagacgacagctttgataagaatgttctggacagtgaagatgtttggatggttgagttctatgctccttggtgtggacactgcaaaaagtaagtgccttctactaagtagtctgttcattcacagtgttttcagtacattcattagcttattttgaaagagctgaagtagataatagatcaccactaagatctcttccagcaaaactctgactctaagtgaatattaaacattgacattagcgccaagagcttccactctcctattgccaaagattaacaagggactggctcatgtctggatttaggggcagtggtggaatgggaagctcatgtgaagggtagcattgtatctttagtaaagccacacacaaaatgttttctaggtgtgacataattggggattgggcagaaatgcacagatcagttaaaaagtataggctaggcatggtggctcacacctgtaatcctagctctttgggaggccgaggcaggcggatcacttgaggtcaggactttgagaccagcctgggcaacatagcaaaaccccatgtctactaaaaatacaaaaaaattggctgggtgtggtggcgtgtgcctgtagtcccagctacttgggaggttgaggtgcaagaatctcttgattgtgggaggcagaggctacagtgagccaagctcacaccactgcgctccatcctggataatagaaggagactctgtcttaaaaaaaaaaagaaaagaaaagaaaggtgtttgggctgcaagttaaaatgcaagtatttggcctggtgaggtggatcacttgaggccaggagtttgagaccagcctgggcaacatggggaaaccctatctctactaaaaatgtagaaattaacagtgggtggtggcacacacctgtagtcccagctatgytggaggctgaaatgagatcacctgagcccaggagnttgaggctgcagggagncatgattgcaccactgcactccagcctgggcaacagagagagacngtgtctcaaagaaacaaaacaaaacgaatatttttctatagcctagagccagagtgggctgccgcagcttcagaagtaaaagagcagacgaaaggaaragtgaaactggcagctgtggatgctacagtcaatcaggttctggcctcccgatacggggtgagtatacttataaggctcatttcattgtgaaatacatggtgtttcgttacttcttccaatactccaggcctccctatgaggtagtaaaggagatgtttaaaccattttgtaagtgaagagataaagtcactttattgtcataactaacaagtctgaaactcaggactgtcaacttttccccctaatgtcacactgcttctggtatatacttaatgtgaggtttcagcttgcccagacttattcaagttgctcatatggctgttgtgagttggtccatttgttctagggcaggtactttgtgttaattatataccagggcttgaatatgattggctaaacttcacagactgttaaaactccctgattgataattgacctctgtgagtcattcctttgaaatctgtgcmgtctggagaacagttttgttacattaaattacctataaggccagagtggtggctcacacctgtaatcccaacactttgggaggccaaggatcacttgaggccaggatttcaaaaccagcctggccaacatggtgaaaccccgtctctattaaaaatacaaatattagyygggtgtggtggtgygtgcctgcagtcccagctactcaggaggctgaagtaggagaatygcttgaacccaggaggcagaggttgcagtgagctgagattgcacctgtgctctccagcctgggcaacagagtgagactgcttcaaaaaaaaaaaaaaaaaattacctataaggtggttttagaaactgtaaagattgtgttattttgcattaagtgtwaattggattttatcctctgacctttttttaatagattagaggatttcctacaatcaagatatttcagaaaggcgagtctcctgtggattatgacggtgggckgacaagatccgacatcgtgtcccgggcccttgatttgttttctgataacgccccacctcctgagctgcttgaggtaaaccrcttcaactgcttgtagtccagaaagcttttttagctgatggtgaggaatgttaaagcagtgtgacacactgttcattttatgcccttaaagatactctctttaaagtggtttctatactttgaaatggaaaaaaagtctgataaattgcttttcataacttttagcattagaataattacactgaacagaaatacgagcttcttaaagatagagtgtattcaatcactcttgcttatcattctcaaagtaatagaacatttatcragtactaatcatgtaacaggcaccgttctggtgtctttrtatakttttgttttgttttgttttgttttcatttaattctcacatgaacactgagaggtagatactgtttttaatctccattttatatatggggaaattgaggcacagagcctcaagtgtgtataaacatataagacatataatacatgtaagtataatctatttaaacaagtaagtggcagagccaggctgtgtccaggcattgcgatttcagagatgtytgtatgtgtgctaatcaccccaccyccaccaccacagcttccacaggcttaagaatcagtagcagaaaaatctcctcttagagaacatgcctccaggtgtttccatacgaggaagtagtcgtgggagaaatgttttcaatgaaagtgacggtgcgaaggtcttgtttgccagcttacctttaggtgttgtatcatgcagcctcctgatngtcccttgtcttttgggtcccacagattatcaacgaggacattgccaagaggacgtgtgaggagcaccagctctgtgttgtggctgtgctgccccatatccttgatactggtaagacagacggaaatgatttcccttagctgttctatgctagatgctctgagaatacttnctaaatggattaattttatggactcctttatctttacctttaaaaaactttgtctntttaaatcaggagctgcaggcagaaattcttatctggaagttcttctgaagttggcagacaaatacaaaaagaaaatgtgggggtaagttactgagcttactgtctgagtgtcatctgaacagctgatnataggctttcttgagagtggttcccccgtgtttttgtaagctgtgttctatgtttgctctgctatakgttttttttttttttccctcctgcctcagcctcccaagtagctgggattataggcgcccgccaccacacccagctaatttttgtatttttagtagggtcrgggtttcaccatgttgtctaggctggtctcaaaactcctgacctcaagtgatccacctgcctccacctcccaaagtcctgggattacaggtgtaagccaccgcacccggcctgctctgctatatgtttttattcaggatgtgaaaactttatcatgggaggaaaagaaggaatgaagggctgtcagcacagcatgcatttttctcataggaatcatgttttacatggtgattggagtgccaggttagcaggcagacacataaggagtagtgcacctgaattctactgtgaacttgaaggctgggtgagaaaggggaaatagaattgtttccttcycctcttctgagttaaggactggatctaggcacattttcaaaacagtgtatctctttcctattttatcctttttttttttttttgagacagagtctcactctcttgcccagggtggagtgcagtggcacaatctcggcttactgcaacctccgcctcccgggttcaaaagatcctcctgccttagcctcctgcrtagctgggactacaggcgcacgccaccatgcccggctaatttttgtgattttagtagagatggggtttgcaccatattggtcaggctggtctcgaactcctgacctcaggtgatccacctatcttggcctcccaaagtgctgggatcacaggcgtgagccaccgtgcccagcctccttcctatttatctttttgcttcttgtcctcagtatccattgctttccccaggtacctagcgccccctgttgtccctctctcgatgaccttgctcctcctccattagtccagcaaatgtttattagatgcctacagaacgcgagaacatgcttaataacccaaatgatattggtgggatttcaggtaaaaagggaaaatccatatagaaactcatcttttgtttttatttgtcattctacgaaatatctgaagcgtgatcttttgttctctaagatcttctagttagatcgtaagcaatttaaaagacatatttgccctaaaaaccagtctggttttctaggtggctgtggacagaagctggagcccagtctgaacttgagaccgcgttggggattggagggtttgggtaccccgccatggccgccatcaatgcacgcaagatgaaatttgctctgctaaaaggctccttcagtgagcaaggcatcaacgagtttctcaggtaatttgttttcttaggttgtttgttgttttgtctgtttgtttggttctgttgtaggtttrtatttggaactaggtatatataagccaggtaataaatggaatttaaaatgcaaactaattccagagaattgaatgtttatacattagagtttttaaattgtctccctgttcgttcttttttccatggaatactctgcttgcgggatgaggagaaagcattgctaccctcgggccgccctgtgtgccattctgtgcatctggccctgggctctttctcattctcataaaggtctcatatgggctagaggcagccctgtctgtccatcctcaccytcatatgcattgtaatcttgaccttggggaaatrtggtttccatttctgggcacttggctttggaatgtagttatttatttgaaaatgggcgtacttaagttactccaacaatgtgcaaacaacatgataggttctaaaaccaatatacagagctgtctactctgctctgctattcagctcacctaatcatcttttaggcaatacagggcattgacctaaagaggttttatttcccattcttgctttcttccgcgttcatttcttagctgctgtataagagatgttcagcacacaaaaggtagttgagaggcttgtgttgaataatgaataggaagaacagtacatgaaagcctgcagtgctcttgctgccagtcttcctacttgacacagaagtttgtgtgctgtgtggagacgtgtgtgtgtgctgtgtggagagtaggggctccaaagtcaggtgcctcagtcacagctctgccttgagtagtgaagtgggaggcatggaggaagccctgtgagatcagctgcttcagcctctgccggcggggggcagactgtggctccttccctcccagctctctctcattgtagttggttaatatggttaatgggtgttttctttcccccccacccccgagacagagtcttgctgtgtcgtccgggctggcacgatctcggctcactgcaacctccacctcccgggttcaagtgattctcctgcctcagcctcctgagtagctgggattacaggcgcctgccaccacgcccagctaatttttgtatttttagtagagatgggttttcaccaggttggccaggcgggtctcaaacccctgacctcaagtgatccacccacctcagcctcccaaaatgctgggattacaggtgtgagccaccacgcctggccaagggggtgttttcattaagtttgtggggctgggtgcggtggctcacgcctgtaattccaacactttgggagtctgaggcaggcggatcacttgaggccaggagttcgagaccaggctggccaccacggtgagaccttatgtctactaaaaatacaaaaaataggccaggtgtggtgttgtaggcctgcagtcctagctactagggaggctgaggcacacccaggaggtggacgttgcagtgagctgagatcacaccactgcactccagcctgggcmaaagagtgtgacttggtctcaaagaaaaagaagtttgtggactgcttaagtttgtgattgtcatagagtagtatttattaaatcatgaagtcagaatgtgaatatatctcctgtaatttttttttctaataataggtttgcttattctagcccattggtgccatagattgttagtctagctctattattctatgagttgtttggtgaactctaaatatttgtgcccacagtatttctggctctggtttcccaacagccagattacaccaggtctggtatgtttcaagtactgatgtttatgcacatacgcaccccgctctctgccagcgcactggaaccagtcgcctcacttctgatatgctccctctgtacaggttcacagcagtcttagaaagctcgcaggcagcccatgttctagatcaactttgataattatttatgtatttaatttgtatttcagcaaatgctctgctatttttaaaarcttactgatagcaactgactttatctgatgcagggggcttagttgggaatgttgaatctggttgtaatgttgtccgtgattaaaaagataatgtcctcaaggtgtttctgaggaatgtagtgcagcaagagagaagaaatgcctctgcataaacaaagtaggcagactgttatttttaaagttgtttattcttctgcaccagcagtccattgtaaatgtgtgtgtgtgttttggtcatttttccctaagggagctctcttttgggcgtggctccacggcacctgtaggaggcggggctttccctaccatcgttgagagagagccttgggacggcagggatggcgaggtgagtgcccgggagggaagctgtgcgggcagcagtcctggtttactctcttgagcctgtgcatctctgcacctggagtcaagtccttcccatcagacctcagccctggtgcacccgtgggccttttaagaggttcttctctgaagacccttcatcttccttatcacaagtttaagtgctgcatggcatttgatactcttgacagccaagatacatttcagtagtaaggttgctttcctgattattaccttaaagtgaacatttaacctggaattcatttactttatcttagaaaaatagaaaatgatagctttgaaattagcacttatttctgtactgttgtgtcccaccctcctcaaaaggacacgttcaagtggcttccagtgttaaaatggtgagtgatgtgatgttgaaatgtttcacctgagttctgagcttttccatccgtataatcataggtacgaaggtcagggtaggagtcagactgaggagaacctggattgtagcaggagtagctccagagagtcgctcttccrtaaaatgagatgttgaccttccagggtgtccccttctgcagatctaacagtggctttctgtcgtctcccagcttcccgtggaggatgacattgacctcagtgatgtggagcttgatgacttagggaaagatgagttgtgagagccacaacagaggcttcagaccattttcttttyttgggagccagtggatttttccagcagtgaagggacattctctacactcagatgactctaccagtggccttttaaccaagaagtagtacttgattggtcatttgaaaacactgcaacagtgaacttttgcatctcaagaaaacattgaaaaattctatgaattgttgtagccggtgaattgagycgtattctgtcacataatattttgaagaaaacttggctgtcgaaacatttttctctctgactgctgcttgaatgttcttggaggctgyttcttatgtatgggttttttttaatgtgatcccttcatttgaatattaatggctttttccattaaagaataaaatattttggacaatgccgataaatgtatgaagttagtatccacatcataaattcagagtgatgtttagcagtaaatcaatattttgaagtgatacacagatgtctttcctccccacaaacttttttaaacaaaaaacaagacctcttttctttagatggtgccacctatgcccaccacaacagagattttacatggaaaccgggctcagtgagaactgatttcctgcccaatatttgtctttgggctgtctctagtgactaattattaaggaatctagctggttatacagttcaaggctttytrtgtwgttaatgaacctcaaaatagccgttaagayatgaaatacagcagcaggttaccaatgcgaacaggtagttcgcatttatgtaaaacattcagaaaatgaagttttgaatttgttrgaacattcaaaggacttgagagcattttattgtaacttaaaaaaataaatacaactgtcactaacttttgtgagcaatttctctgaaaaagatcttagttctgtaagacatttgaaccattctctggctaaaggaaagaggtgtctgtaataatctgcacgaacatgagacagaggtgccagctggcctttctagtcaagaagactaaggtcaatatggaagtagacrtaaggaaaatagtcttggttattgagttgcagtcccgggatctccacagatgcctacaaaagaagacatggtaatgctctaagtgcataaactagtttcctgtcttatccttttagttttgaggaagctcgccaggcactgagcgtacgttctgctctgcgtagctgtggtccacccctccaaccctctccttgctgtgctttaatgtgtatgacatgtagattttcataacaggctgacagatagttttgctttgttttgtttttgagacagtttctgtcacccaggctggactcagctcactgcctgcctcagactcccaagtagctgggattacaggcatgcaccaccactcctggcaaatttttttttttttttttttttttttttttttttgagacagagtcttgttctgtcgccaggctggagtgtagtggcgtgatctcagctcactgcaacctccgcctcccaggttcaagcgattctcctgcctcaacctcccaagtagctgagactacaggcacacaccaccatacccagctaatttttgtatttttagtagagacagggtttcaccatgttggccaggttggtctccatctcttgacttcgtgatccacccgccttggcctcctgaagtgctgggattacaggcgtgagccactatgcccagcccaattttttttttagtagagacagggtcttaccatgttggctaggctggtctcaaacccttgacctcaagtgatccacctacctcccaaagtgttgggattacaggcagataccagttttttgaaagtaagatgctgagcttactgtagaaatactgctgtttctggatacctacatccagtatacttgtagcggctacttcatccagatgtcggaagacagagtttagaacctctcttaaacgcttggtggatgacttcttatgcggctgcaggagcactgcctggaagttcactggtagtccataccttttcagatagacaaaatgtgtcagttcactgctccaaatgcaaacacggatagaaggaacctgaccagaaacagtacattccgagggtgaaaagcttcaaccaacacagcttcataaagtcaaactcgagcaaaatgcctagggtcagcggtgatctctggatagaaaaagctctagaatttgctaacccccttctgatagctagttttcaactatagagcaaaagaggtcatccctctggccatgaatggccattccacggtgcatgctcaagttgaatgcaggtagttggactgaacattcggactccaaggcgtttgtctaaaacccagctcggccgtttttctccactaaaggagaggcaaaaatctggtttatcaagattgttactattttcgctgagtttttgggtagatagaaaacatttttaacatacctagttgtatgcctgagcatgtttaaaaccagttgttgggatgagctattcctggggtgttagcccacacaaaatatagcaagtgctgtaaatggaaaacattttgtgattgttgatgtatttttatactctgagggagcaaaggatcggatgttcagtagttagcacctatgttccctcgggatccccaggccttgatgtgaagtctgtttttacacgcccttccactcacctagtactctgtgcagacggggctgccataaagataagtcctgggagcaggacctattaatattactaaggttttatttatctatttttttttttgagacagaatctcgctctgtcacgcaggctggagtgcaatggtgcgatctcggctcactgcagcctccacttcctgggttcaaccgattctcctgcctcagcctcccaagtagctgggattacaggcgcccgccaccaccacgccaggctaattccaccacagtcattaccaacttgcactggaggttgtttattcatctaggacacgtccttaaagcttaaggcgctcctcccccagcagcctggcttgagggagaggcctgcctctgttgtgctcgctgtggtgggtggtaggcaccctaggtccttaagggacatacgctccagcccttaacctttcctcagcctctgagttcttccggccctgtcctgtctctgtggcacccgtcctgctaataatgccttctccattctgcccagaacaagacaccatgccgggtgcggtggctcacacctgtaatcccagcactttggggggccaaggcaggctggatcacctgaggtcaggagttcaagaccagcctggccaacgtggtgaaaccccgtcgctactaaaattacaaaaattagctgggcgtggtggtgcacgcctgtaatcccagctactaggggaggctgaggcaggagaattgcttgaacctgggaggtggaggtcgcagtgagctgagattgtgccactgcactccagcctaggcgacagcaagagtccatctcaaaaaaaaaaaaaaggaccccaggagcggctggcccatcggtctcaacctctttcttgggcagatgcgcatcctggaaggcatggacaggcttcactgtgttaggccgttaggcctgagagcaaccgacttctgagccgggcagggttgatctggggccatgtatattagagatggctagaacactcccaggagctgggtacaccctccaacccaatgctgccatccgtgtcggtacaggcttttgagatgggcgtgcacaggtgcgcatgggtacaggtgtgggtgcggtgcatgtgcagggcagaagaaccaggaaccaaggtcagatctgtatctgggcagaccacacactgacagccacatggaaggggaattggaggccaagaacagagaggaggcttatggcaacagccaggccggtggggccagacccgtgaaagagagagtgcaaaggcggagtggaccgggcctgtcaggggtgtctaaactgaccctgaagtttggggtctgataaggggaaggatgaggaggccactggcagaaacagggaagcagaggaaggggtgcgggaggggagatgagacagatacccaggtaaagcctacggcaggcagatggcaggacctggaaaccagggaacatgggcaggaaaacgagggaaagtaggggacatcagccagggggacggcagggagggatgaggagctcctcagtgcaggcggggaaggggtccggaaggtcacacagagggtctcaggggctggaggagcccaggaggccgcgagtcagagcggcaggcggtgcgcagtgctccgtgacgcgggacgcagccacacagggcagaaaagcggccttcgaaggcgtttcctctgattccactttcataaaaatctgtaagaattacgtatctattcataaaaaaacaacaaaacctacacctaaaagggcacccactgggacgctggcagtgttctctcctggtgttaaaattaaaattacaggagatttttactcactctgcttacctagagttgccaggtttcccacagtgaagttttttttttttttttttttctatagccggagtttctcttgttgcccaggctcgagtgcagtgacgcgatctcggctcactgcaacctccggctccgaggctcaagtgatcctcccacctcagcctcccaagtagccagtactacaggcccatgccaccacacccggctaatttttgtatttttagtagaggtggggtttcaccatgttggccaggctggtctcgacagtccatgacaagggcatatatatatatatatacatacatatatatatatatttttttttttattaggcaaaggccgggcatggtggctcgcgcctgtaatcccaacatttgggaggccaaggtgggcggatcatctgaggttaggaggagctcaagaccatcctgaccaacatggtgaaaccccgcctctactaaaaatataaaaaaattagccgggcgtggtggcgggcacctgtcatcccagctactagggaggctgagacaggagaatctcttgaacctgagaggtggaggtttcagtgagccaggaacatgccattgcactctagcctgggcgacaagagtgaaactccatctcaaataaaaaaaaaaaaggcaaaataagctttgttgttgttggtgtggttttggttttctctctggactgccttgaggggtgcggcttccaggctgaggacggaggcagcccgagagcgccttccaggagccactcgggccctgcgggcttcacgagggtggggacaggagccagccagagggtccacaagggcatgcaggtagggcagctggggagaacccaggtgacacttgccccaagtgtagcaggaacggagggagcagacagcaggggacacagggctgaggggagggtgtacttgactcggaattgagcgtgttgccaacagccacagtctcagaaaggagacgggtggaggatggagagaaggcaggagctggggtgccccgatagctcccccagaccctgcccatcctcaggacagtcccagccggggcatcactgccacgcacctgagcacggactccacaaacactctcagggccttgatgtggatccaggcaatgaaggcttcactgaagttcaycttgagccagcgcagcagggggccctgcaaagacagaagagccaggtgacccctgctgaacaccccgcctgacacagagccaagaaaggacttgggttttgacagagcacgccctgagctgagaagaagtgcccaggagccagaagcagagagtcggtcagaccagccctgggtcaggctcaggacctcgaggtccagggcacctggtgccggggaagctcagcgggccagccacccggtgcatgcacggggccaccacagaccgcagcgcggggagctgggcagcccctgaccttggggctttcagcaggcagccaggggcttctgcctgacactgtgcagccagggagcccaccttctcagaggctctgcccccagggtcctggcatcatccacagcagccgcctcccctcacagccccacctcacgtggccacagcagcagccactgatgccggtgtggcaggtcttcctgggagctcaagagtcttggagcaagagccccgagctcccgcctgacactgcagctgcccacaaaggtcaggggtgggttcagcaagggcagccaagggaggagagctgagctgccaaccaccaccccagccagggccctgcccgtcccagctccagccacctccagccaggcgcccggggagaggcgccctggccgacaagcacccttcactgctggcgggggcagctccaaagaggccctgcagattaggaggaaggcatgattccggctcctcaaatttaagacctcaaaagccatattagagaacagaaaaatgcaaggattcattttcccagaaggcgcctgagctggcgaggagatgtgagccagggaccccggggttcccggggcgttgcttacctcaccctcgccctcactctctctctctctgtcggtctgccccgcagcaggcctatcagggttacctagcggggttaccttaaccttgtggtccgggaaggtggatgatccctttttaagagcaacacaggaagtttgctaaaggcacagaaatgatttattaatctttcagcaaacatgcatcacaaacaaataaatcattctcatcgcctgaaaggcacgcgagagcaagctcaggaattcaggcccaccctcgggactcgcgtgctggctagactagagatgtggtaggtgcccaccgggctcctggagtggtgaaggcagagagaagg

SEQ ID NO: 95017 - DNA, 22107 bp, Homo sapiens
aaggttgcttcacaagggtacaaggatcttcttatccagtgagaagtcactttccctgtgctcaaacatccttgtaaaaatccaggaggagaaaggggcacataagccaatggaaataccaagtccatggctcctttcttaatgacaaataactactttgaagaaggatccttcatgccccagggtacgggagcctaaatctctggcttgggaggaaatgaggaataatactgtagtcattcagtcctttactaaaatctcactgtttaaaaagctgctgttatcttggccaagttatttaacctccctgagtatctttctcctatattaatggaaaagaataaaaatattatcatacagcattattgtgagcatgatttgagatagaacatgcagggccataatgtcaaacatggtgtaactcaatcttttttttttttttttttttttttttgctgctactgagactgagtttttcaatattagaaagtccggtgacctccttactatgtgaattccctgtgaacacaagacaagaaatctcagcctggagtatgtgcttataattggagcagggggcccagagcccagggaagggagtgcttagcagtttattcttcaacaattcctatcgtttcatctgtggaagcagtactcatcaataaatcagcaagtgacaggacatttttcaaaactgcatggaaatgttaccattttatacygttataatcatacacaaacaaaagagtatttttcccctgctctcaaagatacgttgttgacacagtttcagaagcacaaggcagaaaaactgccccaaaactcaagatgaaggctaaaattagatttttttcaaacacctcccctgacagtacctagtaatgttattgtggctgttgtaaccgtgggtgattgcctatacacacagttggtgcaatgaagagacacaatagcttaaaactaaactgtaagattatttttcaagtagcttctccaagtataatacctcagcttctagaaaaagtaatcrctgctaacatttgaaaagtcaaaattctatgcaagggtctgggagattaacacgattgagcataatagctcctttcaaaccatttcctagggactaggctgcaaaaagccttaagcttgaagatggctttccaaatatattttatttattcaatgaagaaaaagactatttgaagtttccatattcctttcacatacagacacttcactgagctttaagagaagcattcgtctgtaggcgcaaaatgagtaattccccagcttctagaaaatgcaatcagtgcaaacatctgaaatgttaaaatgttgtgcaaaatgtcttttgtagagatatagaaaaaaaaaccctgaagtaaatatcattttaaactggtctcagcatttatgtttaaaaatgaatacatactcatatgcttagtatctgatgcatagatcatctccggacagcaacagcagctgcttcttgggagggtaactgaggccctgagagataacagtgggagggcgtttgttcacagtgcatccttccttggctttatattttgtactgtgtgcatgtattaatattaatctaacttaatctaaccacttaatttaattaaacatggcctcttcaataagcgagtcagctcatccatcccggtggagcagatctttctccaccatcagtactggatgctgaccttctccctggcctggacctcagggatgccgtacagcaaacttccctgacttcttttcacactgagcactaggtgggtgctgtgctggcactaaaaggatacaatgaacataagaggttgtctcagggccgtctgcacaggattgctagccctcccttcccaggctcctgccttactcagctttctccagggaccacaggaggcctctgcatatcttatgtaccactctggtcctttccttgttgcccccaacccctctacccttgccaacgtgcactcccttcctcaggaactctgagacacaatgaataagggagaaggtgaaagcccctcttcctctgggctctggagtaccagtgaaacacactggggccaaatcctcttctggaacacactaacaatatgaccttgataaagtcaacctcactgagcctgattctgaactcttgaaatggtggtggtcattatatcctcaggggaatggaatagagattgaatgagatcagttatgtaaaatgcccagtgttacactcaacacatagcatgtgagcagtaagtgttggatgatatcatcgtcatcattgtcagtagaagcaatggtagttctcactgccaaaacatgattgtttcaacctccgcaggcctgtacacatctccagctctctgacctgggactcacttacacacagtgtggattagcrgaaagggtgggctttccagccagaggggctttaccttgagcaagtccttaacttcttttaatgtcaatttctttaactataaagtgagaataattttataccttcctcataggagtggggcaaagattatagataatatctacaatgccctagcacctaagtgccctacatatcttggctgttttgactttactccaagggggctgatctatttactggctcctgtcaagacttgccctcttctgcctccacatctttgttcagttctgttgccctccctgccccgtcctctctttccacctccatctctggaaactttcatgcctctgtttcatctgagagattttatgacactttctctgaccacagtgaattttcccacaattgaattcgtagactgcttatcttctgtagggaaataggaggtgcaaatccagaagactccaagacccttcctctgagtcctctgttagacttattagaaatcaaggtgttaggcaacagccggcagaaaggactccggtcacatgcagccaaagagcagctcctcagtggactcactctgagctccccacacgatgatctctgtgttgcctgggaggggtcacttgccctcctgaaagtcaactccctgatgccttattcaggggtgtctcataaaataaaatggccaattggttcattgataaattaaggcacactggggcttctagcacgtggacagactgcagggccacgaggcgcgtcggctgacatccgcaggagcagctggtgtctcacctccccacgggcctggctccagctgctttgacatccattcagtgcaaatcacattgagtcactcctctctgtgaactttggatggttctgagcagcgctgcgagaggatcctgaccaagtcctcaccatgtcccacaggcccatcccgatctgactgtagtcttctaggcttttctcttgcagcagtcacctcctacctcttgctcttccccaagcccaccataatctttcctgcttctagtctttcctttacttggaatggcctttctaaacttctgtacctaatgaatcctactcatgctttaaaatccagctcaaatgttgtcccctatgaagaactttgctaacctcccagacaaagcgtgttgcccagttttctcagcagtcctctagtgtggagctttttgcgtagtacctctgttacatttacatccttctccccaacaagaccataagcatcgtggggtcaaggatgattttataacccctgagtctgccaagcatggtgtctgataaccaacacatttcattgcatgaataattaaagaaaacagaaataaatgaatgaataaacaatgctctttttgttttgttttgtttgagacagcctcattctatcacccaggctggagtgcagtggcgcagtctcggctcactgcaacctctgcctcctgggttcaagtgattctccttctttagcctcctgagtagctgggattacaggggcccaccactgcactaggctaatttttgtatttttagtagagacagggtttcatcacattggccaggctggtctcaaactcctgacctcaagtgatctgcccgcctctgcctcccaaaggaacaatgttgtttctaacaaaatacaccacctttcctggccttcccacctaaatgggttcctggaaattgttcttggccagtatgggttggtgaggggctagccagggagcagagtcatgttcgcaaaaggtgggcactcatgagagtggaagaagggaagtaagttcctatgtctagaataacactctcctagaaaacattacatctgggggatttttcatttctgtgcttcttattttcactcgcctatactcttgcacaggattgatttccaatgaaatttgataagtgatattttgttaaaatgtcctgattttttttaattattaaatagctataatcccaggcctgaaaaatcccttatccagtagctacagttgttttttgaagcaccgccaccaaaattattcccctggtaattattgagcaatccgttttcacccataagcctgtcacatgtaataaggatgcctgcctgcctgtttattttctggctaatttggtccctttacatcatgtgaccttcagtggcctgtatgcaatatgaaaatcgtcctcctaggactttctttagaaggttcacagaggtgtgctaagcataagtaatacatcagtttttaaatccaggcagagcgaacccatatcagatgtctcaggaaagcctgcaatgctgttttataaagggaacagaagagtttcttgatctttgctattctctgcaagaaaatatctcacctaagtacatcctttcgtatgcactctgtagcaggacatttacagggtcagagaaaaagacactaaaaacttacccaagctgttagctcatatttattaactgcttaatataggccagggtgcaaaggcctttatatgctttgtttaatcttcccccaaaccctgggagatttttatcccagttctgcagattagcagactgaaacacagagaagttgtaacttacccaaggtcacctggctgtggatgccagagtaagcatttattttaattgatacataataatcatacatatataggtacatagtgatattttgatacatacaatacatagtgatcccatcagggtaattagcatatttgtcatttcaaacttgtatcatttctttgttttggggcattcaatatcttctcttctaggtatatgaaaatatacaatacattattgtaactatagtcatcctatagtgctatagaacactagaacttattccttctatccagctgtaattttgtatcctttaataaatattttatcctctctcccccgtacacttcccagcctctagtattctctgttctactttttacttctttgagatcagcttttttagcttctgtgtatgagtgagaacatgcggtgtttaactttctgttcctggcttatttcacttaacataatgtcctccaggctcattcctgttgctgagaatgacagaatttcattcttacttatggatgaatgggattcctttatgtatatataccacattttctttatccattcatctgttgttgaatacttgggttgatccatatcttggctattgtgaacaatgtggcaataaacatggtggtagatatctctttgacatactgatttccgttcctttgcataaacgcccagtcatgggaatactggatcttataatagttcagtttgtagtttttttcaggtacctctgtactgttctccatagtggctgtactagaatgcattcccaccaacagtgtatacgagttcccttttctctgcatccttgccagcatttgttattttttgtgtttttgataatacccagagtatgcttttgaagtcaggtctttctggctccacagtctgaaggtgtaacactaccccaggctgcctctccatagcatgtttcctgatttctggttcaagaagactttttctaacaggtgtcattcctagatggctctcttaagatcttactccctttggcattttacaccttactcatacaatcatttttaaaaaatagcaatttaaaaaaatacagttcaagtgttcatcatatccaggcatgcaagccttttctaaatttttttaaataataaaaaagccccacagaggaaaggaggttatttgtgtcctcctgacacacacttttagattttggttaaaaagtctctagtgggtgcaaagtgaccccctttgtcactggaaacaaataggagcattctttgtgccactgtccacaaccacacagatatgtttcccaagggagctcatcaggtcttcaaacatttagcaagcatgacatgtgtaagagacagtattggagaagtaagacaagccttgctctgccgaagcttacaatccaggagctcaccccttcaaggaatttacagcctccagacagataataacattaggtccatgaaagcctacaaggcaagaagttcaggagagaaagaagtcataaccatcttggaagaatctcaacttgttttatcagaactcaaacgccaatttctcacccctagcttccctcattagygcttattaactagtattgggaggaccaagcgaagagtaaagctagggtagcagaggccataagctaattgcaaaggacagagctaaagaaacatgctagtttcccctgagcacccaactgcatgactgaaaatggattaatttgtatttctaatggatatacaagaaacacgtgaatatgctaaaataaatttaaggtcaagcaatgcaaagtgttagtgcgtttgccttccactctcagaggcagcctctcttatttggttcttgggctgcttcataaaaagttctgtgttttttaatggcctcagcttttgggaggctcaggccacctagcccatcaggagaccaggcccgaaggatggatctgaagagtgggcaacggagagttaaaccagggctgacttcaacaggcccagtcaagtcaggggcaagcacattgtccatccactggaagacggaaaggggagaggaaggcaggccctcccgactcacaggtcacctcgcaactttgctaggcactacccaccctttagggataagtgaagtatgtggtgggcatacaaggcgcacaggggagtcattctggcaaattccaagaaggttttaagggctcccgaggcaggcaggcccagttgctgtttggagcttcctttggggtgggaggatggcgggggcagggggccggggcggtgccttaacgaggggagatgcttttaaatagctgccttccaaaaaccatcctccctgcttctttgagaagcacccagctgttgtttaccctccaggacagcaaatccggttatttgtctctctattccgtgatattataaagtaatgaatggtccattaaactaagtttgggatcccgtctccccacagccacctcctcgccggcaccctcagccggggaggccgtaggctcgggctgcagcctggcagcctcagtccccctccctccaccatttccccctactccctccctctcctgcaccccctccccccggttatttgggagattagagttcattaattaaatcctgtgcttagatcgaactgtaacattattccaatcacatttatcttgcaggcggcggaggagatggcagcctcgctggaaacgcgcgggggagcctgagccggcggccggggacgcacggcgctgcgcgctccttcgccacgccgccgcgcagcccctccatcttcctgctcggcaccgggccccgcgcgcccctgcctacggggtcccgctgctctccggggctcctgccagccccaacccccggccccggtggcctccccccacccccgcccgggtccccctcctccgccacacgcgcgcgcgctcacacacacacacacacacacacacacatatatacacgccagcgagctgctggccgctcaatggaccgatttccccggtttccctgaacccagcccagcccgggatgagaaactgcaaaatggcccgggtcgccagtgtgctggggctggtcatgctcagcgtcgccctgctgattttatcgctcatcagctacgtgtccctgaaaaaggagaacatcttcaccactcccaagtacgccagcccgggggcgccccgaatgtacatgttccacgcgggattccggtgagtgcgggcctctgtgttagtgccctcgggaatttggttgatggggtgtttggggaagggaaggcgtgggggaggggtgttttggcctctccgagactctttgggccagataactgcgcggtccttccactcctctctctaattctcccttccccctccctgttattttttttttaacccaaagcccctagaagccgctgtccaaatcgatgtgattgcatttctcgtattcttcctcagcatcccttccctcatttcagaaatgggggttgggggaggctttcaggagggtgagggtggagggaaagacggtgtgtttgttcgggagggggcggcgagcagagatggacaggcgtgaggggagcgccctccccgcgccctgtccgcagactccgcgggccgggcccggggcggtgctggcggtttaatggcgcaggcgccggactcccctcgcgccctcctcctttactcccccacgcctatcaaaggacacgcgggtttattctcaggaagcccctggggcgttctctctcaaccctttcccccgcagccaccgccccccaccagctttccgggatttctgcaattcccccgccccctgcgggaagcgagcctcggaagggccgcccaccctcgccaggtcggagtcaccgctccgcgctgggccggcctgtgaaggctccaggcgcagcttgacgccgctctgcgagagcccccgccccgctctgtgaccccgggaactctcccagcagggcctcctgacgggcaggtggcaactacaaagtgccacctgtggtccaagctgggaccgaggcgaggaacccagaggagcctcgcctggaccgaggagcggagtaggccggcggcccccgggggtccccagccaagttataggaagtgaaatcggacgtgggtttgggaaggaagaggttaaggcaggaaccacccccagactttccctgggtctccggtttcctctgccctttctccaaaaacaattctatggggctgcaaaggcgtagcgggtcaggctggcggggcggccgctgtccgcggtgctgattccctggtcctcgcagcgccgcgggctccagccctgcgcccggcgtgcgccctgctctccgcatgacggccattttatggtctctccggcacccggagggatggacaatgcagatggggttccctagttttctttttttctctcgggtgtgtgtgggagcagagggtggaccaaatgagaggggctccgggacggaacggagcccgcacgcgtaccagccgccctcgccccagccgctgcackttaatggctacctcggcttccsygagctgaggccagcacgcttgtctgtgctcatgctcctctccaggtcacaatttgcgctgaagtttctagacccgtcattcgtgcccattacgaattctctcacccaggaactccaagagaaaccttctaagtggamatttaatcggacagcgtttttacatcaaaggtaggataggaggaaaagatccaaaaggtgcttttaagaattcaagagctcaaaacaaaacaaaacaaaaacaagcaaacaaaaacatctaaaacaacaaacatctatacgccccaccctcaccatcaggtgtatctgcattgttttcttggcatgactgcacaaagcaatgatcaggaamcttctcctgtgtgtgtagtgtcctctcataaaaaggacatatcaggaccaatttsaatagcaaaaaaaaaaaaaagcattccacttgggcttgattgagcaccatgatttacagctaacaagtctggcaagtactgccaaagccatctatttaaaaaaaaaaaaacagacaaaaggttagttgcaaaaagaccacccaatgcattttcatttcctcactgaaaaaaayttgaaaaatagaataaagtggtattgtttctttgaaacacacggaaaatgccataatctgtctccatcaaattactcgtgaaaatgctggcccaratgtatgtagatatttaactatggttttgttttggttttgcctgttttcattgtctttacagcttttaacttactgtaaaggtwcctaacttaattcctactaattgtagcggtttcattttatacacataagatggttttgaggttttgtttttttaggtggaagaaggatgagatttgttcaaatgtatttattctgctcagtgattctggtctactcttagcaaaccacgataactcattactccttccttcatggtgggattattttactgctaaatgggatgtgagccatctagcgtattcattagaagtgtgaatacttattttacaaaccactctatttagggagttgtgttttgatcttagcatttctagttattgctctctctctcttttaaaagtttaatcwatgggcakaattaaaacaaattcagtgggtattcatggtctcatgaaaatactgttcagatgaaaagtcagcatacagtcatatgattaacattttaaaaacacttatgtttaattataaattagttcatgaaaattgatcaattctaaaactctagaagtgtttttttaataattgggttttaattcaatattaattttatggacaacccagaacgttttcatgggtagaacacattctagctttccccaaaacatgtttctaactcaataaaaaatattcttcccacactaggccatgtgacccaaatgaccagtcagaagaatatttccttctcaaaacttcgctcattttaattaattagataatctttcattaaatttttaccagtagcattttaaatctgccttacctttttaacaacttgtaagagtggtactggtaacttggggagtttcaaagatttcagttgctgttgcctctattttgaagaatgaagtcatttttaaattaaaattccaagcaacggatgatgtgcaaagcatttcatttcattcctgctacatttaggcaaaagttataagaaattcactgggtttacttaacatcggagaatctagcagcagtagcatgttaccagtctctcttgaatgttttaaatagctaaactttaagaagagatacttaattttacttaaagctcaatatgaaagcaacstgaaattagttctaagtatcagtcttgccttgtttatgtactgaattgctagaatatggaaatattttcaggatttataatagccatgttttctaaggattagatttattcaactaaattgtgtttctatataatcaagtagaaaaaactccctgtttcattattcaaaggaccttaatgagattatcatctcatttctattaaatattcagctacacccactgctattaccatcttcatattttaataatagatagtgctgtactgactcatatctatttggctcttatttggacaccactgatatttgatattctttgagcacttcagtccagtagcaaacaagtagaccctagttacaaactatgtgttactaatgtttgtgcattaatgtgagctctttcaggcctgtgtaaattgtctccctgtattttctgacacaatttgccctatacctccctgctgatcaaataagatacactcttcacgtagagcagaaaaccaaggtatggcagctaaaactgtaagttgcatttacaagcctcaaagaatacacccagaaattgactgaaagattagaatatgcggagattctgaagcagtcctcccttcaaggaccacaattatgtatgtataatcttttttggattcaatgagcctaagattccctctgaatgaaatgtcagcataagtcataagatggaaaatcarttcttctgaatggaatgcttttcatgaatttstttttattttaggcaagaaattcttcagcatgtcgatgtaataaaaaatttttctttgaccaagaatagtgttcggattggacaactgatgcactatgattattccagccataaatatgttttctctattagcaataacttccggtcacttcttccagatgtgtcacccattatgaacaagcattataatatttgtgcygtggttggaaatagtgggatcctgacagggagccagtgtggacaagaaatagataaatcagattttgttttccgttgcaatttcgcccctacggaggctttccaaagagatgttggaagaaaaaccaatcttaccaccttcaaccccagcatcctggaaaaatattacaacaatctcttgactattcaggaccgtaacaactttttcctcagtttaaaaaagcttgacggggccattctttggatccctgcatttttcttccacacttcagcaactgtgaccaggacattagttgacttttttgttgaacacagaggtcagttaaaagtccaactggcttggccgggaaatataatgcaacatgtcaacaggtgtgtatattttattacattttactcatactccaccagatggcaaatcaatgttgtaatctcttgggggtgggagccatccaattcattagttgttgtggtgagtttagtagtaattagaagaaactcatatgttttgtaatgagcgaatgaatgaatcattctagctaagaagttccatctacccacagctggtaaccaagtgtcagatggaaggattggggcttcatcagtctcccgtctctattctctgtcctctcccttggtagtaaggctatggagcagtcatggaaatcaccacaaatcaagaattttctttaaatagatagctatattccaagaatgccaatggctaaattagagacaaatcaagtggtttttctttttagaaacgatgcagttgacttaaatttatgttttgtagatgtccaaggttagcaaaacacctaaatcataaattgcacaatctgcctttataatctgatatttgagtgcaaaaacatgaagaaagtattttatgagcatgttgttatctcttgggatttgatagacagattagccagagatgcaatattttcttctagtctggtgattttcaactctggttgtatatkagaatcacttgagagctttaaaaatactattgtctaggctctgcctcaagagatcctaatgtaaattatctggtgggcagggaggtggaggccaggtacttggtattttttaacaactctcctgatgattccaatatgcagtcagaattgagaaccactagyccagggcattttataaaacaagattaattgtagattttttttcttttaaatcatctggagaaaattatctcaacttcagtttcccctrtgtaagtagcctcagtgtcctaacatagccctaaatattattataagttggggtgggttctggagacctggtaaacagggaattctgaagatctttattccacaatagatttttcccatccygtagcctcttaagatgtaagatctgtttagttgacctctcataggaggaggaattacagcctaataaactggtttgtatctcaatggtagagggtagagtgatgccataatttacagtccaaactggaacattttctttgagagaaagagggtgctattaataattacaacacagataactgacaaactgggactgtcccagttccccaggatatatggtcacctttttaagtggtgatgtagcccagctcctaagtttaaagatgaatcaactgaggtacaaggagcagaagttatttacccaaagtcactgccctaaatgagcaagactagagttagaagtcaggtctcctgccaacctgtcccatggtcttttgatctcctyattttgctccccttttgttcaatttaagtttgtctataccgaaagggttgtcagagtcattctagttccttagacaggaatagtaaaaccaagactgaacttttaaatttcatttggaaggggaaaggttcacctttgaaatcttcaagtagtgaagaagaaactgcatgtgcttagaaacttccagaaactatcctgtgtggctgcctgccacaaaagtggagttaatcataatgtttcttagccactcgggcctcaaaaaaatacatgggttcaatgaaaacgggaaggaaatacagtccacagaaacctgactaatgcacagtttcattctgcctgcatctccaatgataaatacacacaccacatagaagcctcaaatatttggcggtgtcagcaggaaggcttcagagtattaatattatttaaatatggaaggactaataactataatttattatttacacttaatgtatcttacacactttctgaatttaaaaaatttagcatgccagattgtggcatgctgaagatgggcttgggaacccctagttagaagagaaagaagcaaggaatacaattatttgcaagagagaagaaaaataaggctccacaatctttctaaaccccgaatgaagggtttatttctaggtttgagaaaggaagagacggaggagtttcccttagattaaatgacctccttcaccctatccaagaacactttatgtaagaaaagcacagtcattctttttggtggccttctgttgtgtcaccgctgggtcagagccacaccactctttagaaaaacccaggggcagcttcaaaggccagcttcaaaggtgtgcaaacagtgtgatcccaggaaatcccatgctcagaagggcccaacacttggtttaatactttgctcttgcactcgaaattttcaatactttttgaaccaagactccacatttttatttcttactggatctcacaaattatgtaamcagttgtgcccagaagttgtttttggttgcctaaaatataatttcaaaacaagcactatttaagttacagtaacaaatccactacccagcccagtcagatagaccttgctgattgaaactttcaaygctgacctctgaatccaaatgtacktattgttccacaggtactggaaaaacaaacatttgtcacctaaacggctgagcacaggtattcttatgtacacccttgcatcagcaatatgtgaagagatccacttgtatggattttggccktttggatttgaccccaacacaagggaagatcttccataccattactatgacaaaaaaggaaccaaatttaccaccaagtggcaggagtcccaccagctgcctgctgagtttcagctgctgtaccgaatgcatggggaagggctcaccaagctgactctgtcacactgtgcctaagaactccaaacggaaagygccaaatggctgtttaaaaagtgccccaaatcaaattgaatagccttcagaatagaaccctagagaatgtcttataaggattgtctgccatttaaaaggaaagatgtcttttctcttttgcactgctcttttaagagttttagcagatttagcaggacagatgcattgaagccacatggtttagacttgattgataaagggaatgttgcatttgggactatgctgctaacgaaatggtttgaagtattttcatgtttggattttaataataaactgcctctcatttttatgaggactagagctatagtttctgcagctctgctcagatagtcctcataatcagaggcctctggccaactggggcaggacctgttttgctggtgggatcagactctgaaaaatggaaacgtaaaaaactggtttgcatatctcatcttctatctatctccctatctccatctctatcaccatctcactccytccctctgcaactactccctgccctaccaccgtggagtttaataatttgctaggaatcctattgaattcgctttgcttgtatatgttgcatttgtacttgatgtgtttaaggttctgggtaactttgatgcttcatgacaaaataggcaaatcacgatggactcccttgtgattccttttttaaagaaatgcctctgatgcagtcctcaccagtccattcagtcattctacagcaagatggtccctctgtggtgagtgggatataaggcagtgcatctttcatgatcacaaagaaagcctatgttgtggatagcattgcgtctcttgatgtaggcattgttatggcaaataatagcactgtggccacatctgtaaggccattccagcctaaatttagtgtctcccataatcccaacccatgcactaggctgggtgttctctcagaatatagaggcaatgaatcagcttaagaccctgggacacacaaaggaaaaggaagaagaatatttagaagttgttatggaatcctgtgtaccctaaagtgtggtaaccatgttacccattccagctgggttaaagtggaggaggatcttggccaggccaggtgcccaggtgactagtgctgaggtgcgatcrttttccgtatcattgtgtgcaccaccaccaatccagaaccatttgctctctttgagaacattgtagcactggatattccctctttccactgaagtcagatctatacaactacaaattaagcatttcaaaagaaaaagccattgtgcagtggcaagagttggaatccaagattatgtagacctgcgatgaaggaagtagctggccattctcattttctttatttcagccatatgagtagaaatcaaatcattcccatccctggctttttactgagcagcactttgttcttccaattcagcccaacgtctggccaagttgatgttaaattttaataagagtttctttcttctttccaaatgccagtcaagcatatttgttatgcatttgagtggggtagctcattcttttcctgaaatctcatctagattgcttgcaatgcgacaaataactgtttaaaaaatgtgctgtagttcagtgatgagctcattgcccctctttaggaaggtaagatcatgcctaaaattaaaccgaatatggtaaggaaagacactatcgttatgctcacgttctgcctggtcctaaacctgccttattattattttcagaaagcaatctaattagagcaacttgcatagatctagatattaactaatgaaagaaacaccaagttcaaatgtgttaccaattatgacacacattacaatataattataaggggagacattaaaaacattttgtaattcagtggtataatttgatgggtatcacaaccacaccgtgtttgttccctgtccctttgaagaggactgtactaccatcctcacactgtgctctgttgggatcactgagagattgacaactgacagaagtgtttagttggctgttcctgagcacttagttcatttggttatagctaagtgatattaatgccaatattacttgggccagattctgactctggagttttaatcccaatgtgcccattcattttcactaaatataaatgcatagacactttaaaccaagaagattaaaagaggaaaagaccagaatctctaaaaaacagtttactgttctgtagtggacaatttaaattttatctcatcataatgccaaggatttttgtttgttttttaagttcagggagattttttaaatctccttgcagtcttggctccatcttaaccttagagtgggaggactttcccatcccccaccaccgtgttatctatcactttaatgaaaactcaaaatagtgaggaaatggacttttcttcagaacttgaggggtttagagatcaggctcatctctgcttataaggaggacttcctggagatgatcccaatagatcacccttcacttttgaagaatagcagcttctagctgaccatgcaaaatctctgtttgtttttaaagactgtttcaaagattaaatctatacaaccacttttatgaccaaaaaagttgttgtgtcccaagtgtcctaattagaaaggcagctggctctcctgcagctcccaggcttgtgtagtcaagtgcagtgaactgggcagtaatcagctcaggaccattggctctttcctcctctttcagctacagacacatgccctggcttttgcattgaccttgctttgttagttctagactaatttatccttttgtcagacactttcccttttttaggatactcacaacagagtccactttcagctattggaatacattttaccataaagcccccaaggctttctacccataacaccaacacaaaaaaccaattaagttgcagaggggggaaataatcacaaacttttggcaacctgcttaatgctagaccctctgttttcactggttattctgagtgtcatatgcagatgcagatccaagggagacagggctaaatggtggtgtcaagaattcctcccacaccccaaaaattctttccaatatttgattattaaaatatctatcatttctccaccttgtgtctgtgtcttaagtgtctgtgaatattgtaaaagtgctgtatgtttagtagtgttgtgtgcctggcagtgctgactatgactactgtgccatctgtctgtgaccttgatgtcaggtacctggccatggggctaccagcaaggatgtgcaaaggaagaaccgctgcccctgccctcagcttccttatgcccgagccactacttatccgtgaatgtgagtgccaagagaaacctaatttggtggggaagccaaggaatgggagaacgttttttctgatttgagtcaaggcactaattattagacactctcagacaacaaagcggtattgacctgagatcaaaggaagcagggacaatattgtagaatgctaggacactggaaatgaagaggccttcagcttcgccagtcttgattcttgactttacaaatgagaaaatggagaaacagggaggctaggtgatttgccccagatgacactgtcaattagtggagaaattatgattcctcctctagtacttcttggtcttaccagcatcaaatgaagctgggctcacagggaaagtggtttttggtctgggatctgcagagcacataaaataagttagaaagtctataaaagaggaaaaaaggttctcctctccctcccaaaaatgacttcccaacacagaacaataaaggagatgcttgtgtgggtatgcaactgtccaccaattatcacctaccttctccctgagatgaaacaaaacacgcttggtaaatcatgatttgataaataacaattaagttactggtggttcatgcttgacagctgcaatcttacccaataagctattcatcttagtaaaaccttgttttagtaatatacatgcataatttagaagttgaaggctgaaaattgttgtgttcttctccatatatatacaactttcatcggggtcccttgagttaagaaatgccttctattttatargtaatctcaacagcagactttgaaatattgtgtttggttcaatatgctaagaagatatacaaataataataacttcgtgagtcttcatgtgcaaaatgacaaactgagcaattttctgtataattctagattcttaaaaccttttttcccataattgtttgaatgcactaggcacaagtttctgtttaagcctctgcttctccctgaatgtgtagaactgtcactttgcttacaaaggggctgtgtgtttgtggctggcagcccagatagagcactctgggtgctggggattgagggcaccttggccagctgattgacctgtctggactctgtggcccaattaatcgaggccacagatcagttggtactaagcatcaaaatgattcattatgcctctctcacactccgattgctttgccacatagataacagcatttgaaatgggaaacactttagaatgtcattattgtattatatattgtcatcttatgcagtatttctgaaaatttatttttattgtgatgactgattgaagacatatgtgtatgaatagatgttcctcagtgaagcctattctcttgttgttgatgacagtggcatcagagtgaagagttgttgcagagtaactgacttcagtttaaggttaccctggggttctggggttaggacccggattatgcagctgatctcccagcaaacacagctgtatgaaataagcaactcttcaaaatacaattcttgccactcattctggacctttgattcataatgtcctgggataagtccaacttacaaagattcccaggtgattcgtgtgaccaccatttggaaaccagtaatatatacatccggagtcatatataccattttgaacaaagtagctaaatgcttatctctccttgtgcgattagtttcacatgttcgttgaggttatcatgttaaatggcaatatagacacagtcttagtgattcaacaattcagctgtttcagccgaattgaccagttgctaatttataagcaaattgtaactgatcaatttagtcagaatggatgcaagcccaaagacaaggtggagagcaagctttaatatacactttgtctcaaggccagctcttcatatttccctctttatatttcaaactaagaggcagatctcaggtcactcatctttagaattggtgagaatgagaaacagggaactgaagtgattcattcagattcaatttggaagtcattcccagagcctaaaatatttatctaaggggtctgatttatcaacctcaggtagtctccaaaacacaaaggtattcaggctaaaataaaaccaatcaaaaaaggaaattcaggaggctccagttctaagactaacccagtataacaagggtgatcagttattacttgtggccttgtaccacctctgttggataatgtgccaccgtcctaatgaagctttggccagacttctttctatagctgtgcacatagaaaggctttagacaacagtgataccaaagggttcctttgattttccttctgtgtgattctcagacagttttagctctttggtgtgctgccaaatgtttaacaactggctctggaaaacagtggaacccagatttttagcacctaccaatttctatggtgtaaatactctcatctcagccaatttcaggctactaacttaatgtcaaccagctgaaaacacaacaatatgttttcaagagccagtataagttggctccaatacagcatgagccagctccagcatagcactgcctgaacaatttttaagtcagtgagtaccaaataggagaggctagcagaggctttggagggacttttaaatgtcccctccaccaagggaagcatttccatgttggttagttttactgatttttagtaaaagagcatattattggatcccaaggtgttcaaatattccacgtgactcttaggaacctctcaacagactccccagtatcttgggagattaccaactgtggcttttctaatttctaagggtgaccctccaggaaaacattctttaatttaactaccagttaaaaccatgtttggctgatcttttttaaaaaatctatacctatagttcatcacttgtttccccaactttgtcattttccctatccacttgcccctcatccttctgacacaataaaaaaaatacaggtacccacaaaacagtgcctgcaaaggagcaggggaagaacaaggcacccagtaagctcacttggctctacatatctggaaaggcactgaggttccaaggtctctaccccaccaggggacacccagtaaacatcacgctgagagtttaagttgcactcaactggagttgatttgcccttagaaaagtttccaacggtgaagaaataccacttggtaggaatatctctgggcaacttcattgctgactgggcaaactttgtaggataaggtgtcatgtgatgtaaggctggaccatgaaaaacaaaaatctactaatacacatttggcccctgcagtcccctggcattgagcaatagagcaactgtcctttctc

SEQ ID NO: 95018 - DNA, 18328 bp, Homo sapiens
  misc_feature (1)...(18328): n = A,T,C or G
ttacaggcactcatcaccacgcccagctaatttttctatttttagtagagacagggtttcaccatgttggccaagctggtctcgaactcctgacctcaggtgatccacccatcctggcctaccaaagtgctgggattacaggcgtgagccactgtgcccagccaaatttccagaaaagtttaaaacaaagtgtttcatttcattcctggagtgtctcacatgtacatgtaactcccaagaatttgatcacttttataaggtcaccgattttgcatcataagaaattgttaatctgatcatctcctataccctcgttgtcctaactgccacagttctgacttctctgaatgtttgatctcttttaatttctgatggtagaagaagaaaagttttttaaaagaagttttaatacctaacaaaactcttaaggaagtttgacttctatcttttctttagacaaagagcccgattcactgcaaactgtgaacatctctgtaatctccaagcctcagtgtcgcgatgcctataaaacctacaacatcacggaaaatatgctgtgtgtgggcattgtgccaggaaggaggcagccctgcaaggtaaaatactcttcatccattaattttcccattttcttccttctgtcttgccagaaagataatctgcttttttgttgttgttattattgttttcctggcaggaagtttctgctgccccggcaatctgcaatgggatgcttcaaggaatcctgtcttttgcggatggatgtgttttgagagcygatgttggcatctatgccaaaattttttactatataccctggattgaaaatgtaatccaaaataactgagctgtggcagttgtggaccatatgacacagcttgtccccatcgttcacctttagaattaaatataaattaactcctcacattgccccatgcatacctgtctcaattctgctaaacagagtgggtgcttgagcagttttacttgtacatatcttcactgtgattattcataacaacccttcttgccttctagataaggatggaaaacccaaaattcctcagataattgaagtttatgaagtgggaattatgttctctctaacgaattggtaactgacataaaataaaggccactccacagccatttggggtacaaaaccctttactacatgcaccaaattagacaatgtgtgattttggcacattactatgctgattgaaaaaaggaagtctaataaagagggatctatatagaagggcaaaggtgagaggggaggggagggcaaaggtgagagggaggtgttacacttagcttctccttgcccatgcaactctcaatgccatcgatggattctggtcattcatgttgcaggattctgagtgtttactggagacatgaggagttactataaaagttaactgaggtttatggcacagcagataaacgggaaatcaatgacagattttcctagtacatacttgccttttatataaagctagttgcccaggaactccactttctcactctatagtattttcctctcttccttccttctctcttcacttcaccctgcagtctgttaccccctgagagttttaattgatagttttaagtggagaggtgtttttttggccagttgactgagtatttaaaaaaacaaaaacaagaacagattttagagagttcagcctgtggctgctacaagtggactactggagtctttcagcccagctagggaagaagagaaccccctcaggaagcagaagttctagtaggaaaacttcatctatccagggctctaaaacccctaaatcagtaacgcctagcttgcagtattgagaagctaaattgggagtgcgaattattaagtgcaactgtgacagcttcatttgcacatattttattaactgaaattttagtttggagaggaaaatggtttggagaccatttttcagaggagcaccttagcctctaaagatgtctcccaacttgagctggtcctaagatttcaataggtcgtagtgatattgtataaggccagctgatcctaggtggtgaaacatggcaaggccactggattccataagcattagcactatctataagactccactagcactgtgaggtgacctccttggttggagaatacatcatttttgtgtggaatgcaataaggcattcagagaatccaaggaatgtgatgctaggacagtaacggtgacaggggaaagaaaatccaaattcagaatatgttattttgagtgaggacaaatagctactccctctggcctgagctgcaccatgttgcccatttctttcttactgtacatgtgctaacaaaaaagggaagatgaagcttctatggtggacatgcctggcccccaggtacaccttttcttttggtgtagctgcaggcatctccccatgcaagtttccagctttcttacctatgtttgcagctcaatatttcaggatgctctttgttagaaaaaaaaaaaaaaaatgaggccaggtgcggtggctcacgcctgtaatcccagcactttgggaggccgatgtgagtggatcacctaaggtaaggagtttgagaacagcctgatcaatatggtaaaaccccatctctactaaaagtacaaaaattagccacgcgtgatggtgggcaattgtaatcccagctactcgggaggctgagagaggagaatcgtttgaacccgggaggtggacgttgcagtgagttgagatcacaccactgcactccagcctgggcaacaagtaagactccatctcaaaaaaaaaaaaaaaaagattttaaaagtacttttgttctcatctacctttgtagagaggttttctgggttgggggattttttttctccttgaattatttctaataatatttatttatgaaatatatttaattatatttgattaattcatataattatataatattcaattattttacttaaacttaataatagatttagttatattttcccaacagctcatagtgttgccaccacccagtagtgggaccttgggtttcagcagcttcatccataggatggaaataataacaaaaattattatttttttattacattttagataatgtatacattatctaaatgtatttagggtcaatacattttagaatagagcttggcacagactaagctttcaataagagttgacttctatgattgcaatggtaaattttaaattcaattaaaatatgacaactggtagtaattttagtctttaattaccattcacttagtactcaactgagattaaaagcttaaattctcagaatttttttaattttaaaaattatttaaaaaaatttttatgcatacatagtaggtatatacatgtatggggtacatgagatgttttgatacaggcatggaatgtgaaataagcacatcaagcatttgggcaacatgatgaagccccgtctctacaaaaaatacaaaaattaactaggcatagtgatgcacacctataatcccagctattcaggaggctgaggcaggaaggtcgcctgagcctgggaggtcaaggctgcagtgagctgtgattatgccactgcaatccagcctaggtgacagagtgagaccttgtctcagaaaaaaaaaaaaaagcctttatactttgggttacaaacaatccaatcacattctttaagttcagtcataaaaaagaatgagatttacctatttttcaacattgataaggggcctcatttttcagaaagcttggaaaccaatcatctgggaaattcaacttaaaaggccctgtatccaccatctctccaaccgcagcattttacagagagcaagaaggaggcacagaggggtttagaaactgaacttcactatttcaagacctgggactgcactgccctcaggtcggtgaccctcttgtggtgtcttccctgtcacaggcacttgataaatgcagaagggaagcagggccagccccagccccatctccctagagagccycacacaggtgtagcaatggcctggcttcctggggtggaagccagataaggatccaggagaagagaccctctgagtctgcagtcactgctcccagctctttattgaggaccttgcctctgtgctgaggacagtgctctgtccagcaggacagattgcaggataagggatcctgggccygtctcaatttacaagactggctatcctgtctccctactgccccctcccttaatccttaagtgagattgggatcagaatgtctccacgcacctgttayctctctctctctggtgttactgctcctcaaggtcagtgcctcccaggctccgacctctcctcttctcttggctcagctctggtcctgggccaagataagcctcttgcttccagatggctgccgagctccctgccttctctgtcaggcctagagttaggggctgtggctgcccccttgaggcatttgttttctccctcaccacaccccaattactactcaagtgctcacagcagcagcaaacaaccttagctgggtcctcaccagctttgatgagctcagtagccaaaaaaaaaaaaaaaaaaagactatgcctgcaatgagaagctgtaagcagatcgtgccggcatctgtacatctactcctgagctgaattcctctgtggagaggtgaggcccagtctgtgtgggagaggccctcagggtccatgtcctctccattgtcaagtggagagccagcaaccaggggtcagatgaggtgacttctagctctaggtcagctgtgtcagtcaccagggggaaaatactgtggagttagagtcagactttggtttcttccctaagaagcagccaacaaatgtcactaaattcttccaccaggacaagccatgtggaaatgcatggcaggggtctggtacctgtagggtgtctgtgacctaaggaaattatggtcagggaccatgacccaccattgactcaacggggcatcaagcaccactcttgttaccctttggagctcccatttcatcatctagaaattaaggagatagaaatttttggaaaactaagtggctctaaagttcttttctattctggtgttctaatattctaaccttccttctgtgttgcttccattgtttgcataatactaatgtgctcaatcgggcaagctcagcctgccatgcagccattaarttaatttctctgaaaggtaattgatggccggaagggaaagcacaaagcatcccaaaggcaaactcatgtttatttctcatcttcttcccctcacctcctctctcttcctgctcctccctaggagtgtgcagaaaaccaaagctgcccgactcaaccatctgagaagctgatatccctcctctcagtgtccttctagggattagtagcaaagcctcctctagcagatggaaattgcagccttccctccggtccctgccagctacttccctccttcctgcactgcactgggaaattgaaagactaggtttacaagcagtcccacatccttgctagtaccgaagttctatacatagacaaaatgggaaatgcccacaaaaagtggggtgggggcatagtccagaggcagaatgtcctgtaaagacatccaggatagaagatggaagaggtgggcaggaagggagggggagaaaaagaaactaaactttcttgattctgcagggtccccactggcaggacgctggcatggggtcagggtggaaagtctaaatgattcaatcctaagaattttctgccaggcccctgcttcagagtgaaagcaaccttccctgtatcctctctgggcacctctcacctccagagttatgtaaggggcatcgctctgaacccggaggataatcagatcagaagtgccccagcctggccctcccccatggcatggtgcctggcccaggtaggacataaaactctgaagctctcgaatgttcatctgcaagggagatgctccaggtcccaggagccatggcccatgaccttctcttcaggctttttccacttttggccstgggagtccccttacaaagcaaccgccttggccccacatctcgcctgcgctattccaggttcctagatccttctaatgtcattttcctgcgttgggactttgaccttgaggctgaaatcatcagttttgagctccaggtccgtacagctggctgggtgggcttcggtgtcacaaatcgctacaccaacgtgggaagtgatctggttgttggaggagtcttgcctaatggcaatgtctatttctcggtaagtgtgagggtgacttgcttccaaggatgagggtctttgttgggttgaggatggtttctgtccagaaaggattcacattccccgaggatatctaaacacactcccagaatgccagctgaatgctggtgtgtccctccagaaatggtccattgtagagtttgaaatctatgtcttccagactgcaagtctctaagactgctgagagaatgaaaccattagattgtgagatagtcttgcaccacttacttgctaaagcccactaamtgcaggtcactrgggaaaattcaaagctgtctgagaaatagttacatgaagagccacatgagagaatgaatgtcatacatacttcagataatatgtgagacttcaagwattagggatgcaggaatattagactttatggacatgagatttgaaatgggagaagtaaagcaaggacaggtggtgaaactccattatccataaaagtgtgctctgccatgttcttcatgccatgctttgcccaaggagaaaaactacataataaagaacacctgggctctgctactstagtatcctaggggagctaaaggaacagctactgctccaaagcatgacatttgaagctcctagttcttacttcttgaccttcactggacccaaggatcagcacttggtggasgaagacactctgaaggaggatgggagccaggatgctgagctgctgsgsctgacggaagatgctgtctacaccaccatgcacttttccaggcccttccgctcctgcgaccctcatgacctggatattacggtaaaatagagagcagagaaaagcatttaatcacaagcaggttttccttctggagaggtagttgcccccagtcaggcagctagtcatcattcccaggacttctattcctctcagccttcccaggaaatgctccaattgtgccacctgctgaaatccacaagccttccgcagggtgacctcccactgattcacctcctgcccacctgccccagggttttccttttgaagaattctgcccagtttcgctgacctttagagtgttaggatataagagtttaattcagtcctttcattttacagatgtggacacaagcttagagagggcatgcgagagggagtgtgacttgctcaagatcaccagcaagtgagcctcggaggcagaaatagaacttaactmgttctcactcccagtgtgaagytccttccattccaccatgtagacatgagcaagtgccttgtgtaggtccttgggtgcagggatatgcagagtgctgctcaggggtggcagctcctcaatgcttatgkcaccccrcagagcaacaccgtgagggtgctggccrcctatggcctggatgacactctgaagctgtatcgggarcgtacttttgtcaagtccatctttctgctacaagtcgtccaccctgaygatctggatgtccctgaggacaccatcatccatgacttggagatcactaatgtaagacaccttcatcccacccagcagcctccagctcccttctcctcaccccactcaacccagatcccttctcttgcccccagtattcagtayatcccttgggtggagattactctgactcttctctgtctcctaaggactgccaatctgaccctaatgtgaacccccttccctggcctggcccttgccctactttttcagagcctcactgtcatctggctcagcttctgtgcacccttccacagttcctcattccagaggatgacaccacgtatgcctgcacctttcttcctctccctattgtgagcragaagcatcacatttacaaggtatggtggaccagatgggggacattgtcaaggcagggaagggtgctggagcagagcagggggtgtggtcaaccctggaggatgaggtctggaaaatttcttggaggaagcaagaaggaagtagttgcaagaacagggggacaggcagggcttggtagaggtcgcrgctacatcatttcctgagcccagaaatgtaactcccagcgctattttatttaagccccacaatgcaacagacatgttgatgaaggttaagaattaataattgtttgcaaagaacaaagtatgagcctcaacctggccccagaattgtgctctcttagcccaagaggaggtaaaggcagggagaggatatggccaggggctgtcaggaggttggagaagtctagctagaatgaactcaaacttggtaacccaatttcatatttgagtgatttcaattttgatcaaataaataaaggtatgatctcacaatatgtggcaaatgtggagactttytttctttagacagataatttgaaraggcatggctacatgctcagatacagtgaactgaggaggttactaagggaaggcagaatgtccctggctagatttcatgtctgctctccagaaggggcttaaaggagrggggagttgagaggagagtcaaactgastgggtgggaaaatggtagcttggggaacaaaaacagagaaaaagggagagagagaaacagagagaagasggaaatgggtatagttttgacaggaaggaagrtaatatggatttgatrtagaaggtcttgatcatgctctgctctccttttctgcccagtttgagcctaagttggtctaccacaatgagacaacggtgcatcacatcctggtgtacgcctgyggsaatgctagcgttctccccacaggcatcagcgactgctatggggccgaccctgccttctccctttgctcacaggtcatcgtgggctsggctgtcgggggcacagtgagtcccgtgatggggtaaacacatggctaagcgggtgcatgtggttgggtaatgagatcactgggctggtggaagaccaggggataggggaagtctgggatgacaattagaaaacaaggccaggagccctgaatccctatggctggttcccagcccttcttgctgccaaatctaactccttccaacagagctaccagtttccagatgacgtaggmgtctctattgggacccccttggaccytcagtggatcygactggagattcattacagcaattttaacaaccttcctggtgagcatccagaggatttaaggaagggaagctggtggggctggctgtttttttcggtattgggaacgcattgtgggatgtgtgctgactccctgtkgtcaaagccccaccccagctttcctgagcctctttctctccacattgtgacccactctcctgcctcctgtgattgactgttcctctctgcaccaggtgtgtatgattcctcggggattygcgtgtactacacttctcagctgygcaaatacgacacggatgtcctccagctgggcttcttcacgtttcccatccacttcatccccccgggcgctgagtccttcatgtcctatgggctgtgtaggacggagaagtttgaggaggtggagctgggaggcgcacccttcctgaggaggaaacacactctccttnycccccatcccagatctggtcagatccacaagcccacacagcctgaaccccagacttggagaataattacagcctggtrctcaggagattcactaacatgasttttgcaaggaagggaaggagtcagggctttgagaacaagggaagtgcagaaggaagaagggtcagaaaggttcaataagaattacagtggtaaatrtcagtcatcagaggaaagtgtcaaataccaagggggggaaatcaagcagcaggtcaagaacacagtccttaacaaatcgggtgcacctnttccctgttacagatgaatggagctcctatgcctgacatayaggtrtatggctacctgctrcacacccacttggctggacgggctctgcaagcagtgcaatacaggtgagggaagaccttgaagctctcccttctgcaggtgggaatgaattttaagaatagtgatttattctgtagcataygattatgtccggttgagaaaaaggaagaggtagaactatctttagagtagaaataactgaaataagactgtggaagatgaagtkttttgtttatttttatggataatctactcacagaatgaccccacccgcatgctacatctttattggcagacccctctgtatttcatcttctctttatttctgaattcccgacttctcttcctctaggaatggaacacaacttcgaaaaatctgtaaagacgattcctatgacttcaacctgcaggagactcgagrtttgccctctagagtggagatcaagccggtgagagtctgagggaggccaggcagagttgggggcagcagcatcatacctcattactgacaaccaagaaagttctcaagctgtaccastccctctgtgtcttactctcagccttcatgtttcactctgaacagggagatgaattgctggtagaatgtcactaccagacactggaccgtgactccatgacatttgtaagtgacctctcaccccaccatggtcaccatgaccatagccccagtggagagcccaytcatggctttggctacccagtgacccctgtgatttcactgaagccccttccttcctccaatggcatcacacatccacacggggcttttcatgttctcacaccccatgcatctaagatargaacagggatttctcacattatctgccaataacccaccaagaccatggaaatatagtatgctatagcgactaagagcagagattctggggcctcattgcctgggtttgaatatcagcacaatcatttagtacatttctaactttagacaagttatttgacttttttgtatctcagtttcccaattcacataagattaatactactttctacctcacaagattgttgtgggagttggttaacacatgcaaaacacctagatcattgcctgacttgtagtagattctcaattaaagttggctattgtttctatgatcacaagaaaatcccccgttttgtgcatcaggagtggttcagtgcttgtgggattcaaaaggtgttgcaggcaactgaggaaaaaataccgccctacaaatgattatatcacaagttagtaagtgatatataccatacaagaagaacgggaataacccactagggaaattcacaggaaagaatcatgagatcctactacagtgaactgaacatgtgacgtaggtgaatgagtccttctttagacacatagagatggggaattctggagaaggaaaaaactgagaaagccatatataaggagagcrtggggtgcacatgaagaagtttggttggcaaaagatatctaaaggaatggaatgaggatgaggtagataaagttggaaacagtccttgaagcaggggtgatcctgacccacctatatctccaggacagcagggctarctctataaatatttgccaggtaagtaaatggaatgaatgaatgggttggaatttattagatagaatcaaataattggtttagtgatgactgactattccagtgactggaagccactggaggtttcagaacaggcaaatggcaggatgcaagacaaattgtaaacaacttgtctggtagctctacagaggtcagattgcaattagaacagatgagtgactgacaatagttgagaggcagatagtctagcccaaatcaggatagtggcagtgaagctgaggacagggcagatatatgsaatgctttttggaataacatcaataattgtccaccaatgaaaatagagcagcaaatagggcagtgagctggctctaccttaagggaaaaggagaatggcatcactggtaagataaccacttcaactattttctgtttgctttgtcctcctgtctctgcatgcctttgtatctttgtctctccatctttgtctgtttcctccagggaggccccagcaccattaatgagatgtgcctcatcttcctcttctactatccccaaaataacatctccagctgcatggggtaccctgacattatctacgtggcccacgagctrggggaggaggcatcagagtragtcatcctgaaatacaggacctcgtgtgtgtggaagggaccttggggaggactgggggaggaagaaaggaagccctacccactacctcctttatttttctctctattgctggtctcagcatttagttatcagtaacatattcattgagcaccgtctatgtgcttgacatcaggtcaaaaacaggtgccactgaaataaataggaaatgagacatgcatttctcttcccttacagagctgcagttacatgcctacaagcccctcagcagccattctctccttgaggtcacactgtccccttctgagccttactccatgccacctaatgtttcctcttccagtcgcctcaagaaatggactacatttttgtcaacctgcagagaataatgcacttctatagttaaaaggtatgcattcatattacatacatattagacagacagtgcatatgaataccgctgggaaagtactttaaacattcccacaggcggtgggagcttgaattcgatgacttcaggatcctctccagatcatatgttctggatgcaagtttcctgactgcgttacatgctgcaaaagaaagataccccaacttcctctaagaacactctgtcacttgggcctctctgtcatctctcatccttcaggggtttctgaggtcagattctctcctagtgactatgagaatgtaactctttttcttcttcacctcctctactcacaacttcatattaaatgtggaggataaataaaagatgtattccttatttttacttttctctgtggttctatgaggacaagaggacccatgggctaatgtttactgtgactttggtctttagtggcttaagaatattttgatacaatttcaaattcataaagaagggcagtaattcttatatattctttacccaaatctaaccattgattacatttggctccatttctctctccttctctttctcttccttttctcttatttctcctcctccttctccttctcctctttctctcttcctccctccctctccataccttcatgagtcgaataatttagtttcttctccctgtttgctagggtttccatcagtatctaagtccctgctactacttagttagctgacaatgaacaggaaagctctcaactacactaacccagtggctgtcaatcttgacagcatattagtatcacctgatgatgagctaccacccaggcattcgtaggttattgaattctccaggcatttccaatatgctattaagactgaggacccctgaattagaagttcaaatgttcttcaccagtctacttcctggatggaacaggaatcacattctaacatcacacatttaagccacagcacaggcactgaccagtcaaaatggacatcagtggaaacaaatcctggaagccccctgatttcctgtagttagaattttagttgctagatcatgagaatatgtgggatctcagagaagtggcacgtttagaggcctcaggaagtggctattaccaaacatcactcaataaataaatagcaaagaaagacaagttcttcccaagcaaaataacaaaggcaaaaggaataaggagatacaaaatcactgtttagcaaatttgagagtaataattgattcaggcaggaatcatcaatggatgccacaactaacaaatgggatgctgcataacttcaaagtatcttctcacagtatatttattatttatgttgagacaaaatagtagctttagaaacctggaagacaccacctcaaccaagtaaccccacagaacatcagcgataatggacagatggacattgtgtggctcctgatagggagcactgagatgggctcaacatcgtgcctgtgttatttccctcaaaaatgcataacctcagtgcaatcacgaggacatattaggtaaccctcaagtatgagggatattctacaaataactgactagtaatcttcaaatatcaaaattatgaaagaaaaaaagaaaccaaggaatagttccagaatagaggggagtaaaaaacaagcaaaataaaacaatgaaacaattaaatgcgacatgcaattgtgctcgcagactaatttcttttgtgttgctgttgtttgtgcttcctatattggacattattggtgcaattggtgaaatgtgcctggtgtctgtgcattgtgtggtggtagtgtatgcatgttaatttcctggtttggatgatgatgttgtagttatgtgagaatacgttcttgtctttttaggaaatacatactaaagtatttttgtgataacgaaacacattgtatacaaactgtcaaatgtttgtgagatagagaggggggaaaggaggagagaaaaagagaaaagtgataaagtaaatatagtgaacaatttgtaatttacaggagataactgggaaaaatggataaagagaatactggaatttgttactatacttgcaacttttctccaagtttgagcttatttgaaaatgaaatattaattaaagcaaagaaaccagcacaggatctatataaaaacagtattaaaaatgtggaaatcagaaaaaatggaaacaagggagagaaagagtaacctggaaaaaaaattagaaaaatgttgtttctaaacaacacctgcacgttttcccaagcaagcattcctgaccaattttcactctgagcagagaacttcccatctccaagctatagtagagccctggacccttggactaatttcagctgtcaagctgtctggcataacgagtaataacatgcatggcttaaggctgcaaaatacatatataggattttatagacaactacttaaataaccacaagatggtagaattcaaataaatatatatattatatatattcttttttagctacatgtcatgagacagatgttttagaggaataaggagttttaatctggatgactggtaagaaaatagtagccattatctaaaaagcgaaacagtatcagagagatggtttaacatgaaaaattaaagcttataggtagacctctgggaagccagaatttatctcagtaccaacaaaaacgtttttaaaataagtaatgagcaaaaatttaatgggcaaccttttgaggatgtataaatcacatgctgatgagattggaaagatgtggtgtggacgaaactcttttatgggtggaaattttaaaccacatatgccctaaactctgttcctactctggtgtacttttatctgggcatatattggagaaaagtttctgttgcatcttataatacactctgtcctctatattaccaattttccctctgactaatcatctacttaaatcatccaataaaagactaaatttctctcaagctgaaattagaaatatgtgtcttcatacaggtcacaggaattgttgtaatcataaattataatctgccagaaagaaaaatataatgtctagtctaatctgaaattagaatagcttgtattactcttgtaatgatcacatggtaaaacatctagtattgggtgaaagtaatcccctggagatctttaagcatcttttcctcaaataaatcaaccctcaactggattgaaatcaccttttctgaggttttcctctgcctaatgtgatctagaaaaccctcaagccatgggaaatcactgcttactctccaaccagagtaccattcctatcttgctcactaccccatatactaaatcaccatccacaatataatcctctggggtaactcaccatcataaggccctcatcctcacactgctctgcacagccccagtctaaccccatcccacaccttctctcaaacccctccacaataaaagacctttagaaagcaacaaactctctgaaagtttctaccatctctttgtaagaagtggaggtagattgacatcctccctgctcccctctccaatttctctccttctctcaaacccgagctcctttgaaaagcttgtactaagaacacagctgcttgctgctgtcatccaatgtcctctgcaagtcacaccattcatcccttgatgactacaatcaactgtctcttcttccaccactcctcctgtgtctttttggaaatatcgatattcacagagtggttctgtccagcataccagcctctcagtttcttgaactcagtcttttattgtactaacttcccttctttcccaggccagattccatgggccagaactataactgcttccttacaaacactcttacctttattaactccctctctctttctgtcatatttgcatagtaatatctcaattctggccaaattttctacctacctttttttccttcagttgtacccatgtagctgactgttgcagaagaaacagcactcgtgcgtttgtgacaaactgtcttacaacacagcttttgatccttgtgtaagtaggtcccttgtcttttaatgtttctgctttccaggatggctgtttcaccttctttctcaagcttccaacaaccacctccctacatctctgattcacagctgatggcatcatcatgtgcttcatagaaagaataaatcattaagcaagtagttgttttatgaatctgggtgcttcaatgttgagtgtatatatactttagatagttaagtcttcttcttggccagtaatggtctttcctttctgtatttggcgcttccctaaggacctcttgtaaggcagtctggtggtaagtaatttccttagcatttgcttgtctgaaaaggaacttatttctcccttgcatacaaagcttagttttgctggatatgaaatccttggttggaatttcttttctttaagagttcttgactataggcccccagtatcttctggtttgtagagtttctgctgaaatgtctgctcttagcatgatgggtttcccttggtagattacctgtcacttctctgtagctgcctttaacattttttcttccatttcgacgttggagaatctgatgattatgtgtcttgggaattgttgtcttgtgtaatatctcacagaggttctccgcatttcctgaatttgaatgttggcctgtctagtgaggttggggaaattttcatggacaatattctcaatatgctttccaagttgcttgctttttctccttctcttccagggacaccagtgagtcatagatttcatattttatataatcccataattcttggaggatttgttcactcttctttattgtttttcctttttttctgactattttggagatccattcttcaagctctgagactctttcctcagcttggtcagttctgctgttagtacttgtgatggtattctgcaattctcaaagcgagtttttcagctctatcagatcagtttggttatttctttacatggccattttgtcttttatctcctatattgttttattggataccttagattccttggattgggtttcaacttcctcctggatattgatgttcttcattcctaatcatattctgaattctatttctgacatttcagccatttcagcctagcgaaaaaccattactgaggaactagtgcagttatttgcaggtaagaagacactctggctttttgagttgccagacgtcttgcactggttctttctcactgtgtgggctgatgtttcttcaatctttgaaggcactatactttggatgattttttgtttgtttacttgcttttattttctttgatgcccttgggggtttgactgtggtataaggtgggttcagttccctggggttgtttctggaagatttttgggtcccaagactcagcttagcactcctgagctgtgtgctctaaccctggggagctggttccaggaccccagctttcttctctggcccctcaaggctaggaacctactgtgctgagggggccgaggtattcctggtccactggccacaacactccgacgggttgtgctggcagccgtggcacagcacagcaggatgcatgcatgttggctggggcaggg

SEQ ID NO: 95019 - DNA, 73763 bp, Homo sapiens
  misc_feature (1)...(73763): n = A,T,C or G
tttttcctgccttttgtcctcgccattgcagtgtcttgatgggatgtctctctttggcaccctttgggatatgactctgaactctgccttctggctgcagtcccctcaactctggatggagctctattatttttgtgtgggggtgggggcttatctcctgagccagcctctgcttgtcagaacacactcttcctgcaagcatggtttccacgggcccctgctatggcagccacagcctcacatcgtgaagaacacactcttcctgcaagcacggtttccacgctcccctgctgtggcagccacagcctcacatcatgaggatgatacgcagccattcaagggataacctctaaggacagcctggcatgtctgaactcacttctcttcccactgccagttgagccttgccttctagctcagtcagcactgggagactaggctactcaatctggtggtcttttgtttccagctctccccaatatccctattgtgcattcctcatgccccatactctccttgacttcccctaattgaccccaacttgtgtcctacatccttcatctccccagacctgacctaatgattggagagaggaagcaggatgttgagcgagggaagctgaatttctcctgcactggagcctggctgcagaacctgaggaagtaggagggatgaagaagcaagaaagcttccagcaacctttagtcagcctcaagaagtctccggctaggaggcaatgctaaaccaggacaacctagagataccctggctggccagggcttcctaaaaaagacgtgttgctgggtggttgcgttgccttaagaacacacccattacccagtgaatctgccgtgagtcagagagacgcccctgaagacacattacctggaggagataagctccccagcctcccccacagccattccccagtctcttctcttcagcttcttcatttctcctccttccagtctggccactggctcaggccacagcggacaccctgttcacagcctgcatcaccctcctgagacagaaccttctccaagtgtttgcctttgggcaggtcccaaggtaccacctggagctgctggaaagggtagtcctgacagcaaccccctggtgatccggtccttgctagctcctcccccggcctccctgtaatgctgggtgcagagggatgcaccagggagctgcgtgtaagtggtgaacaggagagcgtctgggtgactgaacggggagaagggaggggaaaggatgggagaggctgaagcaaacatctttgaggaaaacgggtaatgacggagctggtagacaatggtgagagaaggaagggtgacactgaaagtagtcatgctcctttttatttaattgagatcttctttttctctttttgccaattaataatatgttttggtctgggggatgcttgggaaggccccattgttcaaaatatctctttcaggaacctggaacaccaccatttgagactcacttctttaggtcttgagggctttttggtctttgagatgcttttgtgtaaagttaatgcacctccagtgccctctgaacaaaggccggtgaacgtggactaagcttccctggccatccttgtctcctgcagcttaccctcctccccgccccaacctgaaggagtagctccctccccgttgagagctccatggctacgcctaatttacatcaccctccccaagctggaggagtagttccctccccatcccagagctccatggctttgcctaatttacatgaccctccccacgctggaggagtagttccttccccgtcccagagctccatggctatgcctcacttgcctcactgggcccaagctgtcctggaagggaggaagctgcggatgtgtctgttcccttccttgggctgtgagcacctggatggcagggactacagagaccccagggggtggagggggtgaaaagcaagtttcacatgtcctgtttggcctgagaccaggcccctacctgacttatgctccaggtcgcagacagaccaattccacagcagaggaatctatttcaacgttgtatcagactccagtctaggaagcagaccacactgagtgagtatatcagtcagagttccccaaagaaacagaaccagtctatatacagtggtgtgtgtgtgtgtgtgtgtgtgtgtgtgtgtgtgtgtagagagagacagaaagagagagtttagaaattgtctcatacgactgtagaggctttgtcagaggcatttgaaccacagcaactccatcttgaataggggctgggtaaaataaggccaagacctactgggctgcattcccagatggttaggcattctaagtcacaggatgagataggaggtcacaagatacacgtcataaagaccttgctgataaaacaggttgcagtaaaggagccggctaaatcccaccaaaatcaaaatggccatgagagtgacctctggtggtcctcactggtacactcccaccaccgccatgacagtttacaaatgtcatggcaannnnnnnnnnnnnnnnnnnnaacctggaacaccacccatttgagactcacttctttaggtcttgagggctttttggtctttgagatgcttttgtgtaaagttaatgcacctccagtgccctctgaacaaaggccggtgaacgtggactaagcttccctggccatccttgtctcctgcagcttaccctcctccccgccccaacctgaaggagtagctccctccccgttgagagctccatggctacgcctaatttacatcaccctccccacgctggaggagtagttccttccccgtcccagagctccatggctatgcctcacttgcctcactgggcccaagctgtcctggaagggaggaagctgcggatgtgtctgttcccttccttgggctgtgagcacctggatggcagggactacagagaccccagggggtggagggggtgaaaagcaagtttcacatgtcctgtttggcctgagaccaggcccctacctgacttatgctccaggtcgcagacagaccaattccacagcagaggaatctatttcaacgttgtatcagactccagtctaggaagcagaccacactgagtgagtatatcagtcagagttccccaaagaaacagaaccagtctatatacagtggtgtgtgtgcgcgtgtgtgtgtgtgtgtgtgtgtgtgtgtgtgtgtgtggagagagagagacagaaagagagagtttagaaattgtctcatacgactgtagaggctttgtcagaggcatttgaaccacagcaactccatcttgaataggggctgggtaaaataaggccaagacctactgggctgcattcccagatggttaggcattctaagtcacaggatgagataggaggtcacaagatacacgtcataaagaccttgctgataaaacaggttgcagtaaaggagccggctaaatcccaccaaaatcaaaatggccatgagagtgacctctggtggtcctcactgctacactcccaccaccgccatgacagtttacaaatgtcatggcaacatcaggaagttaccctaaattgtctaaaaaggggaggcatgaatagtccacccctagtttagcatatcatcaagaaatagccaaaaaaaaaaaaaaaaaaaaaaggcaaccagcagccctcagggctgttctgcctatggggtagccatttttaaaaatcatttactttcctaatgaactagctttcattttactctatggacttaccttgagttcttccttgcatgatatccaagaacctgctcctggggtctggattgggacccctttcctgtaacagcatggtaagtccaaaatctgtagagtaggctaagaccctggagactcagggaggagttacagtttgaatctgaaggcagtctgcttgcagaatttcttcctttcctggggaagtcagtctttttccattaaggcctttagctgattggaagaaatccacccagattatagaggtaactgctttactcaaattccatcagtcaaatctcattcaaaaaacaccttcacaaaaacaaccagaataatgttttgaggtaggatttttgttcttggtcactttgcaagctggaaacccccagctggcgatgtcctgtccagacctccctcagccaggctggcatgccccagcttgcctgtgttataggttgtacctgcattcaatggttcccgagctcttgtaccacaccaagaagaatgaggatatactggacattgaagggtgatgggggtggagaagaattttattgagtgacggaatggctatcagcggagaggggacatagggggtggccccccagccccacagtcgggtggttctcacctccccaagtggctgggtctggggctttttatgggctcagaataggggaggggcaggccataggtagtattggaaaaggcaacattcaactggttaaaaggcattattcagaaagaatcaatcaggaaagggtgggcaaacaggaacagaagttctaagtctgagtcgtgggtttcgtctgggaccagcagtccagcctttcagctctgtttttggctggaaggtggggtttcaccagggacccacccccacctgccaatgcatttggctgcatcccgtggctatcagtttgaccaaatatctgggtactgagccgccatgaggaaagcagctgccaaggactgagcccctcctctgcataataaaacctttacagaaaaagaatttacaattttcactcctgccaagttgacatgtaaaattaatcatcaccagtctgctccttgtcaatctgggacccacacatctctccttaaatcatacttcaccttcaagtaaagacaataacaagatcgtagttctgtctaacatgacacaactatccttgctacaactgcatcctactgcactaatccttttcccagaagaggatacaaagtccttaggtgtgtgaaaggaaaataaatcttggggccccaaaatcactaagctaaagggaaaaatcaagctgggaactgcttaaggcaaacctgcctcccattctattcaaagtcacccctctgctcactgagataaatgcatattctgctggcccctttggagaagctaatcagcaactcaaaagaatgcaaccatttgtctcttatctacctatgacctggaagccccctccctgcttcaagttattctgcctttccggasggaaccaatgttcatcttacatatgttgattgatgtttcatgtctccctaaaatgtataaaagcaagctgtgctccaaccaccttgggcacacgtcgtcaggatttcctgaggctgtatcacaggagtgcgtccttagctttggtaaaataaacttcctaaattgattgagacttgtctcattttgagggttcacaggtgatatttacttatttgagatcctgtaacttaaacactatgatgtaaagttagcaatattaaattctatgagataaagtaatgcatcttatgttacacgataaatgaatacgaaagggaagaaaacaaaggtgctatacgcacactaacatattcataacaaaataaggaagaaacactcatgacaattacagttctggtttttatacctggtcatgtagttgtggctggtattgataactatcttatttcactactcattccatattccctttgccctcagcaagcacctgagtggccatggatcgttgcctggtgaggtgaccagaaccctcgttcctaaagggtctggggtcattagtagttctgcctggattgggttgttgtaattttccactgactttaatcacagggcatgggaatactgagagacgtcctatggtatctcctgtatttcagacatactcttccttacctccactgtgacattcaaggggtatggctttggccccaccttcttgaatctgccttcagattcaaactgtaactcctccctgagtctccagcctcttcttggaaatggccctatctaaaaaccacttggccattttgaaatctttctcaggtcctgattctgggttatgctcagggcagtctctgaagatttctcatcctgttcaggccggttccttgctaatttatgcccacacatacctggcagggagagctaaagatggagttggtgggagctgccctttggcatcattgatttttaatgtattcctaagcagcagcatctgtccttgatcctctgcttgtcagaaggccaaactcacagacattttaagcttaaaacaaacagttacaaagctgttgaactttgcctgtgcaaggacaaacacaaaaacatcccaaggcccaccccccgcygacccccactgtacttgtcacacatatgtgagaatttccattctcagctaaaggcaagcattgaaagaatacacagaaagcctggaaaaggtttccaggggtgtcaatacgccctgtcaactgagaattaagaggatccggctggtcacttgcctggagaggatcctgcatgctgatagtgctgaggcacctgccagctaaggtgagagacagctgaacttgaacatgtgggctgtcactgaragcggtcagcagaagaaaatttgagccatgggtaaggcctggtagaaagggaggaggttggggaggcgtgaataggcctttggaaagaggtgmtgttaacccaaaacagagaggcagcagctttgcaattagattttctttttgaaatagcaggctctgtccctggtagcaatagggataaataaaaagtaatatgtattcattgggaaaataattggaaaaagaattaggcaaaataagcatgtggttttgtatcttgttttttaaaacagcttgttgtaatacattagatattctttgaaaaaaatagaatttgaagttcagaaaatcaaatcagttttagggattgagaatctcactacatattttgtctttcaaaattgtttgtttatttatttatttagaaatggggtcttgctatgttgtccgggctggagtgtagtggtacaatcatacctcactgcagcctcaaactcgtgggctcaagggatcctcctgtctcagtctcctgagtagctgggactatagtcaggcacacctcaccttgttcccagaccaaactgagggtcgggctgcttattcttgcggcccagtaatgagatgcagatgaactgggaaagaagggagtttattgctgtaactgggtacagggaggtctggaaaatatcaccagaacaattcaaaattacaaagttttccagagcttatataccttctaagctatatgtctatgtgtacgtgtgcattcatctaaagacataagtaagtgattaacttcttctaatctataactaagatctgagtcctgaaggccttcctttggagccttcgtaaattcatttaatctaaatgggtgaaggtgctggggtgattacccttatcttgtgtcctgctaaatcacagggttttggggagttcctttagtccccagtaaagcttgtttgtgaaggtctggggagttccttaagatccacaataaaacttgtttaatcctaaatgggtcctgttaagaattccttcattattttgtcatgctttaaggcccaggaaaggcctaggcaaaactcttggtgggcttttgttacattcaagsctttgtatagggcactgatgctatcagcttttaatatttaacctaaccactcagtcagtgctgaaacagttgttatggaggcctacctgttcagccattatggagacctggcctgccacaaccttgcctggctaacttttaaatttttgtagaaacaaggtcttgctgtttgcctaggctggtcttgaactcctagggtcaagtgatcctcccatcttgttctcccaaagtgttgagattayaggcatgaactactatgcttggccatctttcaaagtttatatgtgtattcatccatttccttattgctgataaaggcatacccaagaatgrgtaatttataaagaaaaagaggtttaatggactcacagttccacatggctggagaggcctcacaattatggcagaaggcaaaaggcacatcttacatggtggcaggcaagagagagaacgaaagccaagtgaaaggggtttccccttgtaaaaccattagatctcatgagacttattcactagcatgtgaaaactacggggggaaccacctcaacaattcaattatctcccactgggtcccttccacaacacatgggaattatggtagctataattcaagatgagatttgggtggggacagagtcaaaccatatcattccactcctggccccttccaaatctcatgtcttcacatttcaaaaccaatcatgccttcccaacagtttcccaaagtcttcactcatttcagcattaactcaaaagtccacagtccaaagtcttacccgagataaggcaagtctcttccacttatgagcctaaaaaacaaaaagcaagttagttacttcctagatacaatggaggtacaggcattggataaatatacccattccaaatgggagaaatgggtcaaaacgaaggggccaaaggttccatgaaagtccraaatccagcagggcagccaaatcttaaagctcctttgactccatgtctcacatccaggtcatgctgatgcaagaggtgggttcccatggtcttgggcagctctgcccctgtggctttgcagggtacaccctccctcctggctgctatcatgggctggcattgagtgtctgtgacttttccaggcacatggtgcaagctgtcagtggacctaccattctgggggctggaggacggtggccctcctctcacagccgcactaggcagtaacctagtggggactttgtgtggaggcttcaaccccacatttcccttcttcactgccctagcagaggttctctgtgagggtcccagccctgcaataaaattctgcctggacctccagttatttccatacctcctctgaaatctaggtggaggttcccaatcctcaattcttgacttctgtgcacccacaggctcaacaccacatggaagctgccaagtcttagagtttgcaccctctgaagccgcagcctgaggtgtaccttggcaccttttagccatggctagagcagctgggacgtagggtgccaagtccctaagatgcacacagcagggggcccctgggcccaggccacgcaaacattttctccttctaggcctayaggcctgtgatgggagggggctgccacaaaggtctttgacataccctggagacattttctctatcatcttggcaatctggctcttcattacttatgcaaatttctgmagccagcttgaatttctcctcagaaaatgygtttttcttttgtattgcgtcaggctgcaaattttccaaacttttatkttctgtttcccttttaaaactgaatgcttttaacagcacccaagtcacactttgaatgctttgctacttagaaatttcttctgccagatatcctaaaccatctcactcaagttcaaagttccacaaatctctagggcaggggcaaaatgctgccagtctctttgctaaaacataacaagagtcacctttactccagttcccaagtgcctcatctccatctaagaccacctcarcctggatttcattgtccatatcattgtcagaattttggccaaagccatttaacaagtctctaggaagttccaaactttttcacatttttcctgtcttcttctgagccctccaaactgttctaacctctgcctgttacccagttccaaagttgcttccacattttcaggtaccctgacagcagtgccccactctaccagtaccaatttactgtattagtctgttttcttgctgctgataaaggcatacccaagactgagtaatttataaagaaaaagaggtttaayggactcacagttccacatggctggggagkcctcacaatcatggcagaaggcaaaaggcacgtcttacatggtggcagacaagagagaggatgaaagccaagcaaaaggggtttccccttgtaaaaccatcagtttttattcactaccaagagagaagtatgggagaaacttattcactaccacgagaaaagtatgggggaaactaccctcatgattcaattttcccccaccaggtccctcccacaacacatgggaattatgggagctacagttcaagatgatatttgggtagggacacagccaaaacatatcaatataatcaaccagaacctataacttttcctcattgaagacatcagaaattgccayctgtattgtactaattgaatgaaatttctgtgtaacaaagccattccagcttctgttggattatccacatgaatgatgcccagctgattataaaaaattctgtactccatgctgagttcctgtaactctagaaaaaggaaaaaaaaaactgtactccaaatagcyacagaaactgggattttaaaaatccctttcttcaaagaaagaacctcagaacaattggtggtgtgcttaacccaaagcatttggagtaggacagacttgggtgggatctgtctttgccacttcctggttgtattgttgtgggmaagttatttgaacctgctaactgtcaatgtgttcagttgcaaatgggaataatcttaggctacttttagaattgttgcaaaagtaagtgaaataatgcatagagggcacttgtcacagtggctggtacatagaaatgaaccatttattgctaaattgtagtattattgcaaacagggagcctgcattgatttatgattccactctaagaatatagcacaatcagtgagatattataaggactcaatcagtgcaaactgaatgaatgaataaattgcatgggttgctgtagcttagggcaggatgggcagaggtgtttttttttttaatcaaatatcctcatattgttccctcttccaagatcctagttacctcaaaagaacattgcttaaatttacagacaacccatacccatgcacaaaatgcttgtgcttaaacaaacactcaattaatgaatacgtaagagttaagtgatagaaagtgggtggggatgcctgatactctccatctttttcccttgaggtcaagcacttgttttacttgctcattcactgcaaggaaaaggcagctcctccagttctcattcatccacagatttcagcattacagtcacgttaagatcagctgtcaaaggctcttttcaacacactagattctgagcaccacagcttcgttttagaagcagcatagaataatatactgggcttctttcctttgctgtcaattccagaaaaagctactcaatacctataaaattctacagattaagggtatgatttccagccaaaaaaaaaaamcccacaaaactttaataaaattcaattgcatcaaaacaaacagaagactgtggggtttggggcagtagacagtgtttttattccctatcrcccagcagaactcagcaaagcaggctgcacgctggctctgtgaggacttggaggtggctgcctaagggcaggatttaacctgcactgtcctgaattaacactgagcacttaatactgagggcagagaagaccaggggcattcagaccccgggcagggccagatccagcaagggaggggctgggaatgattaaattcagctggtattggaggagagtgtgagctagcaggcaaacagacaggagagaacaccatgatctctcaggtcaggggcctcttttagggtacttcattctgactgagaatctttcaggatactacctcttctacaaagcctatcctgaacccttattagaactctgatgacatttatttgtccctcttttagaagacttacaggacttctaatgattcatttagcttacatacatgcttcatttccctccatraacccccaaaatctcaggtgcctcatttccctccatgaacccccaaaatctcagacaggtctctcagttaattcagaaagtttattttgcgaaggttgaggatgtgcacctgtaacactgcctcaagcggtcctgacgacatrtgcccaaggtggtcagagcacagcttggttttatacattttagagagacatgagaagcaatcaacatatgtaaaatgaacattggtttggcccagaaaggtaggacaactggaggcaaaagcaggacagggagggggcttccaggtcacgggtagatgagagacaaacaattgcactcttttgagtttctgattagcctttccaaaggaggcaattagatatgcatttttstcagtgagcagagggatgactttgaacagaacgggaggcaggttggccctaagcagttcccagcttgactcttcccttagcttagtgattttgggaccccaagatttatcttcctttcacgtttccctccttttctttttaaaatcttttggagaaagcattttaggagaaaatgagtccctcgtcccaggtttcatctggtgtctcatggctaggatggtttattcctagataggtaggtcccaagttattaggaaagctcatatttagaaggttgtgaagtctcatgtcctttgaagagaaaacagggggaagaaggtagaaaaacaacaacaaacaaaagaacaatcctggaaaatcgatataggccacattactctgaagtttatacatcagtaggtaggtatgaaagtggctaatgtatgtaaataaggttgctattattttcttctgaaggttgtctagcttcagtttgtggggctttatgaaagcacagctcagttttcagtgactccaaattaggaaaaatgggaaaagaagaagaaaaaaattgaaaacaaagtaacaaaaattactttgaagacttggagccaagaaaaattagaattcagttcaaactttaaaaaataataaaaatcaagaaacgttaggcaagactagaatctaacaactgctgtactatagttttgaatcataatgtttctctcttcagtttcccgtttgtactaaagaaaaatcatggtaggactggtttgctttactatacttggcctaattatttgtatacaatgcagccagagtaattatttttttacataggcttttaaattggytttgatggaactttgttccatagaaggaatctcagataagacatttttttaaagctgagcccagctatggatttgtgccatcaggtacctatgagttgagtgatcctttcctcttgaggttccaagataaacttggggctcctgggcctgtcagaaagtgacattctttacttatgacacatcaggaaccctttacaatggctgtgtagacaaaggtatcacagcagtttatccaatgggcttttattgcctccataagtcaaktttgaatccttaaaggaaagcacaccattccagtcaaaactttagtaaaataaccagtttctccaattgtgtcctgttacaaatgaaaacagattcttattgcacttatgcaaataactgtattgtcataagaatactcacacatagttcccaaattttggagaaatcaggtwgacagaaacaaatatggtctaaattttgttcatagaagtatacttcactcaattgttaaaagctgtaaatagcttaaaagacgttttcttgtatctgaaaaacaaaacaaaggatcagcaacattttaagcaaaaagtttaaaagattactttagtcttttattagwtcagctcacgcagttagcttttgttctgacattcatgaacatttcagttctccatgagagtcctgaaagtttttttctctattctaatgttccaatctccaaagttatcagaaacttgcatctaggaacacctgttagagttctatagttgattataaaaccactttctaaggaggaccaaaacaagacaattgtttgtggatgacaaaaggttttaaggcagccacagtcaaagacacaactgacaaagaaacttatctctgtggcagcaacaatttaacataacaattataattattactgataatgtacattaagtcatatcaaaattataggagtttcccatgattttggaacacataccaataacatatttatataaatacagcccaaagaaagccaaacaccatttcatatttgacaaagtttcctgtatgatttttataccaaataagccaaattatgtcattttggacttcaggaaacctaatatcttaaaggattaattcaagcagaaaaagacataatttataatttgattttggaaaggttatcaaatatcaaaggtttagaacacttgatatcacaggttattgtaaaataagtcattcatttgaccaaagtgataactcaaggatttaaaaaaaaggcaaaaaccttctctttgagaaaagagagctaattttccaaacaataagccctagtaacaacagcaggaagctggctgggtgcggcggctcatggctgtaatcccagcactttgggaggccaaggcaggtgggtcacccgaggttgggagtttgagaccagcctgaccaacatggagaaaccctgtgtatactaaaaatacaaaattagccaggcgtggtggcacatgcctgtaatctcagctactagggaggctgaggcaggagaatcgcttgaacctyggaggtggaggttgcagtgagcggagattgcaccattgcaccctagcctgggcaacaagagcgaaactctatctcaaaaacaaaacaaaacaaaaaacaaaacacagcaggaagccaattaaatttgttctctaaaattttataaacaatctataaaattttaatcttgaccataagctataacttccataagcctttcataacctttataacctttacttaggagttggttaatatttcataaaaacmttgttaatttgacatgggctcatatgctggtcttgcatcagtgtgcctttracattaatgattaatttatagagaaactgaacttattttatctctcaacattggctcttacaatctcacatgcccctttcctgagaaagttgaatracttgaatttttggccctgtgtttcaggaatgcagtttattttgattggcattttctaccgagactaaagatgggattttaattgctgtcagtrtttaaactttagcaggacttggtatcttttttacacccaggagtcaaagccctgtaactaaatgtcacaagtactttaaaacctcatacagagagacatatgggtgtaataaccttaacttaaaaaaaaaatttaatctcagttttttccctaagcaaaccaaaacttaataataatatgacaacttgatcatataggtttttttaaaataaatcctcttattgtgacttacacagactgttcatgacatgcttggactttctggtttgtcctgaacatccctctttcttaagcaaccagtcattttactctaggactaaatttaccatacaagattctttcttatatgaaattatttatctttaagctttcttaccaaaaaaaacctctttatttttataactgtytttttttttttttttttttagatgaagtctggctgtcacccaggctagagtgcagtggcaagatctcagctcactgcaacctccgcttcctgggttcaagcaattctcctgcctcagctttccaagtagctgtgattacagtagcctaccaccacgcctggctaatttttgtatttttagtagagatgggattttaccatgttgaccaggctggtctcaaactcctgacctcaagtgatctgcctgcctcagcctcccaaagtgctgggattacaagtgtgagccactgctcccagccataactttctttacatctcttttattttcctggttccttttatattgttttaaacatgacctttaaataagctttgaattagacaaaaactattcatctttttaaaaatgacacactttttaaaaagaatgttttcttacaaatatatttttattggaaaatacccatataatgaaatatctattacttaatttaatataactttagattctaaattatgagtttgtctacaagtattacattcacctaattattttaattgttttagatgatttatgaaaactgtgatagtcatcatttaaagttatggaaccatcattgcaaaattataacagagacgtgaaaaagatttgcctaactgactccatcttgcttttaacctccaaactctccttgttcattcttcttttctctcctaggaaattgttgtttaaggatcctaattctagttcagagatgcattctaaagggtcttctttttcttcttgtcagctaatagtcttaaatttgcatattaaaggaaacaactcacrtaaaagtcagacagcaaaatttacctcgtaaggtacaaagtgaaagtctggtgagctggagggaaattaaaatgaatttaattaacaattggacataaaattatagacatctatcataaaggccttcaaatacatacatgtgtacatgtacatacacacatacacacatacagattctataacttttactccagtactttagccatgagataaatacaaatttgccagcttgcaagaaaaacccaaaaaactattagacccaaacagtggttttatctcagtggaaaaataacagcagacttaaagcatggcagaaaggaaaatagagaaaaacggactagraactctagaatttgcaggttgaccttagggctctttttcctyaatgtaaatttgcacaaagactgtattacttccattttactctggcaaatagaggtgccataaaaccaataaggtgctctaaagggggtcattctccttgttttctcctcattctcagattgtttcctgcttctttttttttttcttaaaaggaagaattgagctgtggcctagggtttttgtgcatggatcgatgtgagctgcttgtgggcaggactccacagtgtgtcatcactgagttgtttccagcctcttatgcatctcagcttctctctccagaggtctatgwcctctgagagggctcaaaatgccaggtgatcagcccttatatgcatttcctggatgacccatttttaaaattaaatttttctggggatttccctgcagggccactgcatgttgcagggggtcaactccccagacgctcccacgaggcccctggtcacccagggaygcctttcgctggaaagagcaaatgtcctttctctttggagctcagaaaaytcagtttctcatttgcctatgaaaacaacagttcagttcctcagamaaatgcacacagacaaacacaattgagattaattatgggagaaaaagcaatagataagaccctttagaatgcatctcygaactagaattaggatccttaaacaacaatttcctaggagagaagagaaaagaaaagaaaccagccaagaccacttcctgtaaactgtgctcagccacccgtaactttgtagttctcgtctgccattacatgctccaaggtcaaatcctctcacagtgcaaggtcatctctggttcccccaaagccaaagaggtcaggtcatgcaatacaggaaaacagagctttagatgtaagaagaatccgcccacgactcttgaaacttcacagagaaaacacaacactccaaaaggggtgagtggcccctttgttctgaattctttaaaggggttcaagtcattagaagccttctctagatttttttggtactgcagatggcaaagggggaaggaggtatagggtagaagaaaagtaaatgaaataaatatwttttttttaagacaggaagcaaacacagaaagcaagtgcatgtttttgttgttgttgttgttgttttgtttgtttgttttagctgtgagaaattttggccagattagaaaggctttgttacccgtaatttggaattctcactcagattggaccaagtctggaagagtaggtcaaatctgatgggaaagcaaccagaacaaacaacaacaacaacaaaaccccaacaatatgatcactgagcactctaatggtaaaggagaaattcagaccagctggttgttaaactttagccaagacaaaaacccaactcagctacttacctagggatgggtctcaggctgaagactgctttttgtcatcctaaaagcaggaaaaaactcgaattcatcttccctgctgggagtgagctcaagctccctgaaggagttgtctgccttctatcgtcatggaaagaggaaatcttgccttccttgttggaagcaaataaaactccaaaaaaaaggtgggggggagttgtacagaaaaataaactctagatcttgaccaaatttggggagatcaaggattctctggagggtgtgctcccagacctcagcaaattgtcctattggtttgagccgtaaggttagctcatgctgctaccaaggaccagtagatctgtcaaaggtcaggggcatctccactcagaatccctccatggttaccaaaatgtgaacccccccaaatctgagacaagtctcagttaatttagaaagtttacttttccaagattgaagatgcacacctgtgacacagcctcaggaggtcctgatgacatgtgccaaggtggtcatacgttttagggagacatgagacatcaatcaacatatgtaagatgaacattgatttggcccagaaaggtggacaacttgaagcaaaagtgggacagggaggtgggttccaggtcacaagtaggtgagagacaaatggttacattcttttgagtttctgattagcctttccaaagaaggcaatcagatacacatttatctcagtgagcagggggatractgaatagaatgggaggctgggttgccctaagctgttcccagcttgactttccctttagcttagtgatgtgggggccccaagatattttcctttcacacctgtttgaaatgcttgttccttggtgcagtaaagaaatagcacttgaacattgatttcctcagcaaggccatttttatactttctacagaaagggtacactcaccagcagttttgccgtgagcatacacagaacaaagcagacggggtcatttataacctgacacatccgccctactgctgtgtctggtttccattggctggaacaggacctcacattctgtatttgtcctgattggctagtaacttagaactttttaaaagaggcaaaggcagaggagaacaaaggaaggagaaagtaacttgtggaatgctgagaaaggtaaaaacaccttcaaataaggaagaggaacaggctatgacctaatgcttgcttggaccagtataagcacaccacggcaaatatttaggctaaattgtgggagctaagaacatatgatttctttattaaggctagcagattttaagaatgttagcacaggtctttgaataaattttgcttctaagagaagttactatttattcctaattagaggggaggaaagtctttgaagactyacctctactttacttttcacacctccttgaaggcagggactaaggactgtttccctcccaaaactaacgtgctaatttgcaaacagtacctccctgggttgaggagagtgtgctgagtgctgaataccctggcctgaggccttgtacctgaacagagaggaggtggttttacagtagggggagggagagagaatcttggtgcatgcagtgttgggagtgacctgatttccacagactgtctgtgttcaacctcacagccgaatgtttctccagttccaaagtcaacaaccagaacggtagaaggwggggaaaggttgaaggtggggctgagaatggctttgtctgaccccttaacccagtcccaactcctcagttggccctttctcctgggagtctcttgctactatctgtgtcagagttcactcgtgatgccctaaggggcagggcctttgggaaataaaggagaaaaagcacaaaccaaacaaataaattcttccttagcagggttgggaaagataagctgagatgtctcttttgggttaaccattggcttaatctgggttcccccaaatagcagagcctgagcaaggacttgtgtataggtagtttatttggggaatgaatctgttttgtatggttaaaataaggagaagatcaaagtatgagttcatgaatcacacagtttattgccatacaaagaggtctttctttttcacaattcttaaaaagggggagaataatgagaacaaatctcacaggggatacactcaacagacaaggtacattaatcacataatgaatgagttccaatttcatttagagtccaattattaaagttcagttgaagctgagcatggtggctcatgcctgtaatcccagcactttgggaggctgaggtgggcrgatcatctgaggtcaggagttcaagaccaccctggccaacatggtgaaaccccatctctactaaaaatacaaaaattagctgggcgtggtggcgggcacctgtcccagctacttgggaggctaaggcaggagaatcgcttgaaccctggaggcggaggttgcagtgagccgagatcgcaccattgcactccagcctgggtaacaagagtgagattccatctcaaaaaaaaaaaaaaaaaagttcaattgcccacttaggatggaaagcaggcttttgtggatgcaaagtccaatcagagtttgaggcactactttctaggagaggttctcgggagggacagcttgactaatacaatggagatccatgaagatacgtgaggtctcttgctgctagagagcggtgccagygttgtgagacaaggcttcaaaaacagcttcaaggcttccagagagtggcctcgccacatcctaagctctccaagcgtctgtcaaaatcctgggtttctatgtgtttggagtccagtggttgaggtcagtagctcccatgcggggtctgataaggtgtgacatgacattcccttggctagggagagttccctgcatgttctaatcacagtaaaacaatatcactctcacagaaaagtgaaagtgttcggaatcatttaaagctacataacaaaatcccaaggaattggaggggagggctgggaagagtcaaatagggaaggagggaaagagaatggcatccaagggtgtattcgtgagttgatcaagtcggtcactactatgggcaaacagaatgctatcattttaggagctgcatagaacatatctcagaattgcccactggaagactggaagagcagagtatttttcctgcagttcctgcctgccctttggtcaaagtttgtcctttgaggtgttcctttgcacttccaggtttactcatgtgtcagagtggacagcggattcctgcaagggtcccaggttgcagtgccagagacgcagaataccaggtgcagctgaggcaaggtgctctcaggttacacctgttcatacctggttgtcacagcaaagctgggctgggaagatgtaaggccagatgtgtaatacaacctcagaaaggtcaaatgtccttttctgtcttatgcaaataggactacaattcagtttaattctcagagtcaggatctatgttttttcccttggggtaaagaagaattcttcctttaactacttttctagcaaagcataatcctcaaggcgtaattttagtatagtgatttatttttaaccctgtggtactatatgcctaatgttctgaaacaccgtcactggagcaaatccaggcttgagtctatctgtgaaacgggaacagaaaactaagtgcatcctcccttcctgattctcccagtcttcaaggctgtatgtgccaggagctggggataaaggagatagccttagctctccagaagctcacagaatggacagacagagccaacagttttatttgtttgtttgttttttgagacagtctcccactgttgcccaggctggaatgcagtggcaccatctcagctcactgcaacctctgcctcccaggcttaagcaattcttctgcctcagcctcccacctagctgggattacaagcatccactacgaagggcagggtttcaccacattggccaggctggtctcaaactcctggcctaaagtgatccacccgcctcagcctcctacagtgctgggattataggcrtgagccaccgcacccggtctacagttttctttaaatcttcatcatgccagtacttccctcctcctgttttcatcttcctgtatttgcaagtttcattcattctcttcattctattcattccttctctgtactttacctaaacatagttgtgaacccccaaaatctgagccagatcaatttaggaagtttattttcccaaagttaagaatgcacgcaagtgaaatggcctcaggaagtcctgacatgtgcctaaggtggttgggacacagctcggttttatacattttagggagacatgagacatcaatcaacatatgtaagatgaacattggctcagtctggaaaggtgggacaactcgaagcaaggagggagcccccaggttataggtagatgagagacaaatggtcgcattctttcgagtttctgatgagcctctccaaagggggaatcagatatgcatttatctcagtgagcagggggtgattttgagtagaatgggggcaggttggccctaagccgttcccagcttgactttcccctttagcctagtgatttgggggccccaaggtttattttcctttcgcgtagcttcgccactaatgtgtcctggtgtcttctctcctcagcctgtttctcatcctggaaactgaggtgtgctggcgcagggcgatagcgcagtggggtggggttgggaggaaacccttatctgtggccgatggccctccgttgttctattattaaaactctgggaaactgctattcttaatttatttttaaagaccctgagaagcaaatctttaatttttttgtttttgtgagacggagcactctgtcgcccaggctagagtgcaatggtgcaatctcggctcactggaacctccgcctcctgggttcaagcgattctcctgcctcagcctcccgagtagctgggattacaggcgtgcgccaccgcgccctgctaacttttgtatttttagtagagactggttttcaccatgttggccaggctggtctcgaactcctgaccccaagtgatccacctgcctcagcctcccaaagtgctggaattacaggcgtgagccaccgcccccggcctttaaataaattcatctgatcaaaagaaatttaaaaaccaaccaaccctaatgagctctaaagacagcaacacgcacaggacctggaaagagcctcttcctcaccggagttttcctcacttcaaggagcggcgccttcaccctccggcctcagcccgcgaggctgcaaccctttccgcacctggctccatctccctggccctcgcccccgcccagcggtcggggagcgagaaggcggcgggggatctggcgcccggcttaggggcgagacggccgcaccgggagcctagcgatcagggcaccttgggcgggaggagcgccagccgggcacccagcgcggaggaggcggctcggcggccccccgacagccacgccgccgtgagccccgcccagcgtagccccagcgcgcgcttcgcgtgtagaagcgtccgggtggcggaggccgcaggccgcaggagtgctggtggaggggcttccagaaagaccctgcggcagcgccccccctcggctctccccgcaggagagcgggcacctgcgcggcgccgggtgaaggcgagagcctcggcgagccctctgcagcggagccccctgcccatttggttttgggtaagaggaggggtccgcgtctctgcagctcgggcgggattccctggcgccctctactcggtttggttcggcctcacgtgttcctttagctccgaagccgggatacgggtggggaaggggggctcgcgccctacaggccgagccctgcggccgcrgcggggtaagggtaggatggccgatcgcgcccagaccccagggagtctccctctcggcttttctgccggcgtctccagcagcatgatctggcatttattattcggaataatgtgccaggcaggaggaggccctgggttaaacacgcggccctgcagctcccaggtgaaacgactcatcgtttcctgccggcgcatcttactgaaggggacccaggccccacgaagggaaggaaccgtcctcaaggtcacgtcgtagtcaaaggccgagcccagaccgaagccaggtgtcctgccttctagccccgggctctaggccctgtccccttcccgaccgaatctcccagtcccgtccgcgtccctcctcctcctcctcctccggggtcctccgcaaggctctgttcccggggtttggggagtcctccctccgcgccacagcgccctggggaagaatgctggacagcaggcaggccacagggccggggaaggaggaggagccgcggggacaggctggggatgccagagtggtggtgggcccgggactggccagggtgggagtccaggcggcgcacccgcgcgaggacaagggggctttggctgggcggtgctgtctcaaccaatgggaagcgtggctctggccgagccyccctctctccccgccctccggccggccgttggggagcgctgctctgggattggctgcgccgccgtctcgggcgttctcgcgctctgcttacgtgctgacgcgcgcctgatagataccctgtgggtttgagcgctccggtcggtccctagcggcccaggcgccttgggcgtgcgtcctgcgcgcggccgcctccaggctgcgcccttctggggaagtgtttggtgctgcgcgcggcgtcgaactccgcgttttttttttttcttttccagccagtcagcctggaaatctgcctgtagtcagctgatgcagagtcaccctgcagttcctactttgaggggttgcagaagcacatatttcactatggagggccgcctgcaggcctcgcgctgacaggatcttttgtgacgctgcaaatgtcctggtcagtgtccttctttctacaagaggcgttggagccgggctctgcatagggcgtatatatccctggccgccaaggaagctgacccttgaaatttktgaagctttcatattcactcaatacacatttacagagcctctacttcctgtcaggcgtcacacaataaatattcggaggagcaagaagagagtgattcaacatttgggtcttgtctgtagggtgctcacagtccgggtggggattggtggtaggatgggggcttgtgaatgtttataaacagaaatccctcgaatacgaccctggctaggtaggtgcagttacagaggcacagaagggaggagaytgggcgaaagatttttgaattaggggattagaaaaggctgctcgggagagttatctgaaccagctaggacttggtcagatgcagtcagtttggtataggatgagcaaggctcgaaaattggaaagtacagggcttgttgagggatggtgtagcaaacggttgaatgagtagaggagaaaagtatagttggagatacggtttggaggagccaggtgaggactcgggggctcagcttgtgtcctcgggtttgaaatgcagtaagcacttgtgaatagaaaggctgcttaatcatttgcactactgtcatttgttacacctagaccaaacatcttggaaatggctttgattcttccttctttcatatcctacactcaatctgttggtaaatggtagcggactctaccttcaatataaagccagacttaccaattctaatcagttccatggttttcaccaaggctggtgtacatttctaaggaacacgttttcacatctcactgcagtggtgcaatatacaaccctcatgactgcacatggtggccctggattactgccacagatcctaatgggtctccctkcttctgctctagtccatcctcaacwtattaacccagtgagagttacctttttaaaaatgtaagtctgataatggcactcctcttcttaaaactcttctttttttttttttttttttgagacagagtcttgctctgttgccaggctggagtgcagtggcgtgatctcggctcactgcaatctccacctcctgggttcaagtaattctcctgcctcagcctcccaagtagctgggactacaggcgcgagcgaccacacccagctaatttttgtatttttagtagagacggggtttcaccatgttggccaggatggtctcgatctcttgacctcgtgatctgcccacctcggcctcccaaagtgctgggattacaggcgtgagccaccacacccagccaaaactctcttaattcatttaattatgtaccagccaggcgtggtggcacacacctgtaatctcagcactttgggaggccgaggtgggcagatcatttgaggttaggagtttgagaccagccgggccaacatggtgaaactccgtctctactaaaaatacaaaaattagccaggcatggyggtgcatgcttgtaaccccagttacttgggaggctgaggcaggaggattgcttgaacctgagaggtggaggttgcagtgagccaagattgcacccctgcactccagcctgggtaacagaacgagattccatctcaatgaatcaatcaatcaatattgtgtgtctgttgtgtgcagggcactgctgtacatgttggagatacaacagtgaacaaaacagacaaaaattcctgttctcaaagagcttatattctaatgagactgaacaacaacaaacaagataaatatgtacaacatgtagaatgctataatgtaataaagtgccaaggaggaggaaaaaatggaagcagagaagggggatagtcagggttggggtgggatagatggggtggccagagaatgtcttagtaaacattttagtaaaggactgtggatattgagggaagagtgttctaggtagagggaacagtaaggacaaaggccctraagcaggagctggcttgctatgttccaaagacagcaagaaagccactgtgaccaaagtgcagtgaaccaggtaggaatgaggtcagagggacaatggagacccagaacatggagggccttgtaggcaaactctagattttggcttttactctggcaggagtttggtgaggcgtgacatgatctgatttatgttccgcaagatcctgcaggctgtgttgaccagaatctggaggaactacagtggaagcggagagtctagttgggaggctactgcaataatccaggcaagaagggatgaaggcttggactaggctggtagcggaggatcctagatatatgtgaaggtggcattgataggacttgccgagcactgggccgtggagtgtgcaggaaaggggagtcaagaatgaggaagatttagaggaacaggtctgcaggacaatagcacaggctcagttttgcacaggttgcatttgagatacgtagtaaacattcaagtggagatgttagatgcgcagttgtctgagttcaggggagaaggttgggttggagatcaaccttcgggagttggcggcatgtgaatcgtatttaaagctatgagtgctcgtcatggtgcggagaacagaccaagaacagagtcctgagactccgttgtttagtggcctgcctttaatttggtaggcaagccctgttctcctagtgaaaaaatgcccacttgatctggcagttgtaattatggcagttttgacagctcgggtaacactttgtcttggggaaggacagaagaggagtggaatgggggaagcacaggttccagtgtcgttataaggtcattataaatgaggcattctcagaataggggtcaaaactgagaattaatacacctcatatgctgttggtgggaatgtaaattagtacaaccactacagagaatagtttgtaggttcctccaaaaacaamaaatagagctaccataggatccagcagtgccactgctgggtatatacccaaaaggaaggaaatcagtatattgaagagatatctgcactcccatgttggttccagcactttttacaatagctaagatttggaagcaacctaactgtccatcagcagataaatggataaagaaaatgtggtacatatacacaatggagtagtattcagccagaaaaaaagaatgagatctgtcatttgcaacaacgtggatggaactggaggtcattatgttaagtgaaataagccaggcacagaaagacaagctttgcatgttctcacttatttgtaggagctaaaaattaaaacaattgaactcatggagatgtagtagaatgatggttaccagaggctgggacaggtagtgagggtctgtgcagtggggagaagatgggatggtcaatgggtaccaaaaagttaaagagaatgaataagaactagtatttgctagcataacacagcgactatagtcaatgatcatttaattgcacatataaaaataactaaaagagtataattggattgtttgtaacacaaaggagaaatgcttgagggggtggatactccattttccctcaggtgattattacacattgtatgcctatatcaaaatagtaccccgtaaatatatagaactacgacctacccataaaaataaaaagttaaaaataatagtgttctgccttcagttttagctactattgatttggtggcaagtggcagaaacgtccagcctgcttaaattacacagagactgtaaaggcacagcatggcttctggagctggggggcagatgggaggcggctgctgctgctgttgcttttctccctccctccctccacctccacccctgctgctttctgcatgagcatcttatccccccaccccctgcagatcggctttctccctctctctgtggcttcagggcccagtggagtgtagctgccgtcctccagcagcgccattgcatggccctgcgccacagagcatggttcgcattctctcacggtgccaggggacagaacaatgggctcaccttgggtctggtgtctcttcctggctcagtcctccgtgaccaaagcatagtctctgcagctgcagaggccaaatcctatgagggaggggcaggtctgagaggaggggacatcaggtgagcaggacagacccccgaaaggtagtcactgcagagtgtatgtggtgtgttatcggaggagaactggtcgccaccgaagcctaatctggtgactggaatgtctctcaggacgatcaaggtgtctgcattgggtgtgcctaatgttagacccttggcttttattgaaggtccctgtgaaacragccatgtgagtgtcatctctgcatgtatgatacagtggtggtgagaacactgtctactatatcacttgatgttcctgtgtaattatttctgacttttgtttgagaatggttacttctctaaggaatgttaggtgtctttttgaatgagggcttgagaacttgtcaggtttcccgtttgcatgacctcaaggaagctcccacgtatagctgagctgggttggaactttcaagcaagactctacgaaatgttcggaagaggaatggccaaatatatatataatagttatttgattatagtgcatatatagatatatatggtcaggaatctcaaaactcaaatgcccatagtgtccaggcaattaacaaagatgatatggatagttttaacatagtaagtacaaactgtttgtattgagttcaagcatagcttagctgcctagttacactgctttttaaaacagcaggctggccaaacaaatcagccaagtagaacatgtttaggtaggctgccagttgtaggatttgggaagctgacacagaaacttgctggtctgaagctcttcagtgtgaggtctctgcattggctgtttccctgcataaccccagcttgccctcctcgggggcaggacctttgcctcccacttgggagtggcaagggcccatgtaggcttcatgtccagaaacacctgagttctctttcctgccttgtgtgacccggtttgctgcggataccttgcctctgctgagaatgttagtactgggaatgcctgcccctttgaggggagcccctgctgctgcctcacaggaaagcccccagctgtgacctctgcaagatggtcatgttggaatggaacacagtgagcccagcagtgaggaaggatgcgcacgctgttttctttttttctggagtaggagtgctttccatgtgttataccttgacagtggagcgggcccttgagagaagccccaagtgtttctagcattaaaaaatgtctccaagattccaggttgatatgtgagcatcgtgattttgtgacagtatcttatgagtttggtccctgggagtcaagccccctgtgctcagtcacctcagggcaactaattacttgactttcaaggctgaggagactgagcacccgcctcccacagccatttctgttcccaaactaaaaggcaagaaagtggtgtgtgaagtttgagaacttaatatttacagagaataaggcctggcacaaaacatgaagatggcagacagctaccctgaagagtctttgggagccctgcagtggaaatagctgcatgtttaagaaacacgcatgcaacagactacattgagaacagtgcattgttcaagggactgagttttttgtgttttttttgtttttttttgttatttttgtttttgagacggagccttgctctgtcacccaggctggagtgcagtggcrtgatctcagctcactgcaacctcygcctcctgggttcaagcgattctcctgccccagcctcccgagtagctgggactgtgggcgcccgccaccacgcctggctattttttgtatttttagtagagacagggtttcaccatgtcagccaggctggtctcgaactcrtgacctcaggtgatccacctgcctcagcctcccaaagtgctgggattacaggcrtgagccaccacgcctggccaagggactgagtttttatgcacttttaattattttggctttagtacttttagatatggctgacttcaaggaaaacaaaatggaaagcagctgtctatttggagatcatattaaagcattttctgccacaggcattgagctaaggggtggaaaggactttaattatagatgactggatgggaagtttcccagtgatggtgacctcagactctggtcctgggtcttggagggaggaggtagagatgtgtgtgcttagccagctggtcagtacttagatggtgggagggggtgcctcatgaaaaagtctgagccaacgtgggcctgtrccttccataaaaccataaaaagccagtctgggctccattctgctgctctctgcaaggagctttccatggaaacttcttttgtggccacaggccgactttccacccccagactgccctgcgggagcccgctcagctcccatccactccccagggactcagagtgcctcctttgcgtcaggctcgttctaggcactgaggatttggtggtgaaccaggtggagaggattcctggtgtcactgagcttaggatctagtagaagataaagtaaataaacataattttgaattaaggtagctgctatgagagtgatcttacagagagcaacctgtgtgttgaatgggagccactttagtgagggagacagaggactcagcatccaggatgagggcagagcaggagccggtactctgaggcaggaacgccctcacrtgggcaaggagttcttggagtcagtggtggctgcgacgcagtgagcaaagaggagggtggcccagtgagctaggggcctccagggagggagaggccagcccccacgggcatggaaagttggctttaaacacggaagtcgcatagcttgaccggtgttaaaaaggtttcttgggctgctgtgctgagaatgggggtgtggcaaataggggcaggagtacaagcgagagtttactgtagttctggaaagrtaacaccagagaggtttctgcctgctttcctttcctgaggattaaacagattaaacgcctccacctgcttccagcagagtgcatggcagtggttgctcagttaacactgctgacctctgggcccaggtggctggttatcagtaaggtttggggtggcagcaaacaggcaggggaggagcctcccaggcagtaccttattaccaggaacagtatgacagactacagccaggtaggcaaaggagaggctggaacccatttaccagcccgcmttccttcccttaggcctggaggaatcactattaacagaacaggagggcaacgcatgcccgtgctgatcagcggtcaataatgctgaagagtcgtggtgcctagcagccttaaggtgttaccaagagattcttgttgcaataaggttgctttaacctcaaatggtgagggagcggggagggtgtgtgtgtgtgtgttaattacaagagtctcttatttggcagctccaaactctatgctataatgaattactgattaattcagcctcagagccagagcccccttgtttgttcgcatgggggaaagaggtggacggctgagtcagatgctatgtggcatgaggacaagctgcctgcaggggcaggtgggcacctcaggaatgaaggctgatgccctggggcaccacaggtgggtgtttcagcaggttagaggaataggacttaccgagtcagaatccctgaggggttaggtccccgagtctcccagtggttggcgggtttgaggatcactgatctgggccaacctgytcacattatgaatgggtgatgacttgcccagggttgcccagtgtgtttggtggcacagctagagccagaacccaggcttccargcaccctggctcctgactctttccattgtgaagctgcagcttgagagaggaaccagagtggactacctggtggtaccaggactggagctgggtggaacagatgcagcccagtttgactttcacaacctgaaaggaacatgactgctcctgattaaagcccggaaggcaacaaagtaatgctgagggtgcatttatgtttcagaaccaccgggaggaactgggccattctaacacccrttgctaccatgctggccacccgcctctccagacccctgtcacggctcccaggaaaaaccctaagtgcctgtgatagagaaaatggagcaaggtaagcaaccagaggtggtggtggccttgaggggacactttctgagcaggcagaggttttcacacatggacagtgtaggcggtgatgaggcctgattctcagagatgtctctcaatacctttgtctcccagcagaggaaactcagaggtgtcctgggaagacattttcccagggcacacagggcagaaaggaatatctttcataaccacttatttttttttctttttgatggagtctcactctgttgccaggctggagtgcagtggcgtgatctcggctcactgccacctccgcctcctgggttcaagtgattctcccacgtcagcctcctgagtagctgggattacaggcacctgccaccatgcccagctaatttttatatttttagtagagacggggtttcaccaggttggccaggctggtcttgaactcctgacctcaggtgatccacccgccttggcctcccaaagtgctaggtttacaggcatgagccactgtgcctggccataaccacttcttaaaaccctttttattttgaaataactttrgacttatacaaaagttgcaaaaatcgttggaaagggtttctggatccccttcagctaacttccctaaatgttaacatcttacaaaaccatactgcaatgatcaaaatcaggaaattaccattgatagaatactattaactagtctacagaccttattccagtgttgccaagtggctgctgatggacctttttctggtccaggatcgaatcccaaatcccacatggcwcggaggtgtcatgtgtttttagtttcttcctgccggggacaggtcttcagtctttttcgctcacgaccttgacactctsgctggttatgttgtacaatgtctctcagtttgggtttgtgtggcaagacgcctgcggcagtgaagcggtgcttttctcagcccgtcgtgccaggaggtacattattttgataactgctcttttaaaactttatgcatgaaatcagttagccgagatgtcccaaaccttcaccgcatcgtttgtgtgatttcgaggaagcattatataagtacaaattagacaagcagctgttcttctttgagagcttctggaattgccttttcccaggggattcagtgggctctgctgccacattttactcttttgcagtctgagcaaggaaaaaacaagaaatacctttttctttctgttatatttgaggggagtgaatttgaggggagtgaaattgaagattatgttaaattcaaagtcccaggatctagaacactgatatttctatgccaataatatgtttaatggaacatgcatttagactgagactctgttgcccaggcaatgtggcaacctcttggctcagagcaacctctgcctcccgggttcaagcaattctcccgcctcagcctcccaagtagctgggactacaggcatgtgccaccacacccggctaattttttgtatttttagtagagatggggttttgccatgttggccaggctggccttgaactcctgacttcaactgatccgcctgcctcggcctcccaaagtgctgggattcaccacgcccggcccggcttttagcagcatttgcttgaatttatttctgagagatacagaggcatggcttggagctggggctccacctacctgaggaccccacatgagaagagtttagaatgccccattggcacaggcggcaggaggcccctgccatcacagcggggacggcggaggcccctgccgtcagagcggggacggagctcggctttgttgaagggcttttgaaagaaggtgacttgctgcaattgttttttcagtgagtgattcataaagatggcaagatctgtctccaacatggcttttagagatttctggagtttttttatagaggagaagataatcccacatgaagttaaaatacttttacaaaggttttgttcttaaatgtaaggaaaatgaggcattagtcaagctcctggctcacttgaggggaaagaaagattgtcaaagggaatttggaatcttctggatggactgagaagtaacttggttaggttgaggggcctgggtggtggttgggcagccgcagagctgtcagagtagagtcaatgtcgtagggtgaaggtatgggcagcgtggagggggacccaggtacagaaggaggctggcatggtgggtaatcgccatgcctaggatcccacagtccctcagagggaaaactttggcctgatcattttgcttgagtctcagttggaaagggcctcatactccagtctgcacctgtgagtgaatcttgctgatagcatccttaccaagtgactttatcgcctctgtttgaatatgtccagtgatggagaggttagtacctctcatagcaggcctcctgtgtttggacatctccttattgaggagaaatcttttctcctgttaatgccactccttgttcttgggtctgcccctgcattcacactgagcgagttattcccttctcccmaggggcactgtgccacctcaatacccacccacttgtctactcttactccacccacatggtttctccttgtttatctctcatggtttccccactatcatccaggtctccccgctgaatggtctgcactttgcctgtgctccttcttaaggtgtggtgcctgaacaaaacacccaccactcttgacatgcccagagcaggcatcacccagtacacatggctccgtccagatgaaaaccttcccaggagtggctggataaggcccccaaccccaacacttgacaacctgctgtgcttactggctccccatggccctccgatttcagatttctcagatttctggctttgccagaagactctggcatccctggggcaggtgccttgctcacatctgggaccctgcctcctgggctgtgatcaccagtgctcagctctgccaggccaggtacagcacatagtgctcccagggtggcctgacccgggcagagtggagaagggctcttgcctcccctatcctagtttctttcctgtccagcctaggctcacatagcttcttttggctgccacatcacatgcgggattcatggtcaaacaggctaaatttttttcacagatgctgccgtgaggccatatttctcccgagctgcacctgtgccactgatatgtgttcctcctaagccccgtcttgttagattcaaatggactcatggctcctctcagcagaaagctgggttactggttattgttkctgattcctgatggggacaataaaaggcacagacacacagactggtaagatagagaagaagccagaatgaacgccctggccagcatagggagcgctctcaaatgcggccgggatgaccagggcgctgaggacagcaggctcttccacagggccttggggaggtgccagactgcaccacttcctccctctcattctgttcctgggttagggcaaaaatcaggaagctctcgtcttctgaacctcacagccacccctttgggctctcccttcagaaagtgtgttgaccggtgggggcgcggtggctcacacgtgtaatcccagcactttgggaggctgaggcgggcggatcacctgaggtcgggagtttgagaccamcctgtccaacatggagaagccccgtctctaataaaaatacaaaattagccgggcctgtggcgtgtgcctgtaatccyagctacttgggaggctgaggcgggagaatcgcttgaacccgggaggaagaggttgcggtgagccgagatcgtgccattgcactccagcctgggcgacaagagcaaaactccgtctcaaaaaaaaaaaaaaaaaaagcaagcaagaaagaaagcgtgttgaccatctcgagcttaacttgtgcctcccgagagactgagaccggcatagctgttggtgttagtggcttggttggccagcagcttgctgttactgcaggaccctcctgggcagaggagaccctccagggaaatacacactattttatgtgctggttttgggcctaacgcctcatgggcattcttagccctgggagaccagtgtatgagctgggattgcctcacactaagartagcaggaacccctagaagtctagggccattgtggctttggggagcccaggctccttgtttttttytgctgtgttattctgaaggcagctcaggatcccaggatactgtgatagtccttcacctccagcctcagtccaggcagggacaagcaacgcacctgcatcgggaaagcaaaactcagcaattgtggtcgacctccgcttgcagcctattggccagaggcaggtcacgtgaccactaggtgggtggtaatctggaaagcgttgggcgcactgctgtccctggacaaaatccagattcttgttartgaggcagatgagaagaacggatgctggcaggcaaagagcagtgtctgtcacagctcagctgggctgtggcctccagctgttcacagggatattggggctttggcattcaaggggctcaaaggggaaccccctggggataggtctttgtttttyttttcctgtagggcagtggtattgaaccttggttgtgggttagaatcacctagagaacagtgagggaaaaagtrtctgtgcctcacctctgggtcaggagtgagsctrggcaaaggaatactttaaagaacttccctgtgattaaaaagaaaaaaaaaatcattctatggagaatctcaaacatacgcaaaagtagaaagctgtatattgatccctggtgtacctgtcacctgggtttccataattatcagcacatggccaatcttgtttcagctacatctccattttcctccccctccccataccagattaattttcgaagcaattcctggacatggtatttcatttgcaaatattttaatatttatctctaaatgataagaactcgttttagtaatataaccacacgaccatgatcacatttccaagtgattctaataaacaggggcccagagaacaactgctgtggactagatgaaccagttcttcccccaggacctgttgcactggaatcccctgaggtgaatgacacaggcagatttctggggccaccccttcctactgaatcagaatgtcaacgggagggacctgggagtttgcattttaacaagctccccaagtgcttgttaactaacttttgagagctgaggcagtaaggtcttcctggtcccaaggccccttcaaattgagaagcagccctaagatggggatcccacagcgactgtaagagctgcaaattgagggaagaggaattagagtaggatgaggcaatcccagcagtggccaagaaggaaaggccgagaagtccagcagtgctcaggaggcactstcatgctagctggagctgcccgcccaggagtattcacagccccaccttacccaccttgtcagggtattgctgtggggggggcaggtgagtcgagatagaaccttctgctctctggaagagtagaaatgcgccattgactgttgggtataagtggtagagcctggtataatacacccagactcagttaattttaggtctgaatatatttgacaatggagagacagtttagagaaagacgggcagcaagtcaatctgaaataagctctcttgcctagacctttttgttacttgttttgttttgtttttgttttaagacaggtctcactctcgcccaggctggagtacagtggcacaatcttggctcactgcaacttctgcttcccgggctcaaatgattctcctgcctcagcctcctgagtagctgggattataggcgtgtgccaccacgccctgctaatttttgtatttttagtagagatggnnnnnnnnnnnnnnnnnnnnnnnnnnnnnnnnnnnnnnnnnnnnnnnnnnnnnnnnnnnnnnnnnnnnnnnnnnnnnnnnnnnnnnnnnnnnnnnnnnnnnnnnnnnnnnnnnnnnnnnnnnnnnnnnnnnnnnnnnnnnnnnnnnnnnnnnnnnnnnnnnnnnnnnnnnnnnnnnnnnnnnnnnnnnnnnnnnnnnnnnnnnnnnnnnnnnnnnnnnnnnnnnnnnnnnnnnnnnnnnnnnnnnnnnnnnnnnnnnnnnnnnnnnnnnnnnnnnnnnnnaaaatttagcagggcgtggtggaacatgcctataataatcccagctacttgggagccagaggcacgagaattgcttgaacccgggaggcggaggttgcagtgagccaaggttgtgccacagcactccagtctgggtgaaagagagagacgctgtctaaaaaaaaaagtgctaagggtgtggcccttaaggagacaggaacaaatcatctagttccactagggatgtaactgcccaatggcttcaccttgctcactgcctagacagaaccggtttatcaagacagaggacttgcagtagacaaagagyaattcacgcagagccggctgtgcaagagaccagagttttattattactcaaatcagtctctccaaacattcaggaatcaagagtttttaaggataatttggtgggtgggggaaggccagtgacagagtgttgattggttgggccggagaggaaatcatgggaaattgaagctgtcttcttgcgctgagtcagttcctgggtcggggccacaagagcagatgagccagtttgtccacctgggtggtgccagctgatccatccagtgcagggtctgcaaagtatcccaagygctgatcttaggagcagtgtagggagggtcagaatcttgtagcctctagctgcatggctataaattatggtttataatttgtaatctggtgcctaatttgttagtcctacaaagacagtctgatccccaggcaagaaggaggtttgttttgggaaagggctgccatctttgttttaaactataaactatagtctgggcgtggtggctcacacctgtaatcccagcactttgggaggctgaggtgggyggaacacctgaggtcaggagttcgagaccagcctggccaacatggcaaaaccctgtctctactgaaaatacaaaacttagccaggcgtggtggtgggtgcctgtaatcccagccacttgggaagctgaagcaggagaattgcttgaacccaggttgcagcgagccaagatcgcgccactgcactctagcctgggtgacaagagtggaactttatctcaaaaaaatataactcatctcaaatataactccatctcaaaaaaacacaactrtaaactaagttcctcccaaagctagctcagcccacagccaggaatgaaaaaggacggcttggaggttagaagcaagatggagttggttaggtcagctctctttcactgtctcagtgttttgcaatggtggtttcaatgacaccttctcattctttctgcagagcaacactgggggtcatgggaatacagactgatgctctttggatggagtcattcacaagctttgggtgtaccgaccacactatcctgatcacttgagaccatccgtgcacaaggacttaaaatccagactcctctgtggcagtacaaaaggacagggggttaccttggcaggttttcctagtgaaccctcatttctgtctagtgaatttaatgttctttaagaacatattttaataattttttaaaagcttaatatgttgaataggtaatatatttacatggtacaaaatttgaatggcaggccgggcgccgtggctcatgcctgtgatcccagyactttgggaggccgaggcaggcggatcacctgaggtcaggagttcgagaccagygtggccaacatggtgaacccccgtctctactaaaaatacaaaaattggccaggtgtggtgatgcaagcctgtagtcccggctactcaggaggctgaggcaggagaatcgcttgaacccaggaggcggaggttgcagtgagctgagatcgtgtcactgcactccagcctgggcaacaagagtgaaactctgtctcaaaaacaaaacaaaacaaaacaaaaaacaaaatttgaatggcgtcaaatggtatacagaaaaggtaagtctatctcccatctcttttcccctgttaccacctgctcattcacccctacctccttcatttgtcattactgggttaatatcctttaaaaactaacaggacctccgcttctgggaagatggagtagatgtacttttctctattctttctgtcaagtacaactaaaaaccctggatattacataaattataaataatttagtaagtatgtaatatataaaaagcctcttaaaaggcagagagaagaaggcagaccagctaaggacctcaggacccaagaaatggtgcagtgatgagttctctaggttttctttttgtttcttatgtcccagacttggagttgaagcagccggcaacccagaaataccagtaagctcagacgcaaaaagccccaacaaaaatttgctctctctagccaaatgaccagtgcagtaggacagaacaagtgggtttgttccagggatataaggatggttcattatttgaaaattaatctcatccaccaaattaatgaactaaaagaagaaaacttacatgatgctctctatcaatgcagaagatgcaaaatttagcacacatttatgattttaaaaatctcaggaaaaatagacatagagggggattttcctgaacttgataaagggtaaacaccataagccttcagctaacatacttaagggtgagactgaatkctttgtccctaagatggggaacaaaccaaggatattagttctcaccgcttatccaacatagtgctgtaatttctagccagtgcaataaggtaagaaatggaagtaaaagtcatatagattggaaaagaaggaataagactccatatttgcagattacatgattgtgtacatagaagatcccaaggcatccacaaaaaaactcctagaactaataagtaagtttagcagggttacaagatacaagataacacacaaaaatcaattgcatttctgtatactagcaatgaacatatggatatcaaattttaaaacaatacagtttcgaccggatgtggtagttcatgcctgtaatcccagcactttgggaggatgaggtgggaggatcacttgagtccaggagttcaagatcagcctgggcaacatggtgagaccctgtctctgcaaaaaatacaaaaattagctgaacctggtggtgcatgcctgtagtcccagctactggggaggctgaggtggaaagattgnnnnnnnnnnnnnnnnnnnnnnnnnnnnnnnnnnnnnnnnnnnnnnnnnnnnnnnnnnnnnnnnnnnnnnnnnnnnnnnnnnnnnnnnnnnnnnnnnnnnnnnnnnnnnnnnnnnnnnnnnnnnnnnnnnnnnnnnnnnnnnnnnnnnnnnnnnnnnnnnnnnnnnnnnnnnnnnnnnnnnnnnnnnnnnnnnnnnnnnnnnnnnnnnnnnnnnnnnnnnnnnnnnnnnnnnnnnnnnnnnnnnnnnnnnnnnnnnnnnnnnnnnnnnnnnnnnnnnnnnnnnnnnnnnnnnnnnnnnnnnnnnnnnnnnnnnnnnnnnnnnnnnnnnnnnnnnnnnnnnnnnnnnnnnnnnnnnnnnnnnnnnnnnnnnnnnnnnnnnnnnnnnnnnnnnnnnnnnnnnnnnnnnnnnnnnnnnnnnnnnnnnnnnnnnnnnnnnnnnnnnnnnnnncggccgcatgtatggtttaaatgctgaaaacgacacaacactgatgaaagaaatcaaagatctatgtaaatggaaaccccatactgtactcaggaattggaagactcaacaaagtaaagatgccaactttccccaaattgatatacaggtttagcacactttctataaaaatcccagtcatattttttatagatgaagacaagattactctaaaatttatatggaaaggcaaaggaaatagaatagctaaaagaattttgaagaagaaaaataaagtagcagcacatatatcaatgaatcaraatagaaaatccagaaataggcccacccaaatatgcccaaccaatttttgacaaaagtgcaaaagcaattcaatagaggaaagataacgttttcaaaaaatggcgctggagcaaatggacacaaaacttagacctaagtctgacgtcttatacaaaaattaatggatcatagacttaagaagtaaaacataaaactataaaactttttttttttttgagacagggtctccctcagtcccccaggctggagtgcagtggtgcaatctcagctcattgcaacctctgcctcctgggctcagttgatcttcctgcctcagccttccaagtagctgggacttaaaggcgtgagccaccacacctgactaattttcrtattttttgtagagatggggtttcgccatgttgcccgggctgttctcgaactcctgagctcaagcaatctgcccacctcagcctcccaaagcgctgggattacaggcatgagccaccatcccagccaaaactataaaacttttagaaaagaacatagaagaaaatctttgggtcctgggggcaaagagctctgagacttgacatcaaaagcatgccrcataataggaaaatactagactttatttaggggttaagagtttagactctggactctctcagccttggtttcactagttagctctatcactaactacattgggcattgaaaattcctctgttgtcccacgtggtgcatggatgattgtagacgaggacactgagatcctgaaggcagaagtaatttctctaagcaacgttgttggttggtggcagagtctgggttacaacccctggtttcctgattccgagtccaagtgaaatacttttgcccctgcagtagaccctgctacagaggataaaaaggcacrtyataggctaggagaaaaawtttgcctaccacatatgtaaccaaggactagcagctaggacatctgaagaattctcaacattcaacggggtagaagaatgaacgattcaatagaatatgggcaaaagacatgaagaggcattttaccaaacatagggtgctatggtcygaatgtttgcattctcctcaaattcctgtgttgaaatcctaacccccaaggtattggtattaggaggcaggggccctgggaagtgattaggtcataaaggtggagycctcatggatgggattagtgtctttataaaagagacctttgccatgtgaggttacagtgagaagacatctgtctatgaagaaagtgggccctcaccaaacrcagtctgctggcactttgcacttcaactccccagcttccagaactgtaaggaatataagtctgttgttggtaagccacccggtctatgatattttkttatagcagcccaaacagactaagacaggtgacaaataaacatgaaaagatgttcaacatcattagccattagggaaatgcagattaaaaccacagcgaaatatcatgatacagttttcagcatggctaaactagaraatagtgacaccaccaaatgccgacaaggctgtggggaaactgggttgttcagacactgccactggggctgtagcrtactatagccactttcataaacagtttgtcagtttcttaaaaaactaaacctgcaactaccatatgacccagcaattacacccctgggcacctacccaagagaaatgaaaactcaacgtttgcgcaaaaacctgtgtaggaatgttcaagcagctttattcataatatgcccaaacaggaaacaactcagctgtccttcagtaggtaaatagttaagcaaattgtcatacccctgtgtcatggagcactacctagcaataacaaggagcaaattattgatacataacaatctggatgaatctccagagaattatgttgaatgaaaaaagccagcccctgaaggatacatactgtatgatgccatttacataacattcttgaaattctaaaattacagagatggggaacagatttgtggttaaagatggagccgggtgggaagaaagtaggtgtggctataaacgggtaacatgaaggatccttgtggtgatggaaatttctgtatttttattgtatccgtgtcagtatcctggttgtgatatggtaatacagttttgcaagatactacccttaggggaaatgaggtaagacctggcatctctctgtattatttcttaattgcatgtgaatctacaattatttcaaaataaaaagtatgattgaagtaactmtcaggaagcttagcctactgtggattaagacatcaaaattgcagcaggctttaacaaagctatactactacaaggatagttcacacttgaattagcttgaaacattacctatccatgtcatcttggaaagcagaaaatggaactttattggagtgggacactggatggccagggtttagcagagcctgcccaacaaaagtagcttcagaattggctttattctcaggaagsctcttcctggacagtggcaaacatagccatagcaaatactggctcactttctatcagccagcaaccctggtggaaagagggcctcttactcagttgtaccagcaagctgtctccaggagccggggctggagagacacccagtgctgctctaggccagtgtggctgagggtctgtctagtctgtccttgtactcacggcttccttttctcttgcagacgcccactattgcttggttctacttcctttatcccgattggcygtcggacttatgccagtgcggcggagccggtgagtggaagcccagctacccgggagccagttggatggtcagaaccctttcttytgggcccctaggccctgagctaccctcagagtggggccttagtgtttccaggacactgggagccactttctcacttaaccctcccccaaagcccctcatcagtaatgagctcacacacccccatccatgtggggaggaagcagtaatgaggcactccagcccctcccagccaggaaggtatcactggaggcctggggggggggcgagaactcccagccccacccagcaagttaggggttaagagtttagactccggaggcccagggcggtggctcccgcctgtaatcccagcactttgggaggccgaggtgggtggatcaactaaggtagggagttcaagaccagcctggccaacatggagaaaccccatctctactaaaaatacaaaattagccgggcgtggaggtgcatgcctgtaatcccagctacttgggaggctgaggcaggagaactgcttgaacctggaaggtgaaggttttgcggtgagccgagactggccattgccctccagcctgggcaacaagagccaaactccatctcaaaaaaaagaagaagagtttagactctggaatctctcagccctggtttcagttccagctctatcactagctacattgagcgttttaaaaagacctctgtttctcacatgtagcatgggggattgtagatgagatcctgaaggcagaagtaattttcccargcaacattgctggttggtagccgagtctgggttagaacctggcctttccactataccatggtgcttctccagacaacaagaacaaggtagggagggccaggcttgggccactcaggaagcactaactctcactgcacagagggtggagaggcctggtcactttgcccctgtaccaccggttcctaacatggaatctgaccttgtaaaacaggttggcagcaaagctgtcctggtcacaggctgtgactctggatttgggttctcattggccaagcatctgcattcaaaaggcttccttgtgtttgctggctgcttgatgaaggtaagagacgagttatcttcttcaccattgtcttttacacatagtcattgttttttagtcttttaaaaagtgctttcctaacaactggctcacctttgcttaaaccagcctgtccattttccatcggcttcagtcccacttgttcttcatagctttgtccatccatcatccatgcatccatccatccatccatcctctcatctatccatcattcgtcaaatgctatgatgtacctgacactttgctaggtgcagtagaagaatgagaccttgtccctgccctgaagttgctccctgtcgagtggtgaggagacagccatgcatagacacagctgaagaattcgagtgaagcagattctcaggggtgtgcgagaatgttcggcgagactgtgtaggaggaagggattgatgatggcatgccagaggaagtgacatttgttctgggccatggcgagtaaataacactgccacaggtggagactgggaggagttacctgctggatgggaggaatagcctgggcagaggcttgaaagcatgaggctccttcgggacacattaagtagaatttaaggtgcatgaagggaagcactgggacccgagactgcaaaagcaaacagtgggcagtgccccagttagaaagttgtgcgcccaccaccacaatccactttagaatacgtccatcactcagaattctctctcttgaccattggcagttaatctccacatatacctctagccctgagcagccactgatttctatttctttaggtttgcattttctggacttttcatctacatgaaatcatacaatacrtggccttttgtgccacacttcttgaacacttagtgtgatgtttttgagagtcatccatgttgcagaatgcatcagtagctcattcctttgtattgctgagtggtattctgttgtgtgcctatgctatatatatatacatatatgtatatatatatatacacayatatatatatatatatwtwttttaatttatgtttttgagacagagtcttactttgtctcccaggctggagtgcagtgggtgcaatcttggctcactgcaacctctgcctcccgggttcaagtgattcccctgcctcagcctcccgagtagctgggactacaggcatgagccaccatgcccacctaatttttgtatttttattagagayggggtttcaccatgttggccagactggtctcaaactcctgtcctcaggtgatccactcrccttggcctcccaaagtgctgggattacaggcgtgagccaccacgtctggcccaaagcactatttttaaaagctacttgtattaatttttgttttttctttatcgctgtattatttatttgaaatataatgccatttatttgtgatctgttttccttgttgttgattcttgttgatgtaatttaatttctgaatatrtaaactgttaacaaggctgtaaaggcaaaaattatacaaattggtaaaatcaaagtagcgttattccctcacccctatctgttccactccattccttcatttttccccatgttacacaagtgtttgcatattgcatatactctttggttttttaaaacatcaacaatataccttggaaatcaggttgtatgacctcacagagatctttttcactttgttcacagctttgaagcacccactgagtgggcggatcataatttacttcatcaaaatctcctgtaaatgagcatttaggtgttttcaatattttgcaattacaaataatgccacaatgaataactttgtatttttgttattattggggggttatcttttttttttttcttttttttgagatggagttttgctcttgttgcccaggctggagtgcaatggcccagtgtcggctcactgcaacctccacctcccgggttcaagaaattctcctgcctcagcctcccaagtagccgggattataggtgcctaccaccacatctggctaatttttgtatttttagtagagagggggcttcaccatgttggtcagactggttatctttagagtaaattccttgggagtgagattgctcttagatcagagtgtaaataaaatatattgtcattttaaagatattcccaaattttccatcctaggggtcatgtaattttacattccctccaggagtgcatgagtgcctatttccacacaatttcaccaacagagtatgcatcaagcttttggtttttgccagtctgataggtgggaaatgtacctcagtgttgtttttattgtatttctcttctgagtgcatacccctgttctttaaggacatgacccagaagcttcctctgcagatatcacctgtgctctcattctcttggccagaacttagtcacatggccttacctggctgcaaggaaggctggaaaatgtagtgagtattctgagacaatatgtacccggcctaaaatgtcaggcgttctactgctatagaagaaggatgaagggaagagtgggcattcaggacaacttgctttctctgctcggtgggtgagacatttttctttattttcaagscagtaggaacccaggggaggaatttcccatactatgttgatatctttgtaatatttgatacccaacgtaaaatttcaataatataaacaagtaaaagaaatcatttatattgccatgctctaaacatcattccatctggatcagagaaggttttgtttgtccttttaatctttacttctttgaattgtgaaagtaatactacatattcataataaattcaaataatacagaagtatattatgtaaaaaagtgaagtcttcccaatctcttgctccaaggcagcttaaatgcaggtgtatacattatttgtgagttttgctattacaggtcgagtatctcttatctgaaatgcttgggacyagatgtgttttggattttggatttttccagattttggaatatttgcattatacttgctcagcatctctgatctgaaaatccaaaatccaaagtgctccaatgagtatttccctggagcatcatgtcagcactcaaaattcagattttggaacatttcagatttgggattattggattagggatgctcaaccggtattaacaaagcctgggtgagccatcttgcacatatatctttgcctccttccactggcgattcttaggaacatttcgtagatgtgaaagtgcaagttgcaaaggtgtgcagattttaggttttgttcaaatccccaaactgctttcctgaaaggctgtcgctctcctgacagtgctcaagagaacccgtctggggagggttctggggaatgggtgtggcatccctggtgctggattcttctgcagaatgtggacctacctcagcgggtcccagcaagaaccatgatgccataaaaatgttgtaaagtcccttgtcctatgttaggcttctgtgccattgtgctggcttatccagtgacacagggagccacagtcagattccacagcacagggcagaggctgctcgatgctgcagaagactcttcaaaagggccttcggttctagtcctagactgaccactaaccccggaaggggacaaacatgtcccctccctgggcctcagtttcctcttacttaccctaataggattggactggtgatcttagrtccttccactcctgcaacagtgattctagaattggttgactggtattttgaagaaagtaccagacaagctcattggcaggttatatctgttggtatctaccycttgacccattccatctgctatctgagatcagtcaggcaagtcagaaagcagttagcaccaccagaggctttggataaggcaccgtgggggttgaaagggggaatttgcttctagcccgattctgtagtgttagccccatgatggattccggctacatctgtacctaaacactctctctgctcttgttcagaattagtgttcctcttatctctcatatctcattgcctttggccaactcagggacttagctccagcagatgtctgccacctcctacgtcactggctccacgctctctcctgggtcatttcagcacatgcacacacacacacacacacacacacacactyactcactcactcatacagacctacaccaccacaccctgtgtacattacctccccacggctctgctccttgttgcagaaaagcacccccagagggggtgcaacccacctggatcaggctttgccccatcacgatgtttatttacttgtttatttattcagcagatatttactgagcacctaagataagctgacagtgttccctgttggagatacagcatataacacctcagtgagaagttcttgcccttgcggagcttatattccaaggggggatgataggcaaggaataagataagtaaattgcttctctgcagggtggtaaaagcagtagagaaaaataaaacaggaaaagaagataaagcatggtggacggggtgtcagattttcaagagggaggaaagatcacaccaagaaggtaaattggagctccctcatccaaaggaggtgcgggagggagtgtcacagaaaccaaggaggtgcgggagggagtgtcacagaaactaaggaggtgcaggagggagtgtcacagaaaccaaggaggtgcgggagggagtgtcacagaaatccaggggaagaggggacagtgcagtacagagctccaggagggagtgtgcagggtgcayctgagaaacagcatgaagcctctgtggctgaagcagaatgaggggggagtagagtgaagtgaggggcacgggagcagatcttgtatcagcatagggaaggcttaatgagaggtggcgtctcaccaccatctggaaagatgaacgggggctccctgcgaaatgggggcaggtggcatatgaggcactgccagtagtttgaggtcgccaaagcccagtgccctggtgggctgggaaaagaaggcaggaccagaccaggaaggtccatgagtgcctctgacccagcttttatcaaggatatcaacagcccccattttcccaaatccattggccacttctcagaccacatcatgctcaacccagcagcagcttttgaccaaataaaccacccttgctcgtaacacttcgtttcttgactctatgctctcagggttcttccccatcttgcttgctagctcctcctcctgcccatcctgtgaacatcacagtgcccaggctcgctcctctctgaagtgtttctaacacatgtgataagatgctgacgtataacatgtgtcgagtgtcctcatgttcttccctgaggtgctaaaccacctgaacatatatgctagagacaaaaacctttctgccagaatcagctcattggctgcctcagtattataagaaatggaaatagaagaggttgagcgactggaaagagttgttagtgtgctgatattttccctctgatggcaagtaaaatgaggtgggcttcatatgaatgccttggagagcttctggacttctccaagttcttgaactccccggagagcttcttggcttaccatgtgtgccctggagtctggaggccacagagtgtgatgctaatgtccaccagaagaagtctaaaggcccgagattgagacaggagtggctcgtctgggagcggagcacggagagctggtcgggagagggctatccttctacctgggcaggaaacagttgcctggccctgtgtggacagtggagagagctgcttggagtcaccttaagggtaaccatccagtgagctggctgggaggatccatgtggccccagccagaagcgggtacatcactgaggccaggggctgagggagcagatgcccggctgggggaggcacgctgccctgcgtctggagtggcagtcggaggtctccgtggcagaatctttgtagactccacagaagcaccccaagaaggaagagctggcttttgtgcacctgctctctcaggggcagcaacagcagacattagccagcctcagacgactacagtcttgcccctaatttgctgccccggatccaaccttggaagggtcagaagttaagaataggaggsgagaggagctagaaaacagtgagaaagacaacytccaccagcacctacttcccacagccctcagggctgggcaggggaaagctttacctcgcatacaagtttgggagtttgggttctcaaaccaggctgggctggaattatttgcttaagagactgaacaggactcttcatgccaaaacaaagaggctctctgtccactgtctgagaatgagtggaaaagctatacaacttgcctgaagtttcatccagggctggaaaaaatagcttacaggtgaggttgaaagggacagtaagataaagaagtgggtttatcaataagccagttgcacacgcaccaacacagcggaactaaaagcttgtycctgagcagccagacagaggtggacagagactccagagacctgcagagggagcacggagaccagcagagggagcacacagacctgcagagggagcacggagacctgcagagggagcacagaaaccctgggtccagggaggtggtgtggcctgcggggcagtcttggcctgaggacaggtagaccctgagggggacaggccaccagagtctgcagccagcaggctgagggtggttggaaagatttctctgaataactgggggcaaattggtagtttctgtccctattggcgtggttgtcaggagcagggtgtggaggctgcccaaaggcaggtgagggttcctggggtgggtctgtcagtgaagataggagggtagcgttgctctcctcgggagcctgaagccgtgggcagtgagattaatcccctagtttcctctgaaagaagactcttcactgtcaaactgccaaattaagagtttactgacttggagtcgggggtttcccctgaggactgcagggaccttgtcgtgatgctgtgtaggggcaccagagaggtcttgtataggggtctgagaagagctgaatgatagcaacagggttaaccaagtcccaagaggaaggacatttagatacctcttgtgcatgtcagctagaatccacctttctgaggttcagatcatgtgagctccacgccaaggggcatttgaagggccaccaggtggaagactgcattaaagcaagacacgtgttttcctggtacctgtgtgccgcctgtggaagagaggggtctgcaggcaccacgtcatcacaccctagacctgaagatgcattagttctttcttggtggagtcctctgtgggaatgacagcctgagctccaggcccatctgtcccgtgcatctcatgcctgcgtcttgtttgggaaggtcggcgcacctaggggatttcagagccaaactttagaccatcgagcctccggcctggctgctgtgtccgaaggcatccctggtgcctctgcagagacttagcgggccacgccacagtgccttttcaaagggccactggggaggcttcctttccatggaaaaccaggcggtgaagacgacagtccaggaacggaagcggtgttaggtaggggagatcagcccgacctcctgtccaatgccgggattgtctctgtaccacctttcccacaccccatcctcaagcatccccccaacccccaaacatccctcctacctccaaacaaccccccaccccaactcattgcctcaacacctccaggcagctcatgccatctccagactgtgaagatcacgcctcattttgagctgagctggacttcttggtcctggctctgttctctgtggctgcatggaacaagctggctccctcagtcatgttccactcaagtcttctctccggggtgactacgtccagcacctcyggccccattgggcagtcccttcaccatttcctcctgtgccctctgaaattgcatgatgtgatttctccattcccrgggttggggttcttctggttgaaagcattcagaaggctcagcctaaccagcggaggactttccacccctgacaagtgctgaccgtcctgggctttccacccttgcccgcgcctgggatgtttgcttcagtagcagctgtgtgtgccatgggcaagcccttggctggcgagtgggcatttctctacccctttactcttggctgctagtccwgtcctcttacaagaggtgtcactatgccatgcaccattcaggaaaattgctgccaattaagtcatttatgaccaactatgtttaattttcacatcgagtgtagctcatccctattgtgaaagaaaccatgtttcatagaataggatgaaatgtgacaatgcagcctgcctggtgacacgagggtkcacgtgacaaagcacatcagcacttagcacagtgctcaggacagtggacactcgggaaatgctgtctacttagaggaaagccccccagcagctcggcagtgcccacaagcagacccctgccctcctctccagccctgcatccaccacctccttatgcgtctgcactgcctgcaaccaatggcttctggtggcgtcctcttatctcttcccacagtgccccgtccccatcggccccctcttgtgaatgtcctcagctgtcactgcctttggaaggtctcccctgcccgtccctcctgtgcccctcccacctcccgccaggttccatacagcacacagtcactgtgtcgcttacgtgctcacctgtctccttccctagaacacgactctgggaacaggggctgaatgattgatcttgacctccagttcctagcacagtgccggaacacgataggggcccaagaaatgtttgccgagcgagtgacgcctttctcctgtttagcagtacctgaatttgtgtggtgctttagactctttaacaggcttcttacaaatccatttccttactccattaatctgagcaggtcaggacaggtggtgatgttcctgttttacagccagaaaaaatggacccctgttcagggacacccctgagtgcacaaagcctactcagtgactgagctgggattagaggctggctctggcctcttaccaatttggagttgatgggcccttggcttagaacagaggtggcaaactggcagcctgctggtcctatgtggcctgtggacgtgctttggccttcacagtgtttttttgtttttttttttaaatgtgtgtaagttgccaacacttaaaagaatgaagagatttcccaattactagcttaaaaatgtaagcatctggcaaccctgggtttccatccccacgtggtaattcctgacatgtcctgtactccccagggcccccgcctgccccacataagtttgcaacccctgcttggagaaggaatcctgtcttgaggccttgggggccggctcttcatcctattcatggttgtgtctgtggcacatagcttgatgcttgataggtcatcagtgctcaggattaaaaagaaccgcatgctggtgggccaggcccatgggcagttgccagtatgcctgaggctttggctgggacttgaggccagctcctgccttgacaggagtcctcagggtctgcctcagggtrggaaggaaggaggtagaagcagctcttctctcctccccaggacaaaggccatgatggggtcaaggagctggacagcctaaacagtgaccgattgagaaccgtccagctcaatgtctgcagcagcgaagaggtggagaaagtggtggagattgtccgctcgagcctgaaggaccctgagaaaggtagggcgccccttcggacggcaggggttgtgtatggggccattccaaggggcacttgccgaacaccaccttccactggctggcatcctgccaccacactcccttccttattgtttaggctcttcctcctgcacagtaggaggaagaggattacactaaacatacacgtgcaatagggcaatggaaaaatacagtcaggaggtgatttcagagttcacggagtgctaggtggctacgcactgattcaggtcagttcagccaatgcccattgatgccccctctggcccaggagctgggttgggtgccagggacacaaagatggtcaaggcacattctgtccccaggacctcatagttcagccggaggactgagttcaaaatcagggagccgtgcattgagagaggcagagcagcacaggaaggaggggtcagtccagccatgggggcgcagtggaaataggccagttaaggcagattgtggcagagagcagatatggttgttccaagaggaggggagagcaggaaccacagcttcgaggagcacggggagggtagcgggggctgttggtcaagtggtgggattagccggcacctcaatatgagtcatgggtcaggtcacgcagagggggtggcagcaaaggakgttggggagggaggtcttggatcccaggcgagggaacatggctggtctcccaatggcactggggagccactgaaggggtcatcctgagggaatggcctggtcattgtgagacttgtgaatctccctctgaggatggcagtggcaatgtgaaggtggattcaaagcrggagttaaacatgggttctggactccggaactagggtggtaggtgttgggaaacaggaagggtcaggtgcgaggagtgttgagaaggcgaagctgcctggacttggtgacttggatgtggggatgaggtgaggcgcgaagtctctgtcctggacacctggtgccccgcactgcaggagcaggtggggagatagggagacactgaagcgcccaccctgagggaatgtccaggctagaagagcaggtgcccacggcaggtgacactgggagtcggggagatgcacagagggacccctgggaatgtgagtgttcggggatcagaggagggggagaggcagctgtcagagaggttggatacagttccccagaggctaaacaacagaaagtttggaggagagggcagtaccagtagccaacagggtcaaaagctacagaaagttccagtagcataaggactaaaatatccttccagttcagccagtggagggccttgtgggaggagctctgtctgcaacctcggggtgccattcatgtagaatacagcagtgggggatggagctccctggagccgggccgcccagcagcatctggagaagcgaatctatgaagtttacctttgagctccctgacagcccaggcagaaagggtgtgcgtcattcaggcctctgctttccctcagaatggggtggggcagctctcaggagcagctacttcagtggctggggaaggaggcggaaaaggcaggagtgaccagatcccatgcggggagctctgctgagcctgtatcagccagatggatgtgctgtctgtcacagcagctgcctcagaggctgcgtgtgtggctgtcggtgatgccgctcctctgcctgtctctgatgtgccacctcatcagcccactgtcgctcccatcctcccaacaggccattcacaggcctctctgttctctgttctcgctgaacatctgtttaataattaacaggcagagccagcccattaagaaaaggcaggatgggtcccgctggggtgattaccggctcagaacctgcagcctgcttcgcccttccctggcggtaaattctcctccctcccaccttccctgggcagctgctatattttccttcataaactactgggcaggaaaacagctgcatcggcaccataaagccacttgattatagcgtgggttttgtggtgatctaaaatgcccgtggaaaggcgtcatcaccggagacccaagcagagaacgcaccaggccggcttgctcaggctggcggtcctcgtcccctgcccccctgactctggggcagaatcacttccattgtctgtactggactggccaggcagcctaacctacaaggcagggtgggccccggcccacacagaggggaggcactcaccccctgcccggggatctgggctccaaccccagcaccagcctgacgcgcagacctttccctgctgcttttcccacgccgggcattccggagggctggatgaacctctcaccatcaacttccttaaccgatactgcattttttttttttggaaaaggatttgaagacttttaggtctgaagaaaacagtacatccgtcagatatgcagtggcgtgtcccccatctcctgctctcgctttcttcccgtctccctctcctccctctccctgcttcccctccacactctgccactctgccatgtcytggccttgccttggcaattccccctcaggcaatgccggctgtgaactccagggagcaccctcccagagcgttccgacccgcagtggccgccaccgacccacaccccaygcaggacatgtcagaagggtcctcttccccttctccaccgggggggcacatttggttggcgagtttgacgccctgcagcctggctctgtggaacagttgctgccaaagcccggggagccagccacgggggcgagatgaaggagattgtctggtgagagccacagagccatctgccaccggccccgacccccgcaggacgctgagggacrggacatctggagcctgggaccagccctccctgtccccaccccaggggacaccgagccagtgggcccgagagcaggccgtgggcatggcctgatcttggcacatcacttaccagtcagtcagtcaacattaattaattaattaattaatttttttgagacagagtcttactctgccgcccaggctggagtgcaatggtgcgatctcggctcactgaaacctccacatcccgggttcaagtgattctcctgtctcagcctcccgaggagctgggattacaggcgcctgccaccatgcccagctaattttttttttttttttagtaaagaaggggtttcacaaggttggccaggctggtctcaaactcctgacctcaggtgatccacctgccttggactcccaaagtgctgggattataggcctgagccaccacgcctgacctgggcttcacttattagaaatgtgatcttgggcttgcacctgccccctgtgtgggtctcagcttgcccatctgtgaagtgggagagtgctctgagccgtccagcactcatgcctggatcagaccactacaagagcatgggaagaatttcaacacaagctgctcgcaggctgacaggcagcagaacatatgtggaggagtaagggagaagcttggaaaaggcctggcctaccatgctgtgggatggagaccacagagcaggaagtgactgatggggggatccacctgaggaggggatggagaccatagagcaggaagtgactgatggggggtgcctgagcgggggatggagaccatagagcaggaagtgactgattggggggtcggcctgaggggggatggagaccatagagcaggaagtgactgagggggggatggagaccatagagcaggaagtgactgatggggcggggaggtcagcctgaggggggatggagaccatagagcaggaagtgactgatgagggggtcggcctgaggaggggatggagaccatagagcaggaagtgactgatggggggggtcggcctgaggaggggatggagtccatagagcaggaagtgactgatgggggggggtcggcctgaggggggatggagtccatagagcaggaagtgactgatggggggggtcagcctgaggggggatggagaccatagagcaggaagtgactgatggggggggtcggcctgaggggggatggagaccatagagcaggaagtgactgattgggggggtcagcctgagggggagatggagaccatagagcaggaagtgactgatcgggggggtcggcctgaggggggatggagaccatagagcaggaagtgactgatgggggggtcggcctgaagggggatggagaccatagagcaggaagtgactgatgggggggtcggcctgaggggggattgagaccatagagcaggaagtgactgatgggggggtcggcctgaagggggatggagaccatagagcaggaagtgactgatgggggggtcggcctgaggggggatggagaccatagagcaggaagtgactgatgggggggtcggcctgaagggggatggagaccatagagcaggaagtgactgattgggggggtcggcctgaggggggatggagaccatagagcaggaagtgactgatgggggggtcggcctgaagggggatggagaccatagagcaggaagtgactgatgggggggtcggcctgaagggggattgagaccatagagcaggaaatgactgatgagggggtcggcctgagggggggatggagaccatagagcaggaaatgactgatgcgggggtcggcctgaggggggatggagaccatagagcaggaagtgactgatgggtctgcctgaggggtggggtgaagacggaggtggaggagtgagtgagacaaasagacccaggaggcttctccagcagcccaggagacaggcagcgaggacccaagggaatgctagtggaaacaggaaggaagaactgacccagcagaggaaaccagcaacagcctggggcgtggggactttgtcctcagagagatctgggtccaaatcccaccctccctgcctgttagctgggtgacattgaccaaggtgcttaacctctctgagcttcagttgcctcaaccggatatgagacaatttaggatctattttccagggtggttgtgaggatcagggaagttaatgaatgtaaagggcttgattaggggtctgccagctgtcatgttgatcttgagctgtaatattagcagtactgggtgactcagtaggtrggggaggggtggaggagctggaggagtcacagacaaaagtaaaatcattaacaaagaggaggagcaggcttgggcagcttggaaacttgacgtgttggttgtggttagggtgagtcagggacccgtgggacattcaggtggaagcgagacaggagatgggatgaggagagagagccgtgactcccaaggagaactgaggggccactggtgcggaggcgatcttggggatgttacaggaaagttgctgtcacccaaccagcgggcatgcctccgtgagtttattcagaacattggctgaggattccagatggcaactaggtccaccactctcaacactcattaaagctgtaatccaggggctgtgcactttcacaggtcatgtttcattaaacttttttggatagtagcgtcaaatgtcattgttttatttttaggtagagaaagggctgtatgcattttaagtcatgggatattgtccgttatgaatcaaacacaaaacggctgcaaaattcacaaacatgaagaagatgaggacacctaagagttaagtgtactttgagaggagcaggattaggccaggacattgggggccacttgtatctgggggcaggtgaaagaaaggtgtcagggaagatgcaggagatgcctgggtatcactaatgctgagggagaggtgagcctcaaggagtactggcagtactcatatygtagcgagcctgaggagagtgaagactgggggtgaggtccttggtgtaccaccctggagaccctggagactgcgtggtcaggacagctgagggctgggacccagtgtggtatggaagggagatggagaggatagagcgcgcgcgcgygtgtgtgtgtgtgtgtgtgtgtgcgtgctctgtcacccaggctggagtgccgtggcatgatccggctcattgcaacctctgcctcctgggttcaagagattttcctgcctcagcctcccgagtagctgggactacaggtgcccgccaccacacccggctaatctttgtattacaggatagagtgtgttcttggaagcctggcgtggagggagggagagcaggtagcacagttacagaaggatcttcgggatatggaaatgcggtatttgtggacactcattcatctaacacacatttgttgagctcctaatgtgtatagaactgaagggatggagtcatgggcagtggaaaagctgaaattgtgtaaaagagagagaaggatcagtggctatggtctcgaagatgacgtggaagtgtcagccatgacgggtggggagtggcctgctgctcctcctgggaagagaagaaggtgaagactcagggcgcgtctgcagggagacagtgggagctgtggggtcgtggatgacgctgatcctgtcattagcatctgagcgaggtcacaggtgagacctagagcagggagacacccgcaaggctttggtggagagtgggagtgagctcttcatggacactctgttaaccagcaatttcctttccctaataaatgcccttaattctccataattgaaggagaaggcaccagagggcagtgaatgaagctttaatttgggtaacacggaaggaaagcagctagagaccaattactctgtcatttacacaaactcatttccatgattaacttggaaaatraagcagcgccgagttcccacaggcaggggagggccccaggatgggagctctgctctgaggctgtgccttgggaaggagcacggggctatcggcccgggagaccraacactgagggtttccacaacaaagaggcagggcccagctctgtcctgaggctctgacccatccagcctttgcaccccaacaaactgaactcagagaggtccctgcaaaacacagctgcctcctcgtgcccacctcccctgtgatttccctggcttctggcaagagaagagaagacgtgagcaaaagctcaagggcagagatgagtaaacaggaacggggcgtgaaactcaaactcagggtgtggggatgggatggggtggagtggagtggaagtgggaatttgaggtgaggtgagactgaaggccgggggacacggcaggctgggtcatgatgggcccagagactcgagccaggcagatgtgacgtgaggactggacattctagacgcaagggagggctgcagtcagcactttaggcctctttacctcctgtcgttcctgagtgactctagaaagtttcttgagagcactgggcgagaggctgggaagtcacaggaaagaagcagagaggaggctggcctgcaggctgatgggcaatgtctgggccaagcccatgtggtaaatgcacatctatccctctcctgtccaggsatgtggggcctcgttaacaatgcyggcatctcaacgttcggggaggtggagttcaccagcctggagacctacaagcaggtggcagaagtgaacctttggggcacagtgcggatgacgaaatcctttctccccctcatccgaagggccaaaggtgagtgrgaaagggagctccctcctgcccctgaacctgccccacgtgttcatctttgctcagaatggaaatacctgtcccagcagctccaatgtccacaactcagcagaggtgagctcgtgaatcccagggactatgctgggcctggggtgatggtgggcagaggggctgtggccgggtaggggaggaggaagcagagcaggtaagaggtcagtggtccatgcagcaaaagcttaaagagttgagcagccatccactctgcacacctaatctatagagagaatcaccctttgcacaaagctgtgtgtacacatctttgtatcagtcaggtgtggttagtaaaatctggcatattcattctatgggttatttatatcgtagtttaaaaaatgagatcattgtggtattagggaacratagtaaaaatcaagattagaaatttggaaaaccaacaaaacacccaaaccatgtgggtggccaaatgtgagcaaaccactttagaagtcattgacttggatttttttctctggcatagcaaacaattgtggcaaaaagggtaagatccatacatctatggtgaagtcctagcaacaacaagcatgaacacagactgcagctgtaggattttagatggaaaccccaacccttcagtgacttcaaatttagagctttctgaaaggtgcctcccccaggatgggctgagttccctcccggggacacacctggatgggctgagtgccctcccggggacacacctggatgggctgagtgccctcccgggggcacacctggatgggctgagtgccctcccgggggcacacctggatgggctgagggccctcccgggggcacacctggatgggctgagkgccctcccgggggcacacctggatgggctgagtgccctcccggggrcacacctggatgggctgagtgccctccccgggacacacctggatgggctgagttccctcccaggaaaactggtcccagatccgcctcggcttcccgggctgggccaaatgcaatccacttccaacccctctgttcccagggccaggaggagctgtgggaggcccctgatgcccccaggctgggcctgtggcctttggagggggatcaccacactctcccagtgcccaggactctctcctcatatcctagccctgaagtcaggttcagaaatcctgcccctgcccctgcctgctgctctgtttgccaggcggtcctggtctccacccaggctccaccctaccagggtggaatggagytgggsagttgggcctaacagcacrggtcctgtcctctttcagggctgtcccggggctccctcccagctgcagccccaggtacttcctcgtctgcactccaacccccatcgccagggctgctgtcagtggctagacacttggccctagtgtgctacttatctgcacgtcgtactactggagctggactttaagctccataaggggaaggggaagctttcaggctgtatttctccctcaccagcaccagaccttgcctatagtgaaagctcagatccacacagacagctgtctcgcctcccacttctcccctcgtgttttcaccccaaattatcaccgcatcgggcttgatctggtttttgagtcagttgcgtgttgcccattacactgtgccctgctgcttctcactcacttgtcctcccctgtcctgcctggcacagccaggttcccagggaagaccaggggtgccgatgctgatgcgtgggcctgagctggccttgcctattgactgagaaggctcctgggtggctcagaagtggttccagccaagcctctagagacatgccagacttctgcccgctgtgtcatagggcagtaacgscttagcaggtacctctgtctccctctgtaggccgcgtcgtcaatatcagcagcatgctgggccgcatggccaacccggcccgctccccgtactgcatcaccaagttcggggtagaggctttctcggactgcctgcgctatgagatgtaccccctgggcgtgaaggtcagcgtggtggagcccggcaacttcatcgctgccaccagcctttayagccctgagagcattcaggccatcgccaagaagatgtgggaggagctgcctgaggtcgtgcgcaaggactacggcaagaagtactttgatgaaaagatcgccaagatggagacctactgcagcagtggctccacagacacgtcccctgtcatcgatgctgtcacacacgccctgaccgccaccaccccctacacccgctaccaccccatggactactactggtggctgcgaatgcagatcatgacccacttgcctggagccatctccgacatgatctacatccgctgaagagtctcgctgtggcctctgtcagggatccctggtggaaggggaggggagggaggaacccatatagtcaactcttgattatccacgtgtggattatccaccatgccaggaagacccataactggttttaacactaactagagggaatgacttctttgcatagtgagtgacttgggccttcacaaacagggtgtggagtggmaggcagaggcctctaaatctcagrgcaaacatggtgaatctatctctccggagataatttcatacagagattttaaraaaacatctttatattaaaaacagatctcatttgatccttaagccagtctcatgaatgaaaaggacaggtttttttcttttgtaaatgaagcatttgcagcttaaagaggatgcatgaaataacccttttatcgcttataaatagtgccagttatgtgttccygccacggctgtggaaatacttcacatttgcattccaggactgttttggatccatttgcccgagaatcttctgactaactctgtgtcctcatctgggcagcacacaccaagtgcccactggtacctctgcatgtccatggtgctgtgtgactggccagccagcagccagtgactcagagctggctgtatggagggggtgggaatgtttctggagatttttgtttttccagacacagtcttgctcagtcccctaggctggagtgcaatggcaccatctccgctcactgcaacctccgcctccctggttcaagcggttctcctgcctcagccttccaagtagctggggttataggcacccaccaccatgccgggctaatttttgtatttttagtagagatggggtttcaccatgttggctaggctggtcccgaactcccgacttcaagtgatccgcctgccttggcctcccaaagtgctgggattacaggcatgagatttttacttgagatttttccatcctcttttaggactcaggatagacttgtgtggaggtgctctctggctaaggggataagttgttactggtttgggtctgcttggttttgccttgggtggggccggtgtcgatggggcaggcttggcacgagcagtggtgccatggcagggcactgtggcatctcccctagcagtggatttggggtccctgcttgcctcacgtggtgcttacacacatgtacacacacacacacacacacacacacacacacacacacacacacacacacacacacacacacacacacacacacacacacacacacacacacacacacacacacacacacccctgttctgcagggcttcagcgtggccttcattcccgcctcgcctcggcctcttttcaattaagaagtgatgccacttgaggcagggtctgcatgatcacttcttgggtttcagtttgaaagctgccatccctgcgactgcccagggcctgtatgttgggaccgaagccaaacaccactgtcctccagggggctttcggcccggggcagggtccccagtgcccgccttcgaatcagactccgcgtttccgcctctccctgggcggacctgccgctagagggcgctcctcctccgcagccggcgccggcctccagcgccccagactcccgcgctgccgcccgagcctgaggtttctcacggcgttcgggattcgcgcttcggaaaccgggaacaaagaagcaagcagcacccttcagaaacagtgttctcgctctcctagcagctggcccgggcccggaggctggtgccaggagaaggcagaagagcccgggcagccggagtgggctacggggttcaggcagtgccaaggaagaagggcctcacaatgggcaattcagctgcctcccgggccgttgtccccgctgtcttcaaacaggggtcccctgtcccagctgccccaggaggaggggggaggcaggcagggccgaaaccctccagagcccagagggggacgcttggtggccgctgcagttacataaccataggatgcttttgtaccgtggaccttgttctagcaggatcctttcggaattgcacttttacatgttgggcgaatttgtgtccgtgctgaagtttattaaaggaaaatagatggagccttggagttgcacgtgtgcgtccctgcctgggaactagaggaaggagggccacatactctgggtccccatcagcagacccgaacgtcagagaagctgcatgtgcgtctactgggatcttctgagtaagctagaactgctgggccggcctgtgcaggttgttctggcttttaatcgtttccagtgattgaaaagcccaggctaccatccctccaaataactccagtgctaactcaaacctcatattcaccattcactttccggcagcttagaacctaccggggcgcaggacgtagttttcgtctttaccagagtgcgtggccgggcgcggtggctcacacctgtcatcccagcattttgggaggcccaggcggtcggatcgcctgaggtcaggagttcaagaccagcctggccaacgtggtgaaaccctgtctctactaaaagcacaaaaattagccaggcgtggtggtgggcgcctgtaaccccagctactcgggagggtgaggcagggagaatcgactgaacccagaggcagaggttgtagtgagccgagatcatgccactgcactccagcctgggcaacagagtgaggctctgtctcaaaaaacaaaacaacaacaacaaaacaaaaaaagagtgagaggacaaaacaggtgtatattcccattttatagatgacataactgaggcccaaagaaggaaagtgactcactcagtgtcacagtaaatccacggcaggaccagggccagaacaaaagtctcctgagtggcactcttcactatcacataacactgtggctcgcaacagccctggaagcaaagccagttggggtcaccaggcacctagaccctcactgcttgtctgctggcagagagccgctccttcttgtcagagtaagtaggaaggaggcctttgcctgtgtggacctatggtctggtgactccagccagcacaaacccatcccctgatggttggaggctgggcgagggcttcttgcaagatgcgcctgacagtgccttgttacasagcacctgctgtgcttagcattccacccggggccaagaggctgtgtgagcaggtgacagccagcctggccccgcctgtcacaagctgctaggtctgcacccttgccacccatggcagggggtctgacaaagactccccatttgtgaggtctgttcactgcctgtatttcgaacagggcctggctctgcaaacctgtgcaaactgtgttgatataggagccgacatgagcaagcagaggctcccctggctcaggcagccccaggttgggttggccagacagcaaccaggcacaggggccragtgcaggtcctgctacccagccaccacagcttcctctcacctgattctcacagcaacccaggcaggataggcagggtggggttatcttattttgcagaaacaggctttcccaagtctgtcaccaagtgaggggtagagctgggtgtccagccagatctaacctccagcccagagctggtgatgcggaaaatcagggcagatggcagcaggatctaaaatagggagggaagaagtcctcagttacgtaacagcgaggagactcycagcctacgcacagtagcaaccatggggtcctgccactcgagccagaccctccttcccttcccgttttgggctctaagtgctgccgcctgtgagagaatgtgctggaggagcccccagtatccttccagcgggaagtcggctctgtcaaggccattcccgagagcaggctctaggaattcaaagaccaagcaggcagagctggattctggagctgccctcaaagggcttgagggttatatgagcaccgtgcttgagaagttagtgatgatttctgctcaaagagacagagcaagagggctgaggggctctggtgctctgggggagatgaaacaaccccacagtatatgaggcctctctggtgtgtgcgggcactaaggaagggtgacttgtgagtggcgcattcggaggcacggggtgggcagctgttgagcaagggaccagggctgggacaggctgccaggacccccacaaccccaggggaggaaaggggactcagccatcatcatgcctgactcccaggctcccggatgaggagcctgctagccagggcttgaagccctccagtgacagggggtgcattacttcctaagaagccatttccttggttcagaaacatttatccaaagactgagccgaaatctaccacctcacttaatgtttttggcacctggttatgacccagacctgcacagaataatttaactcttctgaaatagacttccagatatttggaagtggccaagtcaggtttaagagctcaggtctcccatttgacaagatttccatctcctcgctgtctgaacaggtttcagctgtggttatccaatccctcattcttgatgacacacaccaggctgaatggtctttagagttcccctcaagccgccaagcgctctgagacaggtttactagctttggtgagatgctgacactcctcacatgcacgtgcccctcccaactactcaagtgagttcgtggcaaatctctcatctgatctgcataaacggattatatcttaggcggtgccattgtctgcattttacaaataaggaaactgagcctcagggaggtgaagtcatttgcccaaaatcacagagccaggaaacgagagagccaagatccagaccccgcaagatccagaccccacaagatccagaccccgcaagatccagacccckcaagatatagaccctgcaagatccagacctcacaagatccagaccccacragatccagacctcggctatctggcttctcttttttttgcgacagagtctcaatctgtcacccaggctggagcgcagtggtgtgatctcagctcactgcaacctctgcctcccaggttcaagcaattctcctgcctcagcctcccgagtagctgggatcacaggtgtgcgccatgcctggctaaattttttttttttttttgtatttttagtagagatggggtttcgctatgttggccaagctggtctcgaacccctgacctcaggtgatccacctgcctcgacctctcagagtgctgggattacaggcgtgagccactgcacccagccccatctgacttctatacccgcagccccttcctttaccctcaggctgcctcagtctccacactggggcccagagctgggctggactcagcgcagtcagaacctcgccttgcacgtggcgaaggagcggcaggcaggcaggcaggcaagcaggacagccagcttcctcctagtccgcagtttcgcggagcagcctggaaagggaggcccaggcttccctgtctcgtcgcacgtgtgtctgcagtgtctgtgctatctcccaggggcctggatgtcgatggaatgcctgagggtggagagagctgtggctgaggcctaccctggtggcctcagcatctgtggagatgtgtagagacagggagagtgaatggggaccaacctcaggagatgctgggtcccagaagcaccatgtgcttctcctttggtgagacttaattactctctaaaatgtaaggctactcccacttatcaaattatagatgagtttaattacagcacactgagtaaccacactgggctccttcagaaatagcagcaggctggttgctcttctcagcttcagctgtagccaccccagtttcaggaggaagtgcccgtggttcctggggcctggaagtgccgctcaactctgctgccagacaagtgcgggcgtggtggactgcactgggtacactgctgtaccggccaccaccctccggccactctcagccggtgagtgctctgcggggccatctggccacgtgttctgtgactgggtcatttactctgctgcaacctctctttctcctacctacatcgtgttctggataaaggttttggctcataatgtccgaccagaggtggacaaagtggtgtgggacctgccgtaagaaacagggagcatggcgcggggagagaagcctgtgccttatggagactcggggcaccttcaggaagcagggtcaacagcagcaggccactagggagtcgggagagctcggtgatgtcacgaggggcatcagactcttccctgcaggctggcgggactgatgggctctcgttccaatggaggtacaatgggacttccggggctgtgatgggaagggcggaggagctgccgatggtcccagtgccatattagtgtcacattctgaggggcagccctgtgccggacggcagctgctacctctccctctgcccctttattacttgaatctcttcgttgtgccctgtctaggcacggtcgtccgacagcaggcagcccactgccctcccagagctcactgtctagcccagggtgacacagggtaaccgtgggcatgacttgggccgggaagtgagaggctcgattccatcacatgtaaataaaaatactcattttcaatctaacacagtctgtcttcttccccgcacagccttggagcccctcatggacagctgatgcgagaggtgtgagtgggcaggggtctctccttacttagggagtcccatgactttgtcaaaggaataa

SEQ ID NO: 95020 - DNA, 248701 bp, Homo sapiens
  misc_feature (1)...(248701): n = A,T,C or G
cttcacctccttcttgacttttaagatggtggtaaaatgcacataaaatttaccatcttaaccatttttaaatatacagttcagtggcattaagtacattcacaaaggtgacacaaactccagagaatatgctgcttgcagctttgatgattgtatcaacggtgataagtcttcccatgtctgcaggagcagctgcagctaattatgcttactgggcctatgtgcctttcctgcccttaattcgggcagttacatgggtggataattctattgaagtatatgttaataatagtgcatgggtacctggccccacggatgatcgttgccctgcccaacccaaggaagaaggaatgatgatgattatttccactgggtattgttatcctcctatttgcctggggagggcaccaggatgcttaatgcctacaacccaaaattggttggtagaagtacctactgtcagtgccaccagtggatttacttatcacagggtaagtggaatgtcactcaggccacaggtaaattatttgcaggacccttcttatcaaagatgattaaaatctaggcctaaggggaagccttgccccaaagaaattcccaaaggatcaaaaggcccagaagttttagtttgagaagaatgtgtggctgataggacggtgatattacaaaacaatgaattcggaaccattatagattgggcacctcgaggtcaattctactgcaattgcacaggacaaactcaatcgtgtcccagtgcacatgtgagtccaactgtggacagtgacttaacagaaggtttagataaaaataagtataaaaggttagagtctctatacccttgggaatggggtgaaaagggaatctcatcacctcgaccaaagttagttagtcctgttactggtcctaagcgtccggaactttggaagcttactgtggcctcgcaccacattagaatttggtctggaaattaagctataaaaacaagagatggtaagccatcttatactatcgacctaaattccagtctgacaattcctttgcaaatttgtgtaaagcccccttatatgctagttgtaggaaaaatagttattaacccagattcccaaactataacctgtgaaaattgtagattgtttacttgcattgattcaacttttaattggcagcactgtattctaccagtgagagcaagagaggccatgtggatccctgtgtccatggaccaactgtaggaggcttcgccatccatccatattttaactgaagtattaaaaggagttctaaatagatccaaaagattcatttttactttgattgcggtgactacgggattaagtgcagtcacagttatggccgctgtggcaggagttgcattgcactcttctgttcagacggtacactttgttaacaattggcaaaaaaaattctacaagattgtggaattcacaatctggtattgatcaaaaattggcaaattagattaatgatcttagacaaaatgtcatttggatgggagataagctcgtgagcttggaacatcattttcagttacagtgtgactggaatacgtcagatttttgtattacaccccaagcctgtaatgagtctgagcctcactgggacatggttagatgccatctacaaggaagagaagataatcttacttcagacatttcaaaattaaaagaacaaatttttgaggcatcaaaagcccatttaaatttggtgccaggaactgaagcaattacggaagctactgatggcctcgcaaatcttaacccagtcacttgggttaaaaccatcagaagttccattattataaatttcatattaatccttgtgtgcctgttctgtctgttgttagtctgcaggtgtacccagcagctccgaagagacagcgaccatcaagaacgggccatgatgacgatggcagttttgtcaaaaacaaaagggagaatgtggggaaaagaaagagagatcagattgttactgtgtctatgcagaaaaggaagacataagaaattccattttgatctgtactaagaaatattgttctgctttgagatgctgttaatctgtaactttagccccaaccatgtgctcgcagaaacgtgctgtatcaaatcaaggtttaatggatttagggctgtgcaggctgtgccttgttaacaatgtgtttgcaggcagtatgcctggtaaaagtcatcgccattctccattctctattaaccagggacacaatgcactgcggaaaggcgcagggacctctgcccaagaaagcttgggtattgtccaaggtttcccccactgagacagcctgagatatggcctcatgggaaaggaaagaccttacatcccccagcccgacacccatgaagggtctgtgctgaggagtagtgaaagagggaggcctctttgcggttgagataaggggaagttttctgtctcctgcacgtccctgggaatgaaatgtctcagggtaaagctgatcatgagataggagaaaaccaccctgtggctggaggcaagatatgctggcagcaatactgctctgttactctttgctacactgagatgtttgtgtaaagggaaacatacatctagcctacatgcacatccaggcacagtacttttccttggacttattcatgatacagattcctttgctcacatgtttcccctctgaccttctccacatcaccctgttgccctgccacactcccctcaccaagatagtaaaaatagtgatcaataaatactgagggaactcagagactagcaccggtgcaggtcctcacatgttgagcaccggtctcctgggcccactgtcctttctctgtactttgtctctgtgtcttatttcttttctcagtctctcgtctccacctgacgagaaatacccacaggtgtggaggggcaggcccccttcacatgttggtcaggctggtctcgaactcccgacctcaggtgatctccccaccttggcctcccaaagtgttgggattacaggtgtaagccatcgcacccggcccactttctaattttttctcctactgtttttccctccgtagtctcttttgtggcattgtcttcctctgcttctttcttgtttgtgttttttggtgctattgtaggtcctcctgtcttctatacactctctcggtgatcttacccataaccatggttatcaaatctgtatctccatttttgaactttctcctgagctatacatccatggatccaacatcctactccacatctccactctgatatcccataggcatgccaatcttgatagggctaagcctgttgcttctctcctctggtcttcctctaggaatagcaccacctatacttcaagccagaaagtggggcttcatccttgacaacttccttccatataccctctaaatcaatcaaatcctaaaggctaccaatggttcctcttacttatctcatgaatccatccacttttcaccaatccattggtcaaggatatactcaggaacttctcgtttcttctcctgttactgaaacagtcttcggatttgtctgctgccttcactttctattgtctacgctgtcgctgctgtgatccttctacaacacacatctgagattgccactctcctaattctaaatccttcagttgttttccactgctttcaaaatgcaatgcaatgggctgggcgcagaggctcactcctgtaatcccaacactttgggaggaggccgaggagggcaaatcacctgaggtcaggaatttgagagcagcttggccaagatggcgaaaccctgtctctgccaaaaacacaaaattagccaggcatggtggttggctgtaatccctgctacttgggaggctgaggcaggagaattgcttgaacctgggagtggaggctgcagtgagacaagattgcgccactgcactccagcctgggcaataaagctagattccatctcaaaaaaaaaaaaaaaatgcaatgcaatggtttcgtgacctgccacaacgtggccctgcccagctcttcttacttgccattgctactcattttcccctgccctccccactcgactgaacagctctcagtatctcaaattcatcatgctctcttctactccagacttttgctcatgttgttccttcatttccaacattcccacttttccaacactgaccttcccttagctcatttccttcccttagctgaccttcccttagctcaactgctaaggtcttgcctccagctgccacctctttcactttcttcaggaagcctttttttttttttttttttttttttgagacagggtctcactctgttgcccaggttggagtgcagtgacacgctcacagctcattgcagcctcaatctcccagctctgccagtaaacagatgggcctctctggaccccagtttccaaaggttgaaggtcaagacaatagctctcaattccctacttttgttaggattgtatgaagggtccttccagcactgtcccagtatggtgctcggctaatggaaaaccaatctctgtaacttggactagttttattcccaccttatctgggaattataagggtataaggttgtaaaaatataaagttaacaatctgaccctcacttgggaatcataaaattacaatctgatatccactttacttggaacttatggtcagccctctgtatcctcaatcaacctgggactgaaagtatttgaaaaaattacaataacaaaaaataataaaaaatcatagaaataaaaaagtacagtgtaatatctatttacatagcatttacattgtattaggtattataagtacagcaggtcctggaataacatcatttcatcattttgctcagtggttttcttataatgatgagaaaaaaatagatttctggctgggtccactgtcacgttttatccatgtctgtgtggattttctctgtcttctggtgtcctgtcacatcccaaagccgtgcagtgcactttaggtaaattggtgcatctacacgatccgagtgtgagtgtgggtgtgtgtgagcacaccctgtgaggtgccctgagttggaataagccggtaaaaatgatctcacttttattaatctttatttttctctaagcgagagggatagggggtgtttaaaaaaaactttttctttgagacagagctgtgctctgtcgcccaggctagagtacagtgacatgatctcggctcactgcaacctctggctcctgggttcaagcgattctcctgcctcagcctcccgagtagctgagaatacaggcacgcgccaccacacccagccaattttctgtatttttagtagagatggggtttcgccatgttggccaagctggtcttgaacttctggcctcacgtgatctgcccacctcagcctcccaaagtgttgggattataggcgtgagctaaaaatcttccttaaatatatgcatggctcacacttatttcaatgtttaatattagaagtgttttggtctttatttcgaagtttaggggcgattttgtgaccacagatatgttgtaggaacttcactcatatcaattagcctgtggtcaaactgttttccttacagtcatttggcttaaagtttcagtttccaagaacccctccacgatgttaggtgaggacttagggaatgtggagatgacctaaagtttatgatgggaagatgtgtgtaggtgatatgcaaacacttttttttttttttttttttaccaaggacttgagcatttgtggacgtgggtcccctggaggggccctggaaccaatcaggactataaaatccttttaaggttttaagaagagcattgttatctctgtggtactgacgaagaccccgcaagctcaccgagattaagtgcccctgcctaaggttacaaagcctcttatcctcaggccacctccagtacagcaaatccaagccctcccgtctaaacttggcgccctgagtaccaagggtcacctcggcctttcaggctgaagggagggaggctgagtctcagggcagagtctgagtcccactccgcaccccaccctctgtctggtacagcttaccaaaccaaagtgcccaaagccgtgacatcccggccggcggctcgcaggcccccgccctccgcacgtcacggccgccgggtgcagtgccccctaggggcccctgggacgaggaggaagcgccaggtccttcccgccgccgccgccgccgccgccgcctgctcccctggcacgcgccccgccgccctcggcagccgcagctccgtgtcccctgagaaccagccgtcccgcgccatgggcacgcgtctgccgctcgtcctgcgccagctccgccgcccgccccagcccccgggccctccgcgccgcctccgtgtgccctgtcgcgctagcagcggcggcggcggaggcggcggcggtggccgggagggcctgcttggacagcggcggccgcaggatggccaggcccggagcagctgcagccccggcggccgaacgcccgcggcgcgggactccatcgtcaggtgagtgtcgggtctggccctggcccaggtctccagcggctgtggccccgacccaggggcggagcgcccgggaccgccgtggggagcggggcgcggggctgcgagtgtttggtgccaactcattaggggggccgggcggtgtgtcgggaaacgcgggcttgggcactgcggccgggagcgctggcggagaacgggggatccagtacccgaccgggcccgcagcgcaggtgggcgtgggcatctccaatgggcgcctagcggcatggaccgcacgcccggctccacgtgcgcagccggccgccggctctgatgcaatcgcgccgggcgcgacccagacggtaaaggggcggtgcggctggggcggaaaccaggggagggggcgaggagcaggaggagggcggggctgcggctcggcgcgccggctggcccggggttcgggaagggcaagcggagctcgggagaggcgggctcgggcccagcgccgcccgcgcgaagctccctggtgttgtgcgcccttccccgcgcgcggcccctcctgctgggctggggtctgtggctgacgtccgcttttcccggaacggcaaaggtggagccgggcccccgggacagccgccggggggaatccgagaggtctcagcgctggtttccagcttcgccgcgcagcgcccacggagtccccgcgcagctgggtttgcagggttttctgcgggcccagagcgaactgggagccccgggcccggcctttcccgtcccggtccccgcccctgggctccagccttccccgccctcgcccagaggggcgcacgggtctcgggccttgcagggcgagcccttcgggacaacttggrggtggcaagaaagccccttccgcctccctcggaactgggattaggaacgagttccaggatgcggtttccccggccagcggaccacctcctccattcacatcctcttccctttccttctagccttctttcttagtcattgcctgcttgcctttctctctgcctttccttcctccctctgctctcccattttcctccccactccccttctcccrtctcagtaaaatacgtttcctaggctctttattatgtggcggatgattttaaggggccatttatttagtttkycttgttctctgtcttctttttcttttagaaatggagtctcgctttgttgctcaggctggagttcagtggtgccatctcggctcaatgcagcctccgcctcctgggctcaagcgattctcccgccttagcctccagtgtaactgggaccacaggtgtgcgctaccatgcccggattattttattttattttcatagagacagagcaccactctgttaccaggctggtctggaactcctgggcgcaagccatcatccctgcccccaaaagcgctgggattaattacacgtcaggtcattaggttttaacctgcacgttgctgagactcatcttaccggttagagtctgaagccaggataggcggcaaaaaaactyctcccgtcatgctgttttattttctaggtaaactgattattacctgaaacttccttctttgctcatttcttgtctgtctcacccacctggaatatgagcttcatgagacagccgtctcttcggtgctatatcctaggtcctggagagagtgcccagcatgtaataagcacttgtgaaatggttacagaaggaatgcttcaagatttggggtcatctgtgggttttattcatacatattctttttttttttttttttttttgagacggagtcttgctctgtcactcaggctggagtgcaatggcacgatcttggctccctgcaacctctgcctcccaggttcaggcgattcccctgcctcagcctcccgagtagctgggattacaggagcacgccaccacgcccggctaatttttgtattttgagtaaagacaggatgtctcaccatgttggccaggctggtcttgaactcctgacctcaggtgatccgactgccttggcctcccaaagtgttgggattacaggcgtgacccaccgcgcctgggctattcatgcatacttttaggtttaaagccatgactgccttagagatgagtaaagaggttagtagggggctttagggcctgcactgggttctccaaactcaattccttcaggaaaatgggaggagtaacagtacttacctcaaggggttatggaaacaattatgtgagaggacacatgcaaaatacatagcccaggactgtcacatacaagacaagtccctcaacaaatggtsgctattaattttttttttttttttttgagacggaatctcactctgtcgcacaggttggagtgcagtggcgggatctcggctcactgcaacctccgcctcccgggttcaagcgattcccctgcctcagcctcctgagtagcwgggattacaggctcgcactaccacgcctggcttattttgtgtttttagtagagacggggtttcaccatgttggccaggctggtctcaaactcctgacctcgtgatctgcctgcctcagcctcccaaagtgctgggattacaggtgtgagctaccatgcccagcaatatttttacaattcactaagccaggggtccacagacgttttatatataatgggccagatagtaaatattttaggtttagtgatcctagaggcaaatcaaaattattagtaggtacatttataacaagagaaaagacaaatttaggccaggcaccatggttcatgcctgtaatcccagcactttgagaggccaaagtgggatgatcacattcccaggagttcaagaccagcctgggcaacatagtgagacacccatctctgtaaaaaattttaaaaaattaactgggcgtggcgcgtgcctgtagttccagctactcagaaggctgaggcaggaggatcacttgagcccaggaggtcaaggctacagtgagcggagattgcgctactgcactgcagcctgggcaatggagtgagaccttattttttatttttgcaattaagtatttttaattaaggtatgtacattttttagacaatgcttttgcacacttaatagatggcagtatagggtaaccataacttttatttttattttctattttactttaagttctgggaaacgtgccgaacgtgcaggtttgttacataggtatacatgcgccatggtggtttgctgcacccatcaacccgtcatctaggttttaagccccacatgcattaggtatttgtcctaatgctctccctcctcttgccctcccaccccctgacagaccctggtgtgtgatgttcccctccctgggtccacgtgttcttattgttcaactcccacttatgagtgagaacatggggtgtttggtttctgttcctgtgttggtttgctgaggatgatggtttccagcttcttccatgtccctgcagaggacatgaactcatgctttcttatggctgcaattttatttttgtagagatgaagtctcactatgttggccaggctggtctcaaactcctgggttcaagtgatcctgctgcctcagcctcccaaagtgctgagattgcaggcatgagccaccacgcctggctatattgtacctttcaattgagttatgtgcatggtttactgaaactctagccctgaattgattctccgaggattggagcaaagtgggtgggggtgtgtgtcagctagaagtcacctggaatagacatccaggagcggaagtgtattagtcagaaaaattaaagaatgagctccctcaaaagcatagtgacctgttgttcctggtgatgggactagatgaccataatccctcagcctcccaagtagctgggattacaggcaggcaccaccacacccagctaatttttgtatttttagtagagacggggtttcaccatgttggccaggctagtcttgaactcctgacctcaaatgatccacccgccttggcctcccaaagtgttgggattacaggcatgagccactgcccctggccagtaataatacattctgtataatagtcacagtaatggtgaaaataacaaagctgctgctgatggcttagttctgagttttagctacacatggcaacctagctagagagctcacattccttcccactgtcctcaaccaaagtggaagctcacaaggccatttttctgccccaaggacatgaaaatctctgattagaaacatttatgctactttttggatttattgagcctaatgactcctttttctttcttgctttgtcactgtaggaatgagtaaccccaaaaaatgaaacattacacatataacaagttgtagggagcatgaacctattttgttttattagcttgggtggtagtagcgttgaactcctttacatacctgtacaggcacccctaagatattgtgggttcagttgcagaccactgcaataaggggaatatcgcagtaaaacgagtcacacaaattttgtagtttcccagtgcatataaaagttatgtttagacaatactgtagcctattaagtatgcactagcgttttgtctaaaaaaaaacccatatataaggccgggcgtggtagctcatgactgtaatcccagcactttgggaggctgaagtgggtggatcacgaggtcaggagttcgagaccagcctggccaacatagtaaaaccctgtctctactaaaaatacaaaaattagccaggcatggtggtgtgcgcctgtagtcctggccacttgggaggctgaggcaggagaatcgctttaacccgggaggtggaggttgtggggaggcggaggttgtggtaagccactacactccagcctgggaaacagagcgagactccgtctcaaaacaaaacaaaacaaaaaaacccaaaaaacatatatatatatattatatatataaaatatatataatataatataccttaattataatataatataattatatataccttaatttatatatataccttataatatatataccttaatatatataccttaattatatatatacacaccttaatatatatataatatatattaatatatatcttaatatatatatataaggtaatatatatatacaccttaataataatatatataccttaattttaaaatactttattaccaagaaatgccagtgatctggtggaggatttgcctagatgttgatggttattgactgatcagggtgattgctaaagattagggtggctgtggcagttttttaaagtaagacaatgaggtttgctgtattgatggaactcttcctttcctggaagatttctctgtagcagtgctacagagaaaatggtaacattttacccacagtagtaggacttctttcaaaatgggcgtcaatcctctcaaaccctgcaactgctttaccaagtacttgatatcaactactgtaatcttttttttttttttttttttttttgagatggaatcttgctctgtcgcccaggctggactgcagtgctgcgatctyggctcgctggaacctccgcctctcaggttcaagygattctcctgcctcagcctcctgagtagctgagactacaggcgcctgccaccacgccyggctaatttttttgtatttttagtagaaacggggtttcaccatattggccaggctggtctcgaactcctgaccttgtgatccgcccacttcggcctcccaaactgctgggattacaggtgtgagccactgtgcctgcctaactactgtaatcttataaatcctttgttgtcattttattttattttaatttwattttattttattttaatttaattttattttattttattttttgagacagtctcactctttcacccaggctggagtgcagtggcgcgatctctgctcactgcaacctctgcctcccgggttcaataaattctcctgcttcagcctcccgagtagctgggattataggcgtgcaccaccatgccctgctaatttttttatttttagtagagacggggtttcactatgttggccaggctggtctccaactcctgacctcgtgatccgcccgcctcggcctcccaaagtgctgggattacaggtgtgagccactgcgcccggcctaataaggctgttttcttatcatttgtgtatccacgggagtagcacttttaaatttcttcaatagcttttcctttgcattcacagcttggctaactgtttggctcaagaggcctagcttttgacctatcttggctttcartacaccctcctcactaagtttaattatttctcggtttttatttaaagtgagagacctgcaactcttcacttgaacacttagaggccactgtagttactaattgtcctaatttcaatattgttgtttctcagggaatagggaagccagaggagagggagagagaagggggaacagccagtccagtgaagcagtgagaacacacaccatcatgaaccatcatggccacggtttggccaacacaattacaacagtaacatcaaagatcgtcaatcacacatcaccagaacaaacatactaaaaatgaaaaagtttgaaatattgtaagaattatcaaaatgtgacacaaattgagcagatgccattggaaaaatgactcccatagacttaaaacacaggttgccacaaactttcaatttgtagaaaaacacartatctgtaaattgcagtaaagcaaagcacaaaaaatgatgtatgcctgtatttttttttctatccacatccaccccccaactttttttttttttttggtagagaccaggtcttgctatcttgcccaggctggccttgaactcctgagctcaagtgatcctctcacctcagcctcccaaagtgctgggattacaggcatgagccactgcgcccagcccccatccccaactattttaaaagtctaattactttttgacgattgccgacttacctatagaagtgttcctttcagcccggcgaggtggctcacccctgtaattccagcactttgggaggcctaggtgggcggatcacgaggtcaagagatcgagaccaccctggccaacttggtgaaatcctgtctctactaaaaatacaaaaattagtgggacgtggtggcatgcaccagtagtcccagctactcaggagactgaggcaggagaatcgcttgaacctgggagatggaggttgcagtgagccgagatcgtgccactgccctccagcctggaaacaaagtgagactccgtctcaaaaaaataaaaagaagtgttcctttcatcaactatgaatggatcaagactatgaatgtttctgagaaaattattgctgttagtaagaatgtttttagtgtttaagggtagctttggggcacagaaaaaaacaaacgtacatttataagaaaaaggggaaagagccactgtagtatacctgttttacagatgaggaatctgagactcttagagacttgtccacgctagtaaatgaaatgcccagtaccaatcctgggccgtatttccacttagtgtctcagaattacctggactctgttaaaaatgcacatttctgggctccactgagacacgttgaatcagactttctagggctggaactgttattttttttgagacagagtctcgctctgtcacccagctggagtgcagtggcatgattttggctcactgcagcctctgcctcctgggttcaagtgattctcctgcctcagcctcctgagtagctctgggattacaggtgtgcaccaccatgcctggctaatttttgtatttttactagagatggggtttcaccatgttggccaggatggtctcaaactcctgacctcaagtgatccatttcaccttggcctcccgaagtactgggattataggtgtgagccactgcacctggcctggaacctttacttttaccaaactctccagtgatccttataccatgaaccgcttgggtcccacactccggtgctttcctggacccagacaaaaataagaacccagcatagccaaattaacagtcacgacaggctggaaagagtgcggtatatgggcctcagtcacccattattggatggatggattttagtgcttatttataaggtgatttgtaaactttcccatatggtcacatttattcagcacaataatacaattaattccctgggaatgaagtagctttatcccaagtgtttccaaacaaaactaactgaaatgttcccaggttatagacagttgcctgcacccagtccatctgttccggcccagctggcagtagaaagactggtcctggttgtgaatctgagcagctctctcccctaaagccccgcctgggaactgcagtgcctctggttccatttgtcagctgtgtctctctgaaaactggggaaagcttcccgatgcctttctgctcttggcagtgtaccgttgatggcattggctggaacttcttcaccccgcatttttgttaggtgcagtgcaagaccctgtcggagactgaaaacaaaatgtaaaggtggtcttagcactgaagcctgggggctcctgtggctgcgcctttggtctattgtgagagggggaaaagccagctcccagtgctcatgtgctgctgagaacatatcatagggtggtggcgaaggtagcctctgcagtcactcatcccagaaggttccataaagagctgagctcctaacacttttttttttttttgagacggagtcttgctgtgttgcccaggctggagtgcggtggcacaatctcggctcactgcaacctctgcctcccaggttcaagagattctcccgagtagctcagattataggcgcctgccaccacacccagctaatttttgtatttctggtagagacggggtttcaccatattggccacggtggtcttgaactcctgaccttgtgatccacccgcctcrgcttcccaaagtgctgggattacaggcgtgagccaccgctcctggactttttttttttttctttttttaaaaagaaattgagtcttgctctgccacccaggctggagtgcagtggtgcagtcatagcttactacagcctcaaactcatgggctcaagcggtcctccagcttcagcctcccaagtatctgggactacagtcacgtgccatcacgcccagctaaattgtttatagagatgggatctcgttatgttacccaggctggtctcaaactcctggtctcaagcagtcctaccgccttggcctctcaaagtgctgggactacaggtgcatgccaccatgccaggccttctaccacttttacctaggcctgctcaccccaggctggcacctccctcagaggtgggaggtgaaggtggctgctgctgggcatttaggaggtacaggtgcagactatgttgtggattctcagaggactgagaagctctctgtctctctctctaggaggctttgatagtgttatcaaagtgggtcyccagtgtttctggaactttcctccccttccttccttacctaattccttctttaaattccaggacctggaatttatcctgtctcracacttcttgtccaacagtgagccccctgtcttcacccccctaatcccctgtcttcacatccctcttcccactttatttgctttccccatggacccatactcagggttttgggaggatggcagcggagtatggtggaggagagcgattatttaaagtagaaacccaaagcttttattatagtaaacttggaaaatacaagagaaaaattcacccctagaaaattattgtaaacatctagtttgtttccctctgcatattttaaaaactggattgccgcattttaccttgtgttagtgtcttgatttcattgttacgccgcctaccccctccacagtgtacacttggagtgcrtccttctgtggtctagttattttcacttggaggaaggaactttcasagaaaatgtgttgtgtcagtcctttctactcattaaccaagaaatcacaatgttgttttctttctcaatgtagagaagtcattcagaattcaaaagaagttctaagtttattgcaagaaaaaaaccctgccttcaagccggttcttgcaattatccaggtaagccgagaacaaggttcagtcctactattttaggatgcctttcaatttagaaaatgattgtatacaaaagagcagctgcatttcttgccaaagaggagagggctcagttggcaatgctgttttctttggtcttttgcttctttggggtcacgggtgaagtactgccctgcttgagtgtgtcttcttttgtgaattttcctctctgaggtatgggtagctttcagaggtctaggaggtaagcacttacatgcattgcattacacaggatatatcgtggtccatgtgtcctcacaaatgcttaccaaatgtgatttgaaggtgctgggggaaaaagtggcactttgtttcaatggacacagatgctagatgaaacatggatatttggtaatctttttactctatcttttaaaacctgccrtaaacttaatgggacaaaagtcattaccctgtcaaaagggctttgcattccacatacttcttttggctgcaggctctggttctgagccacagttggccccagttgccatcctgcttggcacacttgtgtgatggcaggtgctgagaaataaggaggtgagccaagcctggaagcaaacacagcctgacagttgggctgctaccgcagggcttggcatgcccttagcgtatcaaaatagcagcctctggttccaccgtgctgcgtatttcaggattacagagctgtgctcragttacttacattctctgggatctgtagccacatcttgttacaaagaaagacaagttagaacaatagaaagaaaattagattagggctcgggcctcctgggaatctgcttactccctggctttccatctaaaggcaaaccatttcaactcctacctttggtatccccattttttggcttctttttgtgatggggtcttgctctgttgcctgagctggagtgcagtggcatgatcttggctcaccgtagctttgaccttctgggctcaagtgatcctcccacctcagcctcctgagtagctaggactgcaggcatgcaccatcacgccgggctaatktttgtattttttgtagagatggggtttcaccatgttgcccaggctggtctcgaactcctgggctcaagcaatccaccgcctcagccttctgcagtgctgggattacaggcatgagccactgtgcccagtcggtgtcctcatttttagagaggaaagctggctaggttactatgtcttctaataggagggatattattttccttaaaaaagtgacataatttgaaggcctgaggaattactctgttaaatactggccccaagtccctttttataagcagcaagattgtttttctgcaccttccatattatctttgtaattagatcatctgtaatcacaaaattcatctctggattatcttttgtgccttttcaagctatttttatgttgttatgttgtttttaccttcctaaggcaggtgacgacaacttgatgcaggaaatcaaccagaatttggctgaggaggtgaggactgctgcttttaaaaaattcactataacttttaacaatacattctcttatagtgacgaataaccttgygttcctttttcaggctggtctgaacatcactcacatttgcctccctccagatagcagtgaagccgaggtaataatggcagagctctaaactcttgcttcttctttcctcttgagacttaataggcccattggcgtctcttagtggtggctgggacagatctaagatttgcttgtgrctgaatgttagagggaagacttcacttcttttctctagggtaaatgcttcatgatatccttgtttcttgtcatttgtatgtttctacygaagacttgagttgcgacttgttgagttcggttgtgtttcttcagctgcggtggcagcgtcatctagtggaaattgtcaggccgaggcgaggaaactggaccttggaccacagatccctgtgccagggcccggcccttctgtggttagcttttcttcctactggcttcatgtgacagaaaacctcaaataatggaatcttaaataatgtacaagtttatttctctctctctctctttttttttttgagatggaattttacttttgttgcccaggctggagtgcaatggtgccatctcggctcactgcaacctccgcctcccaggttcaagcaattctcctgcctcagcctcctgagtagctgagattacaggtgcgtgccaccacgcctggctaatttttgtatctttagtagagatggggtttcaccattttggccaggctggtcttgaactcctgacctcaagtgatccaccctccttggcctcccaaagtgctgggattacaagtgtgagctactgtgcccggcctagaagtgtatttttctgggacatgaataaagtttggaagtaggcagtccctggttggtgatatcaccaagtcgcaggagctcaggctcctgtccctctgctctgccgcctttgtggtttggttaacaagcactttgttctgattgatcagtgaggcccagcaggtctgctagtcatttgtgagacaaagaatgggaatttgtagagtttgtatctggccttgtgctatgtaaacaagggggcattggtgagtcttatttgagtcctatggagaagagcagttctttgcagtacacagaggctgcagggatttgttaaccttccctcttttccaggatcacagggctcaggtaaagttcgttgtcaccaagaagaaaaaggaaggacaaagacaggcccctgctgtctttaaagacatttcctgaaagtcacagttctacatccatccygttgtcccctacttagttgcctggccaactgcaaaggaggctgggaagtgtagtttttataccaggaagccttagatcatttattagcaagctaaaaaccaagagtttattactaagaagagaaaggaaactatatactgggcgataagtgtttgccacacttgccattgtagcgtggtacaaatatgaagtgttaaatatgtaacaaatacctatgataccagcagtgacagcatgcaaaggaagttgttgttcatttgcacgatacccactgtctgcagcagaatttgcttttctttctttttttttgagatggagtctcgctctgtcaggctggagtgcggtggtgcaatcttggctcactgcaacctctacctcccgggttcaagtcattctcctgcctcagcctcccaagtagctgggattacaggcgcccgccaccatgcctggctaattttttgtgtttttagtagagacagggtttcatcatgttgaccaggctggtcttgaactcctgacctcaggtgatggcctgcctctgcctcccaaagtgctaggattacaggtgtgagccactgcgcccagctggaatttgcttttctttaggttgttttgccactggtgtttttttttttttttttttttctgagacggagtctcactctgtcacccaggctagagtccaatggcgcaatctcctctcactgcaacttccacctcccatgttcaagtgattctccctgctcagcctcccaagtaactgggtttacaggcacccgccattatgcccagctaatttttgcatttttgtagagacggggtttcaccatgttagccaggccgttctcgaactcctgacctcaggtgatctgccctccctggcctcccaaagcgctgggattacaggtatgagccacctcacctggccttgacactggtattaatagcccttgattttcgtcgttgttgtttataattgacacataataattgtgcatgtgtgtggggtacagtgtggtgtttcggtacttgcatatgttgtgtaatgatcaaatcaggttagttacattcatcacctagaacgtttatcatttctttgtggtgatagctttcaagatcttttctagctgtctggaaatatacaatacattgtcattagctttagtcactctactatgtaagagaacrctggaatttattcctcctatctaagtgtaactttatacctactgatggaccaacctctccccatttcccctcccccatccctctccagcctctggtaaccaccattctattctctatttctatgagatcagctttcctagattgcacatgtaagtgacatcctatgatatttgcctttctgcacctggcttatttcacttcatgttatgtcctccaggttcatccatgttgccacaaatgacaggatttcrttcctttttatggttgaatgatactccattgtgtatacacaccacactttctttatcctccattaatgggcatttggattggttccatctcttggctactgtgaatagtgctgtaacaaacatgggaatgcagacggcttctcagcatagcggtttcagttcccatgcgtatatacctagtggtgggaatggctgggtcatatggtagttgtttttttaattttgtgagaaatcttcatactgttttctctaatggctatattaatctgcattcccaccaacagtgtacaagagctcccctttccacatatcctcgccagcatttgttattgtcatttttgataatagccattctagcttgatatctcattgtggttttgatttgcatttccctgataattaatgatgttgagtgttttgtcatatacctgcaggccatttgtatgtcctttgggagatgtctgttcacgtcttttgcacattttttatttgaattatttgtttttttgttattaagttatttgagttccttatatattctggatgttaaccccttgtcggacgcatactttgcaaatattttctcccattctgtaggttgtctctgctttgttgattgtttgctttgctatgaagaatgtttttagtttgatataatcccactgatgtatttttgctttcgttgcctattttgttgaggtcctatccaaaaaaaccttgtccagaccaatgtcatgaagcatttcccctgtgttttcttctagtagttttatggtttgagaccttatatttaagtctttaattccttttgagttgatttttatagaagtgagcgatgagggcctactttcattcttctgcatgtggatatccagttttcccagtgctatttattgaagaggctctctttccacaatgtgtgttcttagtacctttgccttgacttattttttgacaaggaatcatttattccgtatttttctttgggaaaattctcatagagtgaatttgtatggtgttatattgaaaaagagtaggtaccttaatttattagttaagatttgtgttggcatttgttgcttctaccaaatgcttggtacaggtggcaatagtttcctcgcttcattctggtctctgcttggacatcgtggcctctgaccaccctccacccatcatcactctgttagccttttaccccactgaacctttatttttctgcatgtcatttattctttccagtgattttattattattattatttggaagggaggaacttccctcctccactagagtataagatccacgaggacagttttgtttatagctgtatttcctttacttagaactgatacagagtaagtgctcaaaccatttgttgaatgaatgaaagaatgccaaatgaatgaaacaaagctttctttctgattttgtacctcaaatggtttcccctgccactgcacaggtagtgatttttgctaggcaatgaaacaaaaatggtaaaccaacccttccccagagcctctgagtgagatctatatgcaaagataagtatcttctcacttgtgagcaaatatttttgttaagtgagatgaatcaggatcttatctcctggcataaaatagacagagaggacaaagcattgcttatttagagacacacccagacatttattagcttcccaaaatgtagcttggtctttttcctaaatagtgaattattttagtgtttcccataaaaggagctgtgcatgctaagaatttttctagcataagcctttggaaaggcttcttgtgtgtcattgaggtccagataacccgagggcctctgtgactgcttggacgtcatgattagtgagctgtgttgaacacattgtgtttgaaacgcacaggcttagctgggccagattggaatgcttcagattcatgcttcctgtccttcctgaaaactggcagtgtgtttggcttaaagtatgcttgttgacagagaagtgtcctttgtctatctaaaccttaatagctgttgagctttggttttgttctgttttgtctttttctggcacagagtagagccatagaaaggcagagaagtcactaaaaaattcagccaagccttttaattttttttttgagccttgtacacatgatgaaaagaaaaaaataggctttttattatgctttacaccaagtttccaacaaggagcaaaacaacaacaaactataacagatgcattttcatgaatccactttttatataaagcttcctttgttgggtctcattttcacaaaactaatttttattttgtttttttgttttctctttagattatagatgaaatcttaaagatcaatgaagataccagagtacatggccttgcccttcagatctctgagaacttgtttagcaacaaagtcctcaatgccttgaaaccagaaaaagatgtggatgggtaagaaaataaaatcaaataatcaacctttatggctaaatcactttttctattgtgcctgcttttatttttctaaatttcttctatttatttcaactgtgtcagtaattggataaaaaaatcattttaaatatttcaggagtctataggatttttttttttttgagatggagtctcgctctgttgcccaggctagagtgcagtggcgtgatcttggctcaccacaacctccatctcctgggttcaagcgattttcctgcctcagcctcctgagtagctgggattacaggcatgcgctaccatgcctggctaatttttgtatttttagtagagacggggttttaccatgttggccaggatggtgtctatctcctgaccttgtgatccactcacctcagcctcccaaaatgttgggattacaggcgtgagccaccgtgtctggccatctgtagccttttaaaattctgcatgcaaaagttacatattttggaaaatacattagcccttttatagtgcttcagtgccatatgatcttacaccatcagattcatttaataaattccggtctgacttatacaatctttagccagctctattcttctaatagttttttccttggtaattctaccagaccagagaagaaaacttagaaacctgattccccagcagtaccatattctgtcttagtcccaggccagttgagaaaagcaaaataaatacttttcttaatgacacaaggttttatttgaaatttggaggggaacatcataactattgggtgctgtaatgttggcctgtgattcatgtcatggagtgacataagcttcatagaacaaaggataccggccgtctccagtgggggataagcatgcttcctggggattaaaaccccattttcctccatggaaatataggaagtgttttgtactgtggccaaaaagaacacaatgtgttaatggttataggttgtaagcagatttataaagttagattccagatccggtagaccctgcaggggctggatggggaggctaccaccttcctgagacacccagcaatcttccattctagccttttattgtgacttgagtagacccaaacacaggctgaaaaggtgtcatgaacacctccagtcctggctgggcacagtggctcacacctgtaatcctagcactttgggaggccaaggcaggaggatctcttgatctcaggaggtcaagaccagcctggacaacatagtgagacctcatctctattttttttttttttttttgagacagagtctcactctgttgcccaggctggagtgcagtgacacgatctcggctcactgcaagctctgcctcctgggttcacaccattctcctgcctcagcctcccgagtagctgggactacaggtgcccaccaccacacctggctaatttttgtacttttagtagagacgaggtttcaccgtgttagccaggatggtctcgatctcctgacctcgtgacccgcctgcctcggcctcccaaagtgctgggattacaggagtgagccaccgcgcctggccccttgtctctatttttaagtaaataattaaacatttttttaaaaaacgacaatctccagtcctgtcgtagactaactgtaaaaggagaagaagcactaatccatgagaaaactttcagaacttgaaggtcctagggcatagtttcaagtctttcataaaaggaggggaattcatgctgaggcccagccaggaaaaaccaaccaaacaaaaacaacagagagtaaaaggagaaattacgaaaatggttctaaatgtctccattctgttactgagattgacgtgctcagtttaggctagatagctgtggaatgttttgtcctagatttgaacagggaaaggcacagaacccttcagaagtgtgtggtcactcattttttccactgccccccaccccgacttctcaaggagataaatatcgaggtcaagttgaaatcagacctgtgacctgtgcctcaatcccaggtcttactgggtcactccagatttataggattggttctgggttttgagtggactgcaggaccatgcttctgtgtaactctagggatgctagtccattggggtccattgaaaggagctccctggagttgygaagtgaagccctgtatggctttaggctgtgtcctggtatattggcagaaccggaacacccaatgtcagggccagggtgaagtttcctaaggtactgccttagaattttctaagacctttattgaatggcctttattgcctgctttctctttaattcattttttatgggtttttttttttttttgagatggagtctcgctctgttgcccaggctggagtgcagtggcatgatctcaactcactgcaacctctgcctcccaggttcaagcgatcctcctgcctcagccccctagtagctgggattacaggcacgtgccatcacgcccagctaccttttgtatttttagtggagttgaggtttcgccatgttggccaggctagtctcgagctcctgacctcatgtgatccacccgcctcagcctcccaaaatgctgggattacaggcgtgagccaccatgcctggtcctctttaattcatttttatgtattctgtctatcaaacattgacttggatgttatttggggttaatatatgtacattacacgtgagtgatttttttggctgggctttgacttaacctacttctttattttctgattcagagtaacagacataaacctggggaagctggtgcgaggggatgcccatgaatgttttgtttcacctgttgccaaagctgtaattgaacttcttgaaaaatcaggtaggatgctccttgagaaatgccgctgatttctatttattggtatttacattatttttaataaggatttgtttggggaagaattaaaaatttttttaaattattattctgatatccttttaggatgtttctagaagattctaattgaacatagaagtgatatttcacgttgactttttttatttttctcatcttttgggagatacaratgaatacctagaaactttttctagtaagaccatcttataaattaaaagagaaattagtagagataaacgattagccctgttttaaacatgctcaatttctctcatgaaacagtcaaaataaccacagtaaaatatgcttccagtttcagcttactaaatctrtcaatatrtagccttagataagacttacgttgaagacttaaatgaggccaggcacagcggctcatgcctataatctcagtgctaggcgaggccaaggccagaggatcacttcaggccaggagttcgagaccagcctgggcaaacatactgagaccttgtctctacaaaaaaaatttaaaaattagctgggtatggtggtgtgcacgtgtagtcccagctatgctggaggctcaggcgggaagatcgcttgagcccaggagtttgaggttacagtgagctgtgattgcaccactgcactctagcctgggcaatatagcaagaccctgcctcaaaaaaaaaaaaaaaaaaaaaaagagaagaagaagaagccggtagatgtagtttagggcacaggagcctaggttgggatttattggtgagcagcttgcttttcagtagtcaggacttaatttccattgttgtccccttgacttggcgtttttatgtcagtgaaatagaaatgaatattttctctttcttcattattaagtttaatgagtaaattactaccaagtatttatatatttaagggctttctgagaacataaagattcaactaattgggccggcacagtagctcacacctgtaatcccagcactttgtggagccaagatgggaggattgcttgagcccaggagtttgagaccagcttggggaacatagggagactccatctctaccaaaaaaaawtttttttttaattagccaggtgtggtgacttgtgccygtagtcccggctacttgggaggctgaggtaggagaatggctggagcctgggaggtcaaggcttcagtgagctgtgatcacaccgcagcattccatcctgggcaacaagcaagatcctatctgaaaaaaaaaaaaaaagaaaagaaaaaattcaacgaactaaatctttttctctactccagtttgaatagaaatgaagcaaatgcccctccctacccctgaacatccaacaatcaaagaaaaatttcaaaaatatatggcaaagttttattaaaaggttaacattcaggatatatatgctttttggacagtaatattaagctcaaatctatgaaataatccatatatacagtgctttttcattacgtggattatcaagatgaagattctgagccacttcattagaaagtactcaaagaaaagagtaaattaggctggtgagttatagttacatattgtggaaagaaattcagcaacaggaattggaaccaaaagggtttgaatagagaatttttgttgattacaacaccccactcctagttcctagtcattgtaggttggtgctgagaaagttcaagttttaaaagggttttttgttgttgttgagacattcttgctctgttgcccaggctggagtgcagtggcgtgatcttggctcactgcaacctctgcctcccaggttcaagtgattttcctgcctcagccttctaagtagctgggattataggcatgtgccatgacgcctggctaattttctatatttttagtggaggcggggttttaccatgttggccaggctgatcttgaactcgtgacctgaagtgatccgcctgcctcagcctcccaaagtgctggaattataggcatgagccaccacacccagcctaaaagggtctttttttcttaagataaagttcttaaaggaaggatctgaagttttgagtataatattgaattttcatttggttagtaggtgtcaacctagatggaaagaagattttggtagtgggggcccatgggtctttggaagctgctctacaatgcctgttccagagaaaagggtccatgacaatgagcatccagtggaaaacacgccagcttcaaagcaaggtaaatttcatgttagaaacatacatcttgaaggcttctgttagaacagaagaaagtctagaaatgtataagctaagtgcttaattcaagaaattagaggaagaaaattgaatagacccatatccattaaagacattgaatgagtctactcaccagacaaacaaacaagaaaaggcaacaggtggttttacaaatgagctctatcaaacaaagaacagatcattctaatacaatccttttctccagcaaatggaaaaagaaggaacgtggcctaacagactttatgagtgccaaaaccaaagaagggtaacatgctaaaggaaaattaacaggccagtttcagctatgaatataaatgaaataatcgtgagcgaaatctgagaacaccaaatacagcaggaagtagggtttattttaggatttccaggtgattgaacatgagaaagtctgtcactgtaattcaccacattgtgattaaaaactaaattctcaccatagtaagtacagaacagtcatttggtaaatctaatatgcattatgaccttttgaaagtaattataattttgatgaaaattattaagaagacccatataaaagcagaggtatcatcttcatggagaagatgcaatatcttaaagatactaattgtctgcaaattttgtagaatttgacagtctgattctgaaatccaaatggaagcataaaggacaaagagagtcaagacaattttgtggaaaaactaggtgggagacattcccagccacacagtgtgaattattatgcacttacagtaattaggataatatggtagacaaacagacgatcggaacagaagaaagtggaaatttatgcatatatggaagcttgagagcaggtaccgcagatcagtggggaaaagattaactattaaaggccgggcgtggtggctcatgcctgtaatcccagcactctgggaggctgaggcgggcaaatcacttgagctcaggagtttcagaccagcctggccaatatggtgaaacaccgtctctactaaaaatacaaaaaaattagccgggcgtgtcggcgcaagcctgtaatcccagctactcgggaagctgaggcaggagaatcgcttgaacccgggaggcaggggttgcagtgagccgcgatcgtgccactgcactccagcctgcgcgacagagtgagactccgtctcaaaaaaaaaaaaagctaaaacattaactattaaaaatggtgctgacttaactagttatgtatatgagtctagcataggattactaacctgccactacatataaaaatcacttctatattaaaatacctaaatgtggaaagcaaaactgtaaaacttatagaaaaaaatataggcgtatgcatttaagaggttggcgttggaaggatagcttaagagaccccaaaagcacagattgctaaagaaaaggtatataaatctgactgcatccaaatttttaaaaaccccaaagtttttctttctgaaaagaagttcttaaaaaagtgaaaagacagctatagtgtagaagatatttacaacaaacatttagccaataaktagtgtcttataaaagattcctacaaatcagtgagacaaagacaatctgttagaaaaatggacacatgacagaccactaacaggtgaggaacccgaggtttaaaagacacgtgaaaagctgtctggtttcctgctgtttttgctcaccagtcatattggcagtaggtaaaaagtgccagttagccatattgacaaatgtctggagctatgggaattcatatattgctggcgggagtttaaatttgaaataggcatttcggaaagcagtttaatggagtttgagctactctttgacccaggaatttcactctaaatatatatgrtatggccaggcatgatagctcacccctgtaattccagcactttgggaggctgaggcaggcagaccacctgaggttggggtttcaagaccagcccgaccaacatggagaaaccccatctctactaaaaatataaaattagctggatgtggtggcacatgcctgtaatcccagctattcaggaggctgaggcaggagaattgcttgaacccgggaggcagaggttgcggtgagccgagatcacaccattgtactccagcctgggcaacaagaacgaaactccgtctcaaaaaaataataataaaaagtgtatatatatgtgtgtgtgtatatatatrtataatagacaaaacttgcccatatatatacaaaggtgtgtttacaaatggtcagagcagcatgtttatagtgcaaaaagttttgtttgtttgtttaagacagaggggcagtggtggttctgtgggtcttggcccctttctgctgtcagggctgagttggctccatgagttggtgaaagcggtatctagccaggttcaagggagacaggggcaggatttcgccttcactgatgggcaggccagcggtcccctgtggaacggtgactattgaatattgagaggacagtatccctccctgagcatcttctggagcttgatgaccactagggaatgtatctgagtcacgcgcaccaaatrtgttaccggtggcagctattcgagttatcccgagttcgtgctggtgtatccgtacagttctgcagcaacttcagctcttgcctcctcggaagaaagaattggactgagggccataaggcagaaggagagactgaggcaagtttcagagcaggacggaaagtctagcaaaaagctctagaacagtaaggaaaggaaagaaggaaagtataacttggaagagagccaagcaggcgacttgaaaaaccaagtgcactgcaacaagtatttaaacagtgatctaaatgcccatcagggtgaaaggataaatcagtatagttgcatgtagagtatgcatagtcatagttcataaaacaatgatatacaagcagtgaaaattaataaactagagctgtagatagcaacatgttttcttgttttgttttttgtttgtttgtttttttgagacgaagtctccctctatcccccaggctgcagtgcagtggcgcgaactcggctcactgcaacctctgtctcctgggttcaagtgattcttctgcctcagcctcctgagtagctgggactacaggtgtgcgccaccatgcccagctaatttttgtatttttagtagagacagggtttcaccatgttggccaggctggtctggaactcctgacctcaggtgatccgcccacctcgacctcccaaaatgctgagattacaggcatgagctaccgcgcccgggctggaagaattttttaaaacactgttcagtgaacaaaaacccaagttgcagaaggatgtatttcatacaacaccatttatatgtgtctgaaagcaacacaacatatatatatatatgtaatctaatacatacatacatataatatgtattacatataatccttatatatatatagaatcttaatatatatatttaggtcaggacatttagatcactgtttaatatatatattaggattatatataatatatattatattattatgtattaattatataatccttatatatatattaggattccatgcaaatgaagtaaaaatataaagaaataatgcaaactacgaaccaaatccgaaaagcatttattgaggcaaggatgtggatatagatggaaaggaaacctagacaccttcatgccttttttcttaaactgggcaataggtgttgtctaggtatgttaggttattgttttccatttctatgtctgaaatgattgtttttcattttaaaaaatgatggtacagctcacagatctaaagcaaagtgaagttttaaatgaatgcattaagtacaatcagtaactacagaatgtgatctaaaaatacatgttcctcatgttgcagggtgagaatggaaatgaggagtaaattgtaatcgtgccagggaagccaggtgtctcagcagatttggaatctttgcatggcaggtggatccaatttatgtaatgcttgggttaagacagctcaggaaggcagccttgcaatgaaacgtgaacctgtgtgcgttttyagcagtcaccacatggtggcagcctatccaagaaaattcaagggcaatagtttgcacttgagagcccagaaattttgatttggaagctcagtggaagaggaaaataaaccgtgccctgcactgaacagctgtggtgaagagagaaaataccttccttggcaattgaatgttttcgcagctgtcacagatacttttgctagttgtatctatatttttgaaaaacaaagacatttttcaaagtacttttttattacgggaataaatcaccttgtctctgtactttgggatgaatctcatctgaactttgagaacgattaagtggcttcactttctggagaatctggtcattgggtaacattcttgttttcatatggaccagaaggttctctttcatagttgatgttgcacacacgtttttttccctaagtccttggtatttatagtggcaccattgcgaatgttagaggctatcaactttcattcttattattgcttcatctttgtagccaaaaatatgggaagaaatgttcatagccccgccccatacttgtccccctctacctggcctacctacctacgtcaggctcctgtcccaccacaaatgacagcctgtgtctttcatgttagcagctagtctttcactagccacatacttccccgtaacccatatgcctccctgtgtctgcctgacgtttgaattgtcactattctgttgttgtatttttacaagaagaatgtatggggcagaaaacccttgccattcatttcctgagtaggaattctagccttccttggagtcgtggtaatatggagacatggtaatatgtggattgtaccactcaatggctgtctggaggccacagtggtgcaaaaagccacctaggcatgggttagtgtcctggggcacccaatcaggacaggacacctggcacacccttggaaaagcttcactgtgaaaaacactggaagtaaaaattttaacaacagatagggatttttttccccttgagacagaggctcactctgttacccaggctggagtgcagtggcgcgatctcggctcactaaagcctctgcctcatgggttcaagagattctcatgcctcagccacctgagtagctgggattacaggcgagcaccaccatgcctggctaatttttatatttttagtagagatggagtttcgccatgttggccaggctggtctcgaactcctgacctcaagtgatccacccacatggccctctcaaagtgctggaattagaggcctgagtcactgtgcctggcccacatggggatttttgttgcccagcttaatcaaccaagaataaaagtgcattttaagattataatctatttaacttctccttattggcaatggtaaaagagttaaggaaaaaagagaataagcttaggattatggctactaagtagaaggacgttatctttgacgggcatttctgttgtgcttatttgtacctgacatggaacaagacccccccatcccctcaacacatacctgctgtgggacatctggctagagatttccaaagctgagggtgaaaggtttgggcatcggtgtgactgtgtaacactagagttctatctaccatctcttaaactacaggtagtcttaccggtgtgggctgaccttccggttatcaggcagcctgctgcaaccactagaaactgcctttgaaggtttccagtccggcacaacatttgtgttctcattaaacagtagagcataggctttggggacacacagctctgggctcaagccttagctgttgctgctctgagcctgttccctcgcgtagaaaggcaatcataatactccctactttatggggcagttgtgggaatggaattaaatgctaatgtgggccgggtgcagtggttcacgcctgtaatcccagcactttgggaggctgaggagggcagattgcttgagcccaggagtttgagaccagcctggcaacatggcgaaactccatctctaaaaaagtacaaaaattagccaggcgtggtggctgtagtcccaggtactttggaggctgaggtgggatgatcacctgaatctggggaggtcgaggttgcagtgagctgagattgcaccaccgcactgcaacctggagtgcaggctggaggaagagaaatatatgggtcaattaggcaaatcactcagatcgtaagtagatatactagtaaaatagcgtgacttagggtccttcactggaagcctggtattaatgcttccattgtgtgggtgggggaaggagagagtgtctccagctctctgtctgtgaggtctcccagccgaatattggccaagggagtgaaaccagaagcaagactaccatgagacaacgttccagagaraggagggactaaccagagcaggtgcccagctttggccagtcaggctcatcttccagtcctcagtagattattatcaactttaagtgatgtcacagactcccttcctccaaagctgtggacctcttccttcccatgcctcttgttacttggaagtcactctacttccaaacatgtcggctggagatccctgatgggccagttactactttcaggctctgtaggtttaaagaatggttatatccagttagttacaaatagaaatcgatcctttctctgtccgtctgtctaaacggaaggatattctgtggacgctgattaggtataaaatctccacggagcctgagcatgaagaattgaccttcttagggttccacagaaaccagaatagacttctgtgtttggtagctttgtaacttacgcccgttgaggtgtacggttgaaaattgagaataaatttcctgttctgtttctgagcatcttttccaggcttggagatgcgttgagcatttccacggagaccctagaggtggggaggggaagaacgcctgggcatttgtccaaattagccatatgctgtggagtgtcacatgtcaggaagccaaggcactggagctagtgtttttgggcagggctagggaaccccccgcctttcctccacccaaacgcaggcccccacacccagcgtcctgggccctgcaggggaatgacactgttggtttcactctcaggaatgagcctagatttggaggtaacctcttcctgaccccgatgatttcactctgatgccaaaaccagtctgaagtgggtgtggttttgcatttggtgtttacaaggtggagtggtgccctctgcacggaagggagaggtgggcaggtacggcagggccctgctccctcgggagtctcctctgaacctgtggttagggcacagctggacaatgctgaaatggtctccagctgggagatgaggtaaacctcagctgcatgccgaagaaataacctagaaatcagagaaccgttttattttgtttttctcagaggatctcatttctccctctcctcctgagcacagagaccctcaaaactggtattcacagaaggaaaaaatataggtctttcacctttgaaggatcaaagtgtctagggttttttgtggttttttttttttttttttgaacaaagctgaactattacaaagtccttttcagtttaaatttagtgcatggcatggctcatgaaagacttttaaaagtgaattggaaaattctaaatgtrcttgtattatacatgtgaaaggatgacttcttaaaaaaagaataatgtctgtcccaaacgggagaaggaaggaactctagcttttaaactgcactacattagtgagttacatgacaattctccttttaacaggatggaatgcacttaaagcagtaatgtgctatggtgacagtaatgacagacaatgttaattgacagaatggctactctgaaccaggcactgtcttgtactcctgttatctcagtggtcttcacacttattctgttaggcaggactgtcatcctccccacattacagatgaggaaactgactgaggcttagagaggagactttgcaaagatcatgtgattaaaaaatggtagaggtggcaaaacagcctgtgtttttaacactgtcccatgtcagctcttattccagatcatcacataaagtctaatctctaatcttgaaaaccraaaagcacctgccacctcagataagagagaccaagaccctagacattcgacttgtgttgaattcactcttattttgttttgatgtttgtaatcccagagccatacttgttaatgagctgaagtagagtgaatgctgtcccctccctgaggcctggggctcatcatcagctctccaggctcccctttcagaggggatggtgagcaccttcggagagggcagggatggacacacaagacagcctcagttatgtgagttcatcccctcccctgcctgctgtgggtgagatggagaaaaaagcactggaccctcctgggcatcacagccttgtacttagcgagtggctgaggtcatcagtagcccaggtcatcagtagtgtggaattaagtgcactgaatagtgttggcccctgagctttgtttgacagatttagggggtcagctcaccactttcccctcttgcttctgtctgatcattgctctgtttgttaataccaaggaagaaagtgaatagaactttttagagagccaaaaaaactttattagactttatgccattcattatacttagcagtgttgagggaaggatttgtgagacgatatattcaaactaatgggcatgagaccaagaaggggctgtgtggcgggcgcggtggctcacacctgtaaccccagcactttgggaggccgaggcaggtggatcatgaggtcaggaatcgagaccatcctggctaacacggtgaaaccctgtctctactaaaaaaaaaaatacaaaaacaaaattagcagggtgtggtggcaggcacctgaagtctctgctactcgggaggctgaggcagaagaatagcatgaacccgggaggtggagcttgcagtgagccgagatcgcgccactgcactccagcctgggcaatagagtgagactccatctaaaaaaaagccggttggggtgggggcatgtaattaacagactgattggtcttaggtggctcagaatttaagctgagaaattaagattgagaagaaatgatgtattgtcgttatatcaaatatgtgagtaaaaacataattaaaacaccatctatctccagttttcccaacattacctcccttttatgatgcccttcctgtaccttattaggcaaaatattctaatttcagtctcattggattatgttctaaatgtttgaaggttggtctgaacatggaatgtattttctcatagatataatagtataaatggtgttagggtcatgggattgcgaagccagttccactgcagtagaatcatattgacttgctttccgatttttctgtgggaaacttcatctggagctttaatgcacttcttagctgtggggtaagtttcagcctccatgacgcttgtgttactttgtagtcacctgtggccaaccacaaataaatctttgtggtcatcaggggccagtgaagtgtatactgcacaaaagagagcctaccccaattctggaagaagggctgcaggcctgtgtcccacaaagaacaggcaggaagcatcaccttcagcccactggcagcaggtcatctcccatttgcttttctgcactatcagcagagtctggcttccttttccaccccctctccaatgtgaatgctttttaaggtcgtggaattagaatttaaaaaaaaaatttttttgagacagagttttgctcttctcgcccaggctggagtgcaatggtgcaatctcagctcaccgcagtctccgcctcccaggttcaaatgattctcctgcctcagcctcctgagtagctgggattacaagcatgcgccaccacgcccagctaattttgtatttttagtagggacagagtttctccatgttggtcaggctggtctcgaactcctgacctcaggtgatccacccacctcggcctcccaaagtgcagggattacaggcatgagccaccgcgcctggccagtattagaatcttttaatgggaacgtcttaaacataacctataacaatgaagcaccttataagtgtgtggagatttccttttcatggcttttcatatatgcctcgcactcacccagcaaccctgcaaactggaygttatactcaccagagagccttgaccctgattgtcactggcaaggagcagtgtctggacttgaacgcaggtcgcaggactccactcatggtgctctccccactgcacctcaattcctcacttttcaaaggaggcagcggaagcctggagagtttctcaaaggaaacggaatgcagaaatctgtctgtgtgcaatgtgaggctcagaactgaaaaccataaatgtcaggaaatgcaaagcagaattttcccctgcaacggcagtttgcatgaatatgaagacgctgtatggatgaaagtttgtggctgcagcatgagcataaatcctcggggctgctgttcgtctaggagcctgacttgcctggtgttgccctgagaactgcaacttgagcatttccttaattttgtactaaaggaaccaaaatgaggtattttggttctaagtctttgtcatgtgaaggaagcttcctgttaccaccccccatctacatacacattctctttcttagccccacgtttgaattttatgtttttcctaaagtatagggaagattattattattattattattttctttttcagacggagtctcgttctgtcaccaggctggagtgcaggcgcgtgatctaggctcactgcaagctctgcctcccaggttgaagtgattctcctgtgaaagggaattatttttgatgagtcattaaagtatatccattcccagaatggtgctgcatttttccttttatcatctgtcatgacttttttaagtgtgaagcttacttccagaggaattgtcttttctagcattttggacacaactaaatatctttgrtattttcttctcatatgttgagcagtaaattaagttgaatggtgaagtcagaggtgaacttaggaacatttagaaaaaggaaggtcatttattatttttcaggggaaaagtttggtagaaaaatgctgtaatcctaattcccagatgtccatttggcttgtagtcattttgatttatgaaataatcataagaaatgtcttcaaattttaaaagccaataatttgttctactaatcacagatgagagtagaaataaaagaaacacacccaattcctgaaaggaaaaaaattctcccaggatgagatcactgggtggacgtgaagtgggtaaaataccttttgctgcaattgtcatccccttatcttgccaaagtacgacaacatctgaatgaagatggtttgatgttcttagtttagagtagttatactattattttaacattcctatttaatgatatgttttaatactgcaggggaaaggtagatacagattcatagctacaaagcartactcttatgatcaatgttcatttaatttcaaatacaaagttagacattcagagttaaaaaaaattaatgcataggctgggtgcagtggctcacgcctgtaatcccagcactttgggaggccgaggcaggcggatcatgaggtcaggagtgtgagaccagcctgaccaacatggggaaactccatctctactaaaaatacaaaaattagctgggtgtggtggcatgcgcctgtaatcctagctactcaggaggctgagacaggagaatcgttgaacccaggaggcagaggttgcagcgagctgagattgcaccactgcactccagcctgggccacagagtgagattccatctcaaaaaaaaatagatatatatatatwttttatattatattatatattatatatttatatttttatatatataaatgaataaacaaggcatctgcttatgaaacagtctgcctgaatgaaatctccatttgcaggcaacacagtctacagtaatggcaggactgtattaggcatggttcctaatgcccatttctgtagcaaagtcaccagtagttcctaattgccaaaagtgagtcaccggtagttcctaattgccaaaagtgtattttttgcttttatcttgcttgaccacagctgtcatataaacctgttggccacacccttttcccttagcctgaatgaaaatgccccttcctgcccttcgtagctcctgagccaccaggacatggtggtctccatcatctgttcgttatctctaaccatttaagattagtgctccccaaggatgtctgttaacctgctttccttcccattctgccagtttcccctggggaatccacacttctggttttaaccatcacctaaatgctgtgtgtcccgacccgcatccgcatgctcccaggccattctcagttccagacccgggcccccagcttcctgcagacgcctcctccaggagatctcagtatcttgcttttcctcctaccccttctaaggcattctcaatccagcttccagaggaatcttcctaaaacacatctgactgtgtgagccacatactgtagcccaacctgacagcttcttttctatattaagaaaaagtgcggccgggcgcggtggctcacgcctgtaatcccagctctttgggaggctgaggcgggcagatcacgaggtcaggagatcgagaccatcctggataacatggtgaaaccctgtctctactgaaaatacaaaaaattagccgggcatggtggcaggtgcctgtagtcccagctactcgggaggctgaggcaggagaatggcatgaacccaggaggcggagcttgcagtgagccgggatcgcgccactgcactccagcctggacgacagagtgagactcgtctcaaaaaaaaaaaagaaaagaaaagaaaaagtgcacacattttgacatctgagaaaagtgatgtttttcttagaaaagtgacatctaactctttatagaaactttgccacaaggtagtctaggagtccccttactacctaagattttcatggacatgccctgtctgatcataaagcatgtggcacagtggctcacgcctgtaatcccaacactttggaaggcccaggcgggcagatcacttgagcccaggaattcaagaccagcctgggcaacatggtgaaaccctgtctctacaaaaaatatttaaaaaacaaaatgaactgagcatggtgaagcacatctatagtcccagctacttrgaggctgaggtaggaggatcgcttaagcccagaagtcagggctgcagtgagctgagactgcagtgccactgcattccagcctagaggacagagtgagaccccgtctccaaaaataaataaattaattaaataaagccttgtgaagaatctgccgtggagcataatgtaacccataaagccacttaactgggcgcacataaactacataaactacagtgtgtcccagttcattgagagtgaaaatcaagcaagggaccacctcagtgtggtagagccccctccctgccctccagaccctgctctgttctctgtgtctgaccattgactggccatcactcaggcactagttgagaatgccaatgtctttagttattgtaatttcagaagcacatccttgctggacaaagaacctacctgttaattttttaaagtaatgttcatcattttgaacattgttttctttcttttttattcagctgaccctcatgaggaatttaacttggttttctgaactgtgttggtaacatttgaaggacatagaaacagttttcataggtctcaagtgatataaaccacaattctttagaaaatatctttttttttttacccattctggattttgaaatatatacagatctcatacctcagattctcatatgatatgaactgtttcaaaacacattgatagcagaagatacatactgtcttctagtcaagagggtagcgctgtatttagtttaaaacattttaatgcattttatttgctaaatacaaaattataatattctgtataactttccaaatctcatctgtcctccctttcccccatctctttatattcagatgcttgtccctccagcttaaaaattcatgactttgagaaaattcgtcttcatgttatctaaactactgcacccccacacgctccctgttaagtgtctgcatatctgtgtcttactgttgtttaaaattcacttgtctgcctggggagtggggtggtttgctttaagctgctccactcaagtctcagcagagaaagcaataatttgttatgagatagagttttaagccaagctttggccagggtctctcccatttgggaggaggaaaataggaacaagtgagatgataattttccttgaattttagctcattaaaatcttcccttgtcctrggcaggctatttactgatttaagcatctagcacttttcctttccagaaagaattaacatctatgatgcaatcattgctaagggaggaggtttttgtgttttctctgtggaattagctgttctccagttgcagatgagcacagcccactttagagttgtgtgtaggtatggagttgaggggtcggaatgagatttccaagatttataggtaatgaaaagaacagrttgtatcaaagacaccacgtgtaggaaactaactgttcttaggggacttgtgtgaacctgtgatccttggctttctccaaaatgaacatttcagccttgttcatattaacctcctttttacagttgttttaccgtgttctggttttgctgctattctgcctgaaaatctagcaaaatggcgtttcttatctgcagaactgcgacaaagcttaaacatttgtatttctcttgaggattactgtggttgaatttttgacagtactatatataaatgaagaaataaaattttttatacagatgtttaaaatcctctttccactagaacatttctttctccctaaatatactattacctggaactctagctgtttttcagatctgtagagatcataggtggcttaagggactagattgctggtgatattggctgcaaaattyttttttytttttttttttttttttttttgagacagagtcttgctccatcgcccaggctggagtgcagtggtgcaatcttggcttcactgcaacctctgcctcccaggttcaagtgattctcatttggctgcaaagttcttagtgagktttagtggtattttggccctgtggcacagaagaatggttatttagcaaatgtgttttgcttttgattttgttttgtttttgagacagggtcttgccctgttgcccaggctggagtgaagtggctcgatcacagctcactgcagccatgacctcctgggctcaagcgatccttccacctcaacctcccaagtagctaggaccacaggcatgcctcaccacacctggctaatttttattttattttatttttgtagagacagggccttactatgttgcccaagctgttctcaaacttttgggctcaagcagtcttcccaccctggcctcccaaagtgctgggattacccagcatggcagcatgagccaacaggtctggcctcggcaaaggttttagtagggctttctcttttcttttgaagatgattaatacagtagattcatacagccagaagctgaaaagcagggaatactgtttggcttattaatggataatcaatcagtgttaatacacttttccctatttacatggtcaaattgatcaaatatttccaaggtattagcttttaaaagttgactttgtcagctctatgaaaagacatgcatttacatttttatcgtgctcctcctctgtcaggggacttggatctgtccttgatcttggcttttctgttcataaaccaggtaggactgtcatgggtttgctcccattaccatctcttgycccaagatttctaaaaggcatcacctgatgcacccttttgcccaaatagtgttaaaagtcctcaggctgaggagctgtcctggttcttctacaggatctttaatgatcagcctgtctaagctgagaatggataagggtgtccccaacacgtttatttggtggtttggtgggggtagtgacactggggatgcttttgtgtgttgtaatctgcccctctgtctgtttgaccccagagactctgtggttagttgcaggacatcaaaatacgcaggaaagacagtgggggaagagaccatcagtcgccctcttkctgcctaggttcactagaatctctaagactgaattcactaggaracacaggacataccgtagagctgtttatgtcttgagagccccagtttcctagtctgttaaatgagcatagtaacaccaatctcactcctttggaatattcaatggtgtaatacttacaacatctagctgacctgtacaattatagctattctcttctgcaagtctaatattcctattcacccctccctctgcatagggatccrgtttgaaatcatcagttgctcagtagggcctggggagctagctggtcattctttggttaaagtcaaagccaacctctttgcctacctttttgtcttaatgtcaacttcctaccagacatgttcctcccgcactggatgatcaaaatgcaaataggatggacacgatcaatgcattttgttggagtggttgcattctttctactttcttagggcaaaaaaatgaatggttggacaagagactaaccaaggcctcaaagaaagtgaaattctttctcaagctcctgaaagtcctttcatgggtatagtaacagttctataggggtctcattgtgatggtgccattatacaggccagcaagccccctgtgtgagccagacctcatggccttagcccttgttttcctctttttttttttttttttttttgagacagggtctcgctctgttgttggagtgcagtggtgtgatctcggctcactgcaacctctgcctcctgggttcaagtgattctcgtgctgyagcctcctgagtagctgagattacaggcccccaccagcacgcctggctaatttttgtatttttagtagagacagggttttaccatgttggccagtctggtctcgaactcctgacctcgtgatccacctgcctcagcctccctaagtgctgggattacaggtgtgagccactatgcccggctgccccatcctttttcttgatattatagttagtggtgaaaacatgtaaatgataatactccatgcagtatgtatgctgaagtgactaccctgaagacattttttaagtcctattttcttttctttctaggatatgataatcattttctgtttgtattaatacatgcttgaaaggaattagtaaagcgattccatccttgtcagcagcttggaacaaagctgtggatctgggattgtgtagaactcatttgacatcagtagttacttgtgtctttatgcctcagatcaagatgtgcgtgtttttttctttctccttttagcttcacgaggctgacattgtggtcctaggctcacctaagccagaagagattccccttacttggatacaaccaggaactactgttctcaactgctcccatgacttcctgtcaggtaaatgtcttcacattggtgttgagccactgattaggtcagatagttcaaagaaatgttaaccttttcctaagaggttatgtttctgaaatgttagcagtcgtcaacattaatatatagggtaggaaacttagactgtgggctacctgatagaaccatgctgttgagcaaagagagaccaagatggcrgttgaggtgtctgctcccacagtgaagtgccccctactggcctctagcagtcaggtcagttgtgacctcaagtagatgatttgtatgtgtgtgaggtaaactagaaatagcggttttcacagtttcttaaaaattagtaaaaccctttcttccaaagaaatcttcgtggaatctcactatgtaaaagcagatgagcgccggattgttgggagggatgggaataggatcagcctgtgtgtctccctgatttcctcttgcattgacccatgaagcacatccttggagccccagagtcatctcagaacagtatgaaaatcaccactagatgcagaaactgttgtaggattggtcctgctatttgatggcattttgccaagktatccaggaatactcaagaccacaccaggcccactttgggggcagcccaagcagtgcccgcaacagggcagccagcagccccgggtccagcaggagccggcccagagtgggttcctttttccagttcgtagaaggactgaggctaagaaagccttggagcacacccaggccctcagcaagtccctgagtagcacaggtgagccagagacgatggcacagggaggcagaggagagcccctcttcctgattccttctggctttggcctccaaatgtttgtgtggaagagaggactgtgctgagctgggctggaggacaggggcagcttttatccctaaagctgggcagaacatgcaccaaggttggcagcctctgctctccttctcctccaccaggaccatacttgaggttgaaatcttgaaaccttgtaggcagctccataaaagcatgagccctagccagaggttgttactgaccctcctctctaggaaatgtagctcctgccagaattgaccgatcagattaaaaaccccttgggggctggagagggtggaatggaacagagtccaaggaaagaggcattaagagctgtggccctaatggctcttyttaacaaacagaaagcatgtrctaaataacattttaaaaatatgtgtaatttattcatataactttttttcccctgaaaaaaaaaaaaaacaaagcctaacctattaatagtggacagggcttcctctgttcagcatcccagtcagattaggaaaatcagttccaacatttgtttcttgtaaatgaatgctgctttgctgtaatatttacttgctrtgttttattaaagttttcatgtaggacagttttggcagtcatggctggagataggagtctactttgatgttctggaatctctttgagctctgtggttatatgacagtgacatatattttgttagtgaaagtgctttatttttaataaggtttccttttaggacccttatttttgaaaaaaagtattccctgaaatattagatatcaatgtaatgattctctgggggaaaaaaagaccaaggcgttacagatgttcctcgactgaccatggggttatgcacagataaacccatcagaagttgaaaatatcattagtaaaaaatgggcatttgtagccaggatgggatgtgaaaacagaaaacaacgtccaaaaatgctggcagcacagtacgctgtagagtattggttgtttggcctcgtgattgcatggctgaccggaaaccacgatttgctgtcactgctgcccagcgcctcaagacagccttgttctttgtatagctggcctgggaaaagatcaaaatttaaagcacagtttctactgaatgcatgtccctttcccaccatcataaagtggaaaaatagtaagtgaaaaggttgtaaatcagggatggtctgtgtatttcaaaatgattctataagtagaatttatttgaaatttatctggcccaactgtartagttttcttgttggtttttgaatgcccagtgtccagaatagtacctgacrcttagtaaccrctctgtgaaattttttttttttttttggagacagagtcttgctctgtcaccctggctttagtgcagtgggtgtgatcttggctcactgcaacctccaccttctgggttcargtgattctcctacctcagcctcccaagtagctaggattacaggtccctgtcaccacgcctggccaatttttttttttttttgtatttttagtagaagtgtggatgcaccatgtttgccaggttggtttcraactcctgacctcaagtgatccacccacctcggcctcccagagtgctaggattacgggcatgagccactgggcctggctaactctgtgaatattgagtgtttgacaagttaataagcatgaatcaaaattctactctgcttgtagttttaagttagtggcatgtttagaaacatttccttgaatttgtctcccacttaaagatggggctgatggccaggcacagtggctcacgcctgtaatcctaacactttgggaggccgaggcaggtggatcacctgaggtcgggagtttgagacctagcctggccaacatggtgaaactcttgtctctattaaaaatacaaaaaaattagctgggcttggtggcaggtgcctgtaataccagctactcgggaagctgaggcaggagaatggcttgaacccaggaggtggaggttgcagtgagccgagattgcaccattgcactccagcctggatgacaagagcttttttttttttctcaaaaaaaaagaaaagaaaaaaaaatgggctcaactaggcagtcattgagataaagatgaggaatgctatgttgatgaaacagatgaacagtttcggggtggtgctacccataatagcacatttctaaatagtctacaagttttaattttagcaactttgtttagtatgaaaatttgatctaggaataatggagaaaggttttttttcccctctttttttcataatcccactaytgtaaagaaatgaataaactttttgaaatattaaaaagaaaagagctcttatttaaacttaagatgagaagaacttttaataaacttgtggctgggtgaagacagagttttataatgaaatttttattcttaccttcatggtacagagtccctcctccttacccccgtaaaaatagatgggatgttgtgatttatgatgaggcaattctgtagagacattttatggaatacgtaatcctaggagagattttcctgatggctaatatcccagacacagagctcagaaaacaattatacccagctagttggttctgttcactctactattgcatgagtccaatgtttagattttaaaacaaggaaatttcaacattctgttttctagctgtaagagtaactactttaaaaaaaaaaaaaaagacaaccaamaaaacctatttcttagaaaaagtcttgctctgttgcccaggctagagtacagtggcacgatcacagcctcaaactcctgggctccagcaatcctccctcctcagctaattaaaacaattttttttgttgttgttgaggcagggttctcactgtgttgcccaggctggtcttgaactcccsgcctcaaatagtcctcccgcctccacctccaaaaagtgctgagattactggtgtaaaccaccatgtctggcctaaaaaaattatttcaaatgaaaaaactacgcactgctcttgtagtgccctgcttgctaaacagcagatttcatcataagcaaaatcattttgtaccctaaatattaggacttatttactgatgtaacaaatgggaccaaggagaagctggtcttccrtcttaggctcagaaaacagtatcaaaacagcaactctgtggctcagagtaatttatagcatcattttaagctaatgtaattctatttagtgtggaagaggggaagagccctgggatgctgatgtgctgggggtcccgagggaccttgagactttctctcgtatggctctgaagggagacattagaacttactggaggctgggcgtggtgtggctcatgcctgtaatcccagcactttgggaggccgaggccagtggatcacttgaagtcaggagttcgagaccagcctgagcaacatagtgaaacctcatctctattaaaaatacaaaagttagccgggcatggtggcaggcacctgtaatcccagctacttgggaggctggggcaggagaatcgcttgaatccaagaggcagaggttgcagtgagccgagatcacgccattgcactccagcctgggcagcaagagcaaagctccatctcaaaaaattaaaaaaaaaatgtagtggaaagaacatggactttggagtcaggattaacctaactcaaggacaagggagctgtttttgtaaaaaaaattcttggccggatgcggtggctcacgcctgtaatcctagcactttgggaggctgaggcaggcggatcacctgcggtggggagttcgagaccagcctgaccaacgtggagaaaccccatctctactaaaaatacaaaattagccgggcatggtggcgcatgcctgtaatcccagctactcaggaggctgaggcaggagaatcgcttgaacccaggaggtggaggttacggtgagctgagatcgcgctccagcctgggcaccaagagcgaaactccatctcaaaaaaaaaaaaaaaagaaattcttaattgcattgcacttacaggctgtgtgactttgaggaaataagctctctgattaattaataagattcccaatttctttgtgggtaaattgggagcaaggctgttgggaggaatgactgagatgatacctcggggcagtgcctctttgatggtagctgccaataaatgctggtccacttcctgcattcctccctccacttccttgttgccatgtcacctgcacacaaaacagctttcagactccatcttggcacaatatacatttatatttgaaaaatcaaacccaagaaaggaagaagtccaatgaaattctgaacatgtaagaaaagtcagctttagagaaattggacatccrtgtaattttcattatgccaaagcaattgatataaaattaggatctttgcttgtgactcttgaactttagtaattccaaaatccattgtacctatcactgttttcttttatttattttttcctgtaaattctggatattctagatctatccctgaagtatattgccagttttccatttcaaattttaattagttctcaatacaatgtatttaatattttgctttttttaaaaaaagtaaaggttcatgtcatttagaatatgcagcactgtataaatttccttgttaatttggtttcagtggtccaaattaagttattactaatagcttattagtatcagtttactaatattttaatttttttaatcatgtcttacattgcattcttttaaaaactagtgatatgctgtcatttgacagtaagaattcaaataatttaaactaggattgcaactctcaagaacactgtcacaaaaattttaccaaatgatatgtattagtccattctcacactgctataaagaaatacctgagactgggtaatttataaagaaaagaagtttaattgtctcacacttccacggactgtacaggtagtatgatgctggcatttgcttggaaggccttctggaaggcctcaggaaacttacaattatagtagaaggggaaggggaatcacatatatcttacatggccagagcaggagcaagagagagggagggcgtattagtccattttcgcactgctgataaagacatacacgagacggggaagaaaaagaggtttaattggacttacagttccacatggctggggaggcctcaaaatcatggcgggaggtgaaaagcacttcttacatggcagcagcaagagaaaatcaggaagatgcaaaagcggaaacccctgataaaaccatctgatctcatgagacgtatttactaccatgagaagagtatggggaaaaccacccccatgattcaaattatctcccactgggtccctcctacaacacgtgggaattatgggagtacaattcaagatgagatttgggtggggacacagccaaaccatatcagaggaggaggtgcatactacatacttttaaaaaccagatctcaggataactcactcactatcatgagaacascaccaatgggatggcgctaagcctttcatgaagggccacccccatgatcctgtcacctcccaccaggccccacccccaacactggggattacaattgaacatgagatttggtggagacacagaaccaaaccatatcatgatactcattttatttattgcattttactttatatcctacaaagtcaatatatttaactgaaaaactggctaccagtgtttttgtttttttttttcaagttctacctgtactgatttctaatttttagccattcctgattttaaaacctcgcatacattttggggataatttgttctcctagatggcgagaaaatatttaagtctgtgggcttggagaatgcttttttgataagaaggatgcccttggccagactgcatagaagctgagatgtttccgcagagccgagatggcatgaaggctgaagaattttcctgcatccctcccactgcagtgattgttctggcaaagttcccagggtggtctctgcactgctcatattagtgaaagggtggttctgatttctgaggaaggcatgataacactttggccttaaattttctttttgcagaaagtttgattatcattagaagaatggccatcttttaaagtgattcattgacttgtccctggagaaatcatgagttagatgagagtgtttagtgggaagtgaaaagacccgtccacggtttcggatgagatcctcgttggactgtgatcccaggatattacccaggcccagatcgtagacaacctcccaatggagtcctgcccctacacgggcagggggtgaaataatgattccctttcttaattttctttagccatgaaatttattaaaaatgtatgtctgattctgagttgccagtcttaattgcttgagattctctggattcagaacttatttttattttttttatttttattttttgagacagagtctcgctctgtcatccaggcaggaatgcagtggcgcaactgcaggcccactgcatcctgagctcaascgatcctcctgccccagcccccaggtagctgggactacagacatatgccaccatgcccaactaatttttttttttgaggcagagtctcgctscctcccccaggctggagtgcagtggcatgagctcggctcactgcaagctccgcctcccgggttcacgccattctcctgcttcagcctcccgagtatctgggactaaaggcgcccgccaccacgcccggctagtttttttttttgtatttttagtagagacggggtttcmccgtgttagccaggatggtctcgatctcctgacctggtcatccgcccgactcggcctcccaaagtgctgggattacaggcgtgagccaccgcgcccagtcccaactgatttttgtaccttttctagagacgaggtttcaccaggttgctcaggctgctctcgaactcctggacttaagcaatcctcctgccttggcctctgaaagtgctgggattacaggtgtgagctactgcgcccagcctgaatgcagtcttaaaactgaattagaaaatctgagtgcaggctagagttatatataattaagagagtgtgggttttaagttgtgtcttaaaattgtgttgtttttggtcgagtctggtggctcacacttgtaatcccagcactttggggggcctaagtgggctgattgcttgagctcacgagttcgagaccagcctgggcaacatagtgaaactctgcctctacaaaaaatacaaaaattaagcccaggtgctgtggctcatgcctgtaatcctagcactttgggaggccaaggctggtggatcatctgaggtcaggagtttgagaccagcctggccgtggtgaaaccctgcctctactaaaaaaatacaaaaactaaccaggcgtggtggcacatgcctgtagtcccagctacatgggaggcagaggcagaagagtcccttgaacccaggaggcggaggctgcagtgagccaagatcgcaccactgcactccagcctgggcgacagagcaacagtccgtctcaaaaacaaaaaacaaaaattagccaggcattgtggcatgcgcctgtagtcccagctacttgggaggctgaggtgggaagatggcttgagcctgggaggcgggggttacagggagctgagatggtgccactgtactccagcctgggtgatcgggccagaccttatctcaaaaaaaagtgtttttaattacttgtaattttaattgcttgtaattaaaaaacagtaattaaaaggaccaaaagttaattttgcaggtagtaaaccttagcctactgtacgtaaaaatcagaaggccaaggcaggaggattgcctgagtccaggagctcaagaccagcttgggcaacatagtgagaccccgtctctataaaacaacttaacaatgtgccaggtgtggtggcacacccttgcaatcccaactactcaggaggctgaggtggacggattgcttgagcctgggaggtcaaggctgcaatgatcgtgatcacatcactgcactccagcctgggcaacagagcaagaccctctgtaaataataacagtaataatcagaaagcaacactgtatgtgaataaagtcaccttacctagctgccggtggacagcctttggtgtttcaaggacttagtttttatgcgttcctgctttcgatatttgttgactgtgagctttgggcttatccagggtccatgaagaagaaatggctcttccttatctcaggcttttgttattttggggtgttttaaattcctctcctgtggttactcaatccgaccctacttgcctctctcttccacaaatttctcaaatgtcattcatggtacccttttaactcttacggacttacttgtttttaacatatcttttattcactttgaatggagtttcgactggaaatagagggtagtgttgtgtgtaccacctaccatcttcagctagacactttcaaagagtttgttttgttaattatatcttcttacatggctcattatgcttgttgaaatttgcaagatgctttaaaccaakcctgtccaaaccacagcctgtgggccgcatgtagcccaggatagctttgaatgcagcccaacacaaattcataaactttcttaaaacacgaaattttttttgcaattttttttttccttagctcatcagctatcatagtgttagtgtattttatgtgtggctatggcccaagacaattcttcttccagtgtggcccagggaagccaaaagattacacattgctgaaaactttagatgtatcaggaatcatatagcttttcaaaataaaatatccacacttttgctaagttctatgctatgcaagtgactgaactataccaggacttatcttgtaaacttggaagtgaaatattcttcactcgcaagggtattttgtgattaaattctggaaatatgcatttataagttgataccagctcctggaatgtaactttttcttttttctttttttcttttttagattttttgagatgaagtctcactctgttgcccagggtggagtgcagtggcacaatcttggctcactgcagcctctgggtcccgaggtcaagcaattcgctggcctcagcctctgagtaggtgggactacaggcatctgccaccacagctggctaacttttttttgtatttttagtagagacagggtttcaccttgttggccaggctggtcttgaactcctgacctcaagtgatccayccacctcggcctcccaaagygctgggattacaggcgtgagccaccgcacccggatgctttttctcatttctccatcgcttaaagatagaggattgagagaggcccgtttgtggacacgatcttaagtacagatctctagtggttaaaacgaaacacaacaattctctctcatcctctagactcttggcttttgcctaaatatgattcataaagctgaagtgttgctaatctttaaataacacccaagggatatgattatatgattacccaacaccctaatacagtttaagaatagagtgatccaaagaaggagaaaatagtgtcttcaaaaatgttgctattagaaatatttcttttctctaagggaggatgcaggctaaagtatttagcatgtgtgtttacttttataaattttctaagtgatgaaggaaggaaggtagaatctttttttttttttttttttttttttttcagatagagtttcactcttgttgcccaggctggagtgagtggtgtgatctcggctcaccgcaatctccgcctcccaggttcaagcgattctctgcttcagcctccctagtagctgggatcacaggtgtgcaccaccacgcccagctaattttttttttttttttttttttttttttttttkkgtatttttagtagagatggggttgcaccatgttggccaggctggtctcaaactcctgacctcaggtgatccaccctactcggcctcctagagtcctgggattacaggcgtgagccactatgccctgccagaagtagaattcttatcaacatctttctaggttgataatcaggtaatccctaaagttaataccctaaaatgcaattttttagttttgatggaaaattgattctatcccttttttttttttttttttttttttttttttgaggtggagttttgctcttgttgcccaggctggagagcaatggcacgatctcagctcactgcaacctcggcctcccggttcaagcgattctcctgcctcagcctcctgagtagctgggattacaggcatgtgccaccacgcctggctaattttgtatttttagtagagatggggtttctccatgttggtcaggctgttctcaaacccccgacctcagatgatccacccggcttggcctcccaaattgctgggattacaggcgtgagccaccatgcctggccggttctataacttctatgatagagaatttttaaattatcaaaaaagcctgatctttcatgtaacactttgaccagtcttaccctgtgagtgttttcatctgccttctcacgctttgcatccacaagtgaaagtgcttctatttttctatgtattgtacagtaaagattttagagctttctaggccaggcatggtggctcgcacctataaccccagcactttgggaggccgaggtgggcagatcactgaggccaggagtttgagaccagcctggccaacatggtgaaaccctgtgtctactaaaaatacaaaaattagccgggagtgttggcaggtgccgtaatcccagctgctaataaggtggaggttgcggtgagctgagatcgtgccattgcactccagcctgggtgacagagagagactctatctcaaaaataaaaaaaaaaaawttttttagatccttctaataagatgaagcccactgtgtcaaaaaaaaatctaaaggttaggatatgaagtcattctgacagattatgctgtggaagaatatatatccctgttcctttcttctgagccttactttcatgttaatagtttaaactacatactatatgccaagaactttatataccttatcatatttcattttcacaaaattttaggaggttgatattactcacattaattaacaggcccaacatcacaatttctagcaagaggaagaggtatgcttttaatgcaagtctgactctgaattctgtggcctaatctgcagtctatgttgcatccacatgttttaaatgttcgctatgaattctcttgagctattatttctatctctaattatgccataatttaaaaatcagaatacttgggctcgtgtgaagagatggtgtgcctagatgtttcttcctggctcagtgtgagatatgattttgaaagcacatgatgtgcttcattacattttttaaatccatttatcccaggttaatagcttagatggcctttttttttttttttttttgagatggaatcttgctatgtcgcccaggttgcagtgcagtggcgtgatcttggctcactgcaacctccaccttccagcttcaagcgattctcctgcctcagcctcccaagtagctgggactacgggtacacgccaccatgtccagctgatttttatatttttagtagagatggggttttgccatgttggccaggctggtcttgaactgacctcaggtgatccacctgcctcggcctcccaaagtgctgggattacaggtgtgagccactgcacccggccagatggccatttctctaatgtaaaatgtgaagcaggcccaatggagggccccaagcctgtgccagaggtgaccagtctgcagccgtgccccgacatcctaacttccttggtgaaaaatgagaccactattcagtgtgctagctgtttacaaggagcaattggttagaaatgacagtgtactgaaagtcttttttttccctccaattttttacagggaaggttgggtgtggctctccaagaatacattttggtggactcattgaggaagatgatgtgattctccttgctgcagctctgcgaattcaggtttgttcaacatagctgtctgagaatcttgagtttggaagtttgattaatagttgctaacattttgcaagtggtttctgtttaccaggtacagtgttaaacacttcacacacagtgttaggcccatttgataagtgaagaaatggtgattttgaaaaatgaagtgagttgcctatgatcacatggcagtgtggggcagggacccatcctggggactgtgtatgttatcttgtgctgtgtaataaattatcccaaaatttagcaactgaagcaacaaggcatttattatctcacagtttcttcaagtcagagatttggtagtagattagcagattaggtggtatgttagtccattcttgcattgctataaagaaataccagctactcaggaggctaaagcaggaggatcgcttgaacccaggagacagaggttgtggtgagctgagattgcaccactgaactccaacctgggtgacagagggagactgaaaaaaaaaaaaaagaaatacctgagactggttaacttagaaagaaaacagatttaattggctcacggttcttttttttccccttgggacagagtctcactttgtcacccaggctggagtgcartggtgygatcttggctcactgcaacctccacctcctgggtttaagmgattctcatgcctcagcctcctgagtagccgggactgcaggcacacaccaccacgcctggctaattttttgtatttttagtagagacagggtttcaccatgtcggccaggctggtctcaaactcctggcctcatgtgatccacccgccttggcctcccaaagtgctgggattacaggcatgagccaccgcgcctgacctggctcacagttctgcaggccttacaggaagcataacacaggcatctgcttctggagaggcctcaccaagcttccaagaatggcagaaagtgaagggaaagcaggcatctcacaaggcgggaacaggagcagagagtgagggatggtgctatatacttttaaatgaccagatctcatgagaactcattcactatcacaaggacgctacsgagggagatgatgctaaaccatcatgagaaactagcccctgtgatcccatcaccctccaccaggccccacctctaacactggggattacatttcaagatgggatttgggcagggacacacatccaaactatatcaaattgtttaggctcaggatctctcatgcatttgaagtgaagatgtcagctggggctgcagtcatctgaggcattaactggggctggaggatctgtttccaagatggcatactcacatggctgtgggcatgtgtatttcattcctcactggccatcagcaggatgccttggttcctcatcatgtccacctctctgtagggctgctcacagtgtggcagctaacttcccccagtgtgagcaatccaagggaggcaaccaggaggagtctgcagtgtggatgacctgggctctaacctcatgtgccgccacttccttttatcctgtttgttagaagtagatcactaagtccagttcacattcaagagaaggagaattgtcctcacttcttcaagacaggagtattaaagtatttggaggcattttttcaaaccaccaccacctgtgtgacctaaaggcgaaggtcatcagtgttccaccatataagctgagtgttctcatggtgctggagcctgcagcagtggtggcctctggcagtgacatttagttcatttctttcttatgtacagggtaatacacaattgaaactctttacctcaaaatgggtcattagacatttttgtaaggattataagttacatttccatcaaagccaaattttatttttatttatttttatttcatttacttataatttatatgcatacataacactactcagtagttcaatttgcttgctcttttataccaactatggaaggatggtatttggaagctgggcatccaagctgatcattcacgcagtcctatattttcttcatttttcttttctaaattggatgacgaacctattcagtataagtttatccatgtacatgatgtcttttgtgaacacttaatctatttatttatttatttatttatttgagacggggtctcactgtgtcacccaggctggaatgcagtggcacgatctcagctcactgcagcctccacctcccaggttcaagtgattctcctgcctcagcctcctgggtagctgggattacaggcacatgccaccacacccagmtaattttttttttttttttttttttttttttgagacagagtttagctcttgttgcccaggctagagtgtaatgtcgcaaactcggctcactgcaacctccatctcccgggctcaagtgattctcccgcctcagcctcctgagtagttgggattacaggcacatgccaccaccacgcccggctaattttttgtattttttgagatggagttttgctcttgttgcccaggctggggtgcaatggcacgatctcagctcactgcaacctccacctcccgggttcaagtgattctcctgcctcagcctcccgagtagctgggattacaggcgtgtgccaccacacccagctaattttgtatttttagtagagacggggtttctccatgttggtcaggctggtctcgaactcccgacctcagttgatcccgcctacctcagcctcccaaagaggattacaggcgtgagccactgcacctggcctaatttttgtatttttagtagagacagggtttcaccatgttgcccaggctggtcttgaattcctgacctcaagtgatctgcccacctcggcctcccaaagtgctgggattacaggcatgagccacctcacctggcctatttattcatttatttttaaagagacagaatctcagctaggatgaagtacagtggtgtgatcttgactcactgcagcctcaaacttctgggctcaaacaatcctcccacctcagcctcccgagtagctgggattataggtgcgcatcaccacacctggattttttaatagtgtattttctcacattttcctgtttttctttttwaaatttaacaaaaacaatgaacatagtcagaagttctggcctgtgacttgaaataaccctggatgtacatttttaaaaacattctcagattcattgctgtaagtatgaagagctaatagtctgcaagggaactatagaattaagctggatcatcaagttcatgcatgcatatttaagaaacagagcagcttcttttaatactatcaaactcttcagtgcgatattgaatagttgtatatctaactagtggttttcacgttttcctttttaagaaaaacctacaaacctagttacacgtgaataaaaatattcctaatatcctcctggcttattgtgcgactygataatcttgttttgtaacatccacaaacaatatttccatggtttaagtgtgtgccctgtcagcttttaccattctaacatgttttcccctctatccctgctgaagaacatggtcagtagtggaaggagatggcttcgtgaacagcagcacaggcggtggagacttcactgcttgaaacttcagcctctctcccctgtgccaaggtaacactggtgttttatttacactgatrtcagctcagcacagtgccttagccctagttagtcatgggggagaagcacaactcatggtactgtggttttgatggtagataagtttctctattcattaaattgccaccctattttctctattgtaaattctccaaaattaaatcataatgaatgtattactgtgttctgtcaattctaagaaggcatatttttttatttcaatgatgttttctatattaaatggcagttttttaatgatgttttaaaattaatttatattaatttaatttcaatgatgtttcctatatttaatggcagtgttttccccccccaccctttttttttttttgagatggagtcttgctctgttgcccaggctagagtgcaatggygcgatctcggctcactgcaacctctacctcccaggttcaagcgattctcctgcctcagcctcccgggtagctgagattacaggtgcacgccaccacacccagctaatttttgtatttttagtagagatgggggtttcaccattttggccagccggtctcaaactcctgacctcwggtgatctgcccaccttggcctcccaaagtgctgggattacaggygtgagcgaccacgcctggcctggcagtggtttttcttcttagtggtccatgaagtaatggttttaaatttgacaaaatatggtaatgtaatatttggaatatgcttttcaatgtcagaaatgcccaacacgtatatatccgcctggtgttaagggccatataggtttctactctggggataaaggaccgtccaaaccaaacwttattccacgtgggaactgagctcagctttcttcagaacgatctgatagaatagtctgtgctcgtcaaggtggatattttcctcagagtgctctctgatgaggtctgagctacatattctatctataaatttggaaatataaactgtaggtcatagtctcagcttgtggtttagaatgattgggtagggatgatgtctgaatcagacagctgcattttccagcctgatgatgagtcatctgtgtctgtcccactccaaggaattggccccacccccattatccaggtgtgcataatactaggtgtgcatccccaggtaatctcatccagcaacgttggaatgcacacagtgccgaggagataaaatccctctagtaactgacactttatttatttatttatttatttatttattttttcttttttttttttttttttttgagacagagtcttgctctggtcttgaactcttgacctcaggtgttccacctgcctcggcctaccaaagtgctgggattacaagcatgagccaccgcaccggggctgactcattttttacctgataaccagttgctttatagaattgaactccatttccttggacagtcagatgaacaccctggttcagttctacccactaggagggtgtgaccctcctggacatgttttcatccctgcaatagacgaaacatctcagttatgctctctgttcattaattatataagttgcaatgaggaatgttattctttgtaatatcatccctgggcttgtgcaatctgtttcataaaatatcttattttagagttatttttgttgttataagaccttagattttaaaagtaaatcaataatttctacttacaaagtgctaaaaaagattaagatagattccaccaaattgtgtaccaaagtttcaaagtaaattcttcttgttaaataattaaatccttttctcccccaagaagaatttactttgaaatcattgatttctagacccactgggcaaagagaagcaggctgagtagtttataaatcaccccaaaaatcggatgrtgtctctgtgactagctagtaaagagaaaaccttacaggtgtttgttttgttttgtttttgagacagagccttgctctgttgcccaggctggagtgcagtggcttcatctctgctcattgtaaccttcacttcctgagttcaagcgaggacatctggctaatttttgtatttttagtagagacagggtttcaccatgtttgccaggctggtcttgaactcctgacctcaagtgatctgccctcctgtgctcccaaagtgctgggcttacaggcatgagccaccatgccaggcctgttttgtttgcttgtttgttttttgagacagtcttattctgttgcccaggctggagtgcagtggtgcaatctcagctcacctcaacctccgcctcccaggttcaagtgattgtcctgcctcggcctcccgagtagctgggactacaggtgccaccaccacacctggctaatttgtttgtatttttagtagagacgggattttgctatgttggccaggctggtctcaaactcatggactcaagtgatcctcccgccttggcctcccaaagtgctgggattacaggcgtgagcctctgcagcctgccaaaagcttacacattgttcaagattaagctcttcaatttaggagattgtgggaagagagagacagaaaaaaactrtggccaggaaggcaaaacaaagtaggaggctagaaaggaaaggtcggataggtggaggcctggaaaggaatactcagcggtacttgaggggggtaacctgaactcctagtttctctggtgccctttggagaagtctgggtggaggtgtgtttgctgttgcctcttacccccgggtcaggcycctacaggatcctggaggagagtctagggtggtctgaacactgagggtagattacctgcagtagctacagaaacagtcagggccaaggggctgactaaagtccactgagggggttgatctgcccaccgcaaggaggcagaccacaacaaaaataagtgttctggggtgagtgaaggaatagctgtcctctctgatgcaacctttaagggtagtcccccgccrcgtggtctcccggggttagtcttgctgctgggggaacaggtgtgccttccatctctcactctcagacacatgaagggcctgactgcccagcaaagaaatgactgagcacatgagccccagaggaaagagtccagcattacacatgctggtatccagaccactcctgtaagacgagcagtggtggccagtaaaatagaagagttcagttacgtgcccaatgactctctggagttcctacaatttcctgtctgaacttgggctcagggcactaggtccttttaccgacagttatgtaattaataaaacattttgaaatatgattttagactgtaaatagagagggggaagtgtggacacagataaaacgaaatagcatttccacattttttctttttttttgtacttaatctctaatgtgatagtaatgttcacatttttgaatagccaagagaaacatgtggccagcccgatcggagattattatgcaatgaccctctattcatcgctaatgaataccatgatggcccatacagagcattttgctctgtagtcgaatcacacttgcaggagggttttggacacattataatatgctgttcttgtctctatgccataggtgttatacttccacctggacacaattctaggatctttgtgagttttttggagttgcatttctaaaatgatacaccattttctcatacacgttaattattagcagttgtgcktattactgcctgggagaaaggaccccaaagtaattgcattgatttcatcgttggcgtgatgtgtggctgttttcactccagttgtgaccacctaagctgagaagccttttctctctttcgtattgtctttcccctcagtgacattgagatttcaagaggacaaactccaaaagctgtggatgtccttgccaaggagattggattgcttgcagatgaaattgaaatctatggcaaaagcaaagccaaagtacgtttgtccgtgctagaaaggttaaaggatcaagcagatggaaaatacgtcttagttgctgggtaagacrccatctaacatctacttgatcaagcagacatatttacaaaactcttccctatttatctctctcctcgtacccctcaatccatcctattctcacatttgacatttcgtccatttcatttggcatttctttatttggtgtgagataagtttttattttcagtgcagagcaaactagtcgactctacacaagataaagtcaaacaagttgcagtgctttatcttttgtttctcatattatgttgttattacccctgcycctccttgactttttgaatttcatttttcattataraaatcaaaataggaattgaaagtaaactattttgaactgagcagtttgttttgtgcgttctacttgaaatattttcgtggaaaaggtacagataatcatatgaaacatgttttcctgttaatatccttgatcttacctacatattcacatttcaaaagctcattatttccctttttctgcatttcaaaactaatgttgggccattttcatttgtgttggttattttataaaagacaaattcatagtttttgtgaaaaggagtgtttgcctttttccccttctttttaaaaaaagaagtacattcactagctgaaaagatgatagaaagcaagggatttcaaatatttattcagtgtgacctgagggaacatcatgagaccatataaattcctttgctgccttgaaatttcatttcagtgactattgcttatgatgtatacaaagcttcaggcacaaaacctatttgtcaggcagagacatttcttgtaattggaattgactcctaggtaactttgtttttacgtatttaattattaatgtaagtgcttttttctttatttctttttctggttataaaaagaatgtagtttcattgtagaaatattctaaaaattcagaaaacagaagtgaaaaagtaaaacatcccaaacccaagcactcagaggaaacaactgttgacctgcgaggactgttttgacgctgatagagtctctcagccatgaggtcacactcacatgctattgtgtaagcaacctgattattcaagcatatgtggcatactgagctccatgtgagtgaatattgagctatgtcaccatttttcatgacaacataacattccatcactcacatcccagattctttttttttttttttttttgagacagagtcttgctctgttgccaagactggggtgcagtggtgtgatctcagctcactgcaaactctgcctcccgggttcaagcgattctcctgcctcagcctcccgagtagctgggattacaggcatgcgccaccatgcccagctaatttttgtatttttagtcgagatggggtttcaccatgttggccaggcttttctcgaactcctgacctcaagtgatccacccaccttggcatcccaaagtgctgggattacaggtgtgagccaccgcacctggccacatcccagattcttaaacatgttggggaagcaggggctgggggagtagcaaaatgcccaggatgagggtggagatcccatcttacacatcttctggcacctctagttccatcaataagtgctaccctggtagttctgagtgtttctaattgtccaagtgcactgatgcagaaaaataatttgaacatagaatagggatgttccacaacttacttgaccaattttctattgatgggcaatcaaagtgttcccaatttttgccattttaaactgctagaattaacaaccttgggcatgtggatttgtgcatctgtttaattatctccttaggaaaaatccccggaagtgagttcaattatttataaccacaaataaagcaaaaatattatccaaaacaggccaagcgcggtggctcacacctgtaatcccagctctttgggaggccgaggcaggtggatcacaaggtcaggagatcgagaccatcctggctaacatggtgaaaccccgtctctactaaaaataccaaaaaattagccaggcgtggtggcaggcacctgtagtcccagctactcaggaggctgaggcaggagaatggcgtgaacctgggaggcggagcttgcggtgagccaagatcacgccactgcactccagcctaggtgacagagcaagactgtctcaaaaaaaaaaaaaaaaaaaaaaaatcacctctttaatgatatagtgatttcttcaaatcctttttccctcctcctgtcccactttcctgtcctcctctttctccttctctttgtgtagcttttcttttttttttttgagatgaagtcacccaggctggagtgcactggtgcgattttggctcgctgcaacctcygccccctgggttcaagcaattcttgtgcctcagcttcccaagtagctgggattccaggcatgcacccccacgcctggctaactgtttttgtatttttatagagacggggtttcgccacattagccaggctggccttgaactcctggcctcaagtggtccgcccgcctcctccttccaaagtgctaggattacaggtgtgagccatcatgcccagcttctgtagcttttttgtaagagggacagacagccagggcctctctgaatccctcagcagttggcattgtaaggaattcatcctttgctccacaccttggttgcctgtggcttcacccttctcccgcaggcttccaggctcactgcagttagattcctgagcccctttccaacctagaaccccaaacttaatgtccccataatcgagtgtgggaaagttcctggctgaggggaggggttggctccacctgcaggcaccctctgggcccacaccctgcaaggagctgcctctggttagattggctccggggtctctgagtttagggcacagtttagtcagggttgttttatggcagtatgcttgatgcatatttgtctgcaattaataaacaaactcttggccattaagaccttgaaaaagcatttgatttgtgaaattggttcctttcttccaggcttcagatgatcttggtaggtgggtttgcaggctttctcaccctgttcagataggaacacttaaggaaaacttggtaggatgtgttgtctgtttatgaaggaagaatcctgcagcagattttcttatccagtccytgtgctttactccattttgggcttgtcaataaaatcagaaatccagatatggatggctctgaccttagcttggaacacaaaactgatacttctaaaacaaagctgtgatgatactgttttcaggttccttacttgtaaacaaagctgggcctccagcctcatgctggagaatgctagctagcacgactgcctggggttacagccaatgcagtccatggccagtagaacatttctccacgctggctttttgctagcattaatatgtataatcaagctgaaattggcctgccatgttgtaaatagaaaagaagactaaagatgaattttcaagaacagattaaacaccaagggatcaacaattctttttctgaaattctaagtttctttacctaacaaagacctttgaaggaacaaaaattaaatggcctgtctcttttttaactgtagtggaaaaaaataaccgtgctggtaagattatgatatatgtatgcatttgtggcacagcttgaagatttttaggaaatagccacactggattctataagggaagaatgaacagccccttctccccaacacaacaaatgatatattttttagggctgtaaactgtcatcagtatctaatcccttaatagctgaatattgatatcagtttagatcacaggcaactattttatcgatagcctaaagtgggcctggcatgacgggttgtgcctataacccaattactctggagactgtgggtggatcacttgaggccaggagttcaagaccagcctgagctgcatagcaagaccccatctttaaaaaatacaaacaaacagcaaaaagcagcactggtttaaagcaacatttgtaatctaaagtgaaaagtcaatttgaaataaaaatcatcttcatatttttacatttgaccaggtcaagcgttagggggaaatgactgttatcaaaccattatatgcactgttgcaacttctttaaaaatataaatgacccctccattaaatggagaattatttcctttttctaaaagtcttttctaattctgaaaataatattagcttattgtaaaaaatttaacataaagtaaaaaggagataactaggtctctcataactcaatattttatttatatattcatctttttacacattgagatcatgctataaatatcatttttgtcctgcctttttctctgaacactgtaacataaatctttttccatgctttagaagaattcaaatacccaagtaatttttaaataatactaaataacaatatatttgttattacatattttaatttatatagaaatgtgatttaaatatatcagcaatgggattaaaatataaaacaatgagatttttttaaatcttctattattaataactcaaatgcagaacagattaattcttttaaaaagccattcttcaaactttaggatttcttattcagtcagaatcatctgcatttcatcaactacatatcgcatggtatttacacctacacatcactttatttgctttgcctgacaaaatgaaaagtattgggaattgttcagggaaatatgccaaaagaatcttagggactcatgagttttacatattttcccagttacactaatgaaaaggaattttgtttgagaacttgacttggagtgcagctgcagggcatttgaatctcagtctccatcaggcctgcacccatttctgtgcagaagtttctagaatttccctgaattggttggacagagcagctaaaaaagcagcccaaactgatctgggaatagactgaatttcacattaaagaaaaatttgaatcattcacatcatttcatctttttttttttttttttttttttctgcagagggccaaatacccgattggattttttaaaaatgtttcaaccctttatttcggtacaatgttaaaataatctgacttttctatgatttggcttttctgccttgagtaactatttaaatatctgtgtgattttcttttatttgtgctacttctagaacaaaacagaggtatttagaagaaaccacttcccacagggcctttgaaccgtttacctaagtcaagtgtaatgagaaacataaccaaatgcaccntggggtttattgttagataataaaaggcttaaaaagcccctagaccctaaagatgcctgggatggatgatttatgttcatatgctacttgagcatgtagttttggagtgcatggtgaggcccatggctaatggcagtggtgctattcaacaagattctgggtctttagaatagttcaaagttttaccacttctctctggataagccatctttttgacctttgagtaaattataaacttcttttcagattgtgtccaaatggtcacaggtactttgacagtttttactgtaactgccaataagtaatactcatctttaaaaagacatcattctggcagggcatggtggctcacgcctgtaatgccagccctttgggaggccgaggcgggcggatcatttgaggtcaggagttcgagaccagcctggccaacatggtgaaaccctgtttctattaaaaatacaaaaattagctgggcatggtgatgggtgcctgtaatcccagctactcaagagggtgaggcaagagaattgcttgagcccgggaggtggaggttgcaatgagcagagatcacaccattgcagtccagcctgggcaacagagtgagactccatctcaaaaaaaaaaaaaaaaaaaaaaaaagcatcattccattgtcaacccttttttgctgttctgtgccctgaacaggtgatgtgatagyggtgcaaagagggtgagcattgtcctttacctcaacaagtgtgtggcctggtaggcgagacaggcatgtcagaatgcttatcatgaagccatctgaaaaattctagaataatcatataatcaatgctctagatatcagagagggggtacagaaatctgccgggagaagtggaggaatgtaatgaacaaaaatcacagttccatctctatgaactctaagctcccatagaaaaagaaattagagggctgggcgtggtggctcacgcctgtaatcccagcactttgggaggctgaggtgggcggatcacaaggtcaggagtttgagaccagcctggccaacaaggtgaaaccccgtctctactaaaaatacaaaaattagccaggtgtgatgacgtgcctgtagtcccagctactcaggaggccgaggcaggagaattgcttgaacctgggaggcagagattgcagtgagctgagattgtgccactgcactccagcctgggcaacaagagcgaaactccatgtgtctccaaaaaaaaaagagaaaggaagaaagggaggaagagagggagggaggaaggaaggaaggaaggaaggaagggagagagagtaattagattaccttaaggaaagaaggaaggaaggaaggaaggaaaagagagaaagaaagagaaattagattaccttggtgctcattctttcgtatatccccrttgatgatttggaatctgagctaaagatactggggggaaaactaaaccaaattttgataccaaatacaggaaggagrtgaaataagcttttttattgtagctctccttttattgctcacaataaatacttcctactttgtgattttcccgaactgtattagttggcagaaagctgagcagtcctgtgtttctaattaagaattggatggttagctggagttttgaggaggtcatctctgggcgtgtctgcttttggctttcttgggcagctatgctagcatatcyttgggaatgaaaatgtaatccttcatgtgacacagtttaggtaaaccacttagtcctttgcaaacaccaaatgctcagtgcggtacttaaatgacaccatatttgatgccacagtttctttacaggctcttctaagattgtaatgcctgtgggcttttaactgcccttattgatgttgtatccaagaaaacagaaagttgactccaagcagaagtattaatatctttgtataactttcagtcttcacgttgaccccactgcagatctgctgtttagacagatgcagaggtgactgataagccggggtcatgtggcttcaggagtcttaggtttctccwtgcagcggtgtcaggataggctcaccagctcctggccacagtgggtaccagcgacctccttgttgctgaatccaccgaccactctcggtcctcatcctgcttcctgcctcagtggcgtttgactttcctgttctggaaacagtctcatccttggcctccttctgagacttcctgtcatgttctgccttcttctccagggtcctcttattttttgtgtttttagagacagggtctcactatattgcccaggctggtctcaaactccctagctcaagcagtccttttaccttggcctcccaaagtgctaggattacaagcatgaaccactgcacacagccgggttctcttattttatactacgccttcttagtttccttttggactctcttcttctgacaactcattacaagcaaakgtgcttaactcttctgtccttatcccttttctcactcggtgcactgtccttgggtgatcttacccattccatgctttaaatggctawagttatgatttccatccatggagaacctggttaagtcagatggctggctttgcctcccagctctactgcttactagctgtgtgactgtcggcaagttgcttacactctgtgcctcagtttcctcatctatcaagtgagcgtacaaataattaaccccataaatatgaagcatagcacctctcctattaactgccccaatccactctcagttttatctrgttaacatttattaatttgccgggtctcacctaagatgttacttcctacaggaaacattcccagatgttcaaatctagttagatcctttttccatgtaccctcataattcagtctgastgccctatttccctgtcttagtgtttgtcacatttatcgtaattgctgatatattcagatcagctggaagctcgtgaggatagagatgaagtctgactggatcatcattttgtccccagcgtctagctcagtgcctggtacatagcagtacttgacaaatatttgctgaatgaatgactcatggaattgtagggtatgatgacgcctctaaagacattcttnctttgtggttacatccttaggttttgtagatcagaaaactctattagattggttgtggttgagtayccttgacaacatggctgacagtaactcatggaagaccaaactgtaaaccctaatgacagcctttaaattttttaacgatgcttgagagctaagctggaaggacgtggggtgcttwtccctygtagaaatgcctgccaatgctttctcatttggacccaaactccagatygggagcagtcttatagctggatcagctaccaagagaaattctraagcaagaagagaaaagcatttcaatttgggacatttatttgcacctggaaatggggaatgggctatcagaccagacttctrtcctgtccaacctgccttcattcagtccttccacattgttattctgggtytggactgtgctggaaagacaactgtcttatacaggctgcagttcaatgaatttgtaaataccatacctaccaaaggatttaacactgagaaaattaaggtaagcttgggaaattctaaaacagtcacttttcacttctgggatgtaggtggtcaggagaaattaaggccactgtggaagtcatataccagatgcacagatggcattgtatttgttgtggactctgttgatgtcgaaaggatggaagaagccaaaactgaacttcayaaaataactaggatatcagaaaatcaaggagtccctgtacttatagttgctaacaaacaagacttgargaactcattgtctctttcagaaattgagaaattgttagcaatgggtgaactgagctcatcagctccttggcatttgyagcctacctgtgcaatcataggagatggcctaaaggaaggacttgagaaactacatgatatgatcattaaaagaaaaattttgcggcaacagaaaaagaaaagatgaatatcaatatctattatatctgtgtggagtaggttttctctggtctgattttgacaaatagaagagtgtctacagcgtggtttgcctgtctgccctcctggatgctattaaagctttgttttgttgaacaatcagatgcccaactctgttgccttgtggaagatgagtaaatgcagtgcttcttaaagtggtttcttctccctaccccacacatcttttggtactaccatttggggaagccaagcaaggatagtaaattgatcagaacacagttgtgggaatttggcctgaagttagtgaaataaaactttaaagagtggaaaaaaaaaatttttaacaatgcttgtgatgtactaaagaacaattttatgaggccttacttggtaatgtaataggctctcttcaatacctaatactgtgatgttatgaacatgggaacatttggttttgcaaagtgttgtcatcaacaataagattctcaagagcagaagtttccgccatagtatgcacagggcctgtggactttttgaatatttgaaggactgtcatatggaaagggatcaggcttagtgtgtaggactccaagagctaggacacaacatgaatgcagatgccttctctctagaacaaagaacttttgaactgtaacagctgtctgtaaatgagtgggccaccccagaggtcatgaccttatcaccatctgtgttcaagcatggcagggagaagccctgggcagggatatctggaaggagaaggacaagtggggactttagggtcccttctaatcctgagagtctggcagtgccctactcacccaaggaccgttgagctaggccctgtccccaaaccataggccctgtgcccacaccctgccccaataaatggctcaggaagaacaactgctatatactcatcagcaagaaatgccccaccatcagctgaattatttaaaccattttgatgagtggttttatggcctttcttgaaactgatgttgttattagcactgcctaataccttttccttttttggtttcttggtaaaggtgtgtctgtatcttgactttagcttatgcctgtcctgtgtgatgtgagtagaccataatagcccgagaaaattaaattatggagtgcattttgaaatgagcaccctcagatttgattctggtrtcttcggctggttttgcataggttgtctgggaaatattataaaattcactttctccccccgaactcaggatcacacccacccctcttggagaagggaagagcacagtcaccatcgggcttgtgcaggctctgaccgcacacctgaatgtcaactcctttgcctgcttgaggcagccttcccaaggaccgacgtttggagtgaaaggtactgtctttaacaactagtgtacttttcaggkcaaagttggggrgagaraattgtaaaaagaacattgtcaacagataaagagttaagacttttcaggggacttggtacatttcttcactgcacactcagtacatagtggtcgccccatgttggttcccccgggcatgaaaaagagcagtgggagccgccagggcttcactggaygcctcaggagcctgttcctggggctgcrttgctcaaggctcccgcctcgagtgcggtctcccatttcatcagggccttctttgccaagtgatcttgaaacacggccatccatatcggtgtttgatcatcccagtcccggggaaaggtctttccctctgctttagtctcggctcattggagttgctgtgtggggcccgcagagctctctggagacggactggctgtggacagcgagtcgtgatgaaattcctccttggccgtggtcgggctgatatctggcacttccccattcattactctttcttccctgatttatcatgaaatcattccttagctcactttacagtggtggttattgctgcaattacagtttgtccttggcacttcgtgattttttaagaatattgcatttgtattactgttaaacatattaataacgtatctcataaagtactgataacgcacagagtgtcatgcatcgtgtagyggaatgaacactagggttggagcgagaaagccaaggttttggtcacagctgtgtttcctaccgccatgtgacccttggccacttgagccagtcacaacctctyggagccgcatctctaaaagtccaaaatgctgagagcggcaccaggctcacccagttgttgtgaggatcaaatgagaaagcacgtaaagaacgagggctactgtcaaatgatacacacatgggcggtgttgttctgctttaggaaagagcagtccttttactctaacaaccaacattttgagggatacgcagcatgacaaatctcacatactattatctgaaataaattgaagtttataatttactcatttgaggtggttatgcggtggtttttttgtttttgtttttgtttttgttttgagacagagtctcacttggttgcccaggctggaatgcagtggtgcaatctcggctcactccaatctccgcctcccagtttcaagtgattctcctgcctcagcctcccaagtagctgggattacaggcacccgccaccatgcctagctaatttttatatttttaatagagatagggtttcatcatgttggccaggccggtctcgaactcctgacctcaagtgatccgcctgcctcagcctcccaaagtgctgggtttacaggcatgagccacctcgcccagccacagtgtattttttttaaacaaagtttgctcagatatgaaatcatatacaattgatttagataaagtatagtcacagagatctaataataaattatcaaaatattctcatatcctggtatgttttacagtaatgacatctgctctatttttaccttttttttttaagcaaagaaacagaggtatagttagacaaagtgtcaactttttttgttgttgttctgcttggatataaccattagtgtctctcactgccttttgttacttcatcttgggtgtgacgcctctctgttgggtttggggagctgtgtcccttggsctgtgtccatcgtggcagctgtacttggtgacccgtttgaaatgcctcttgctctgttgtttaggaggagccgcgggtggtggatatgcccaggtcatccccatggaggaggtaagaccttgaagagatgcgggtcagctatcactgtgtttccttcctgacatcttgtctctgctcccatccacacaggcccacagaccctcatccataatcccaaagtcattaaggctcygaaaccccaaaatgtttgcataactcatgcagtgacaaaccctagtatttactgtgatgagctataattatatggattttgtacgtgstacttggcgtgaatattcatatacattgctgtggaaaaattatttttgattaacaggtgctgacctagcccctgcttggggtgttttacaaataaactacatgtaaatcacactgccttcctaaacttcaaaaaattcrgaatcttgaaaccctgctggccttgcgggtctggatgagagaatgtgggtctgtgcctcccttgatcatctgctgtactgccaagttcacgaagacttgacgcttcccctctgtcaattcaggctctagtgcgtgcctcggcagcatagatactaaaactggaatgacacagagaggattagcatggtccctgcacgaggatgacacacaaatttgtgaagtgtcccattaaaaataaaagaccccaaaataaaagagttccagaggaaaatgggcaaaaagaactgacgttgttaattctcacttctgtaagaactccacctttgttccacataacctctttgttgcctgtaactaaccagtgaccagctcttttcagtttcactctctgcatcagccttatcattcagggcctggacaatcttccaaaacccaaatctgagcaggtcactttcctgttctgtcatttccgccgttgcctgtcaccctccagcacagcacaggaggtcctcgtgggtggctgctcctgcttccctgtccacaagtccccacctgccttctctctactgcgtcaagctccttgcagactctttttttttttttttttttgagacagagttttgctttgttgctcaggctggagtgcagtggcacagtctcggctcactgcaacctctgcctcccaggttcaagcaattctcatgcctcagcctcctgagtagctgggattacaggcaactgccattgtgcctgactgattttttgtattttagtagagacggggtttcaccatgttggccaggcttgtctggaactcgtgagctcagacaatccactggtctcagcctcccaaagtgttaggattacaggcgtgagccactgtgcccagcccttgcagactcttttcctgttctctcttggttccaggattttcccatgcctggaacattcttccttttctgtcctctttacccagtttagtcaaggttttttgtcaaggttcttctctaccccacagactccctctgtgtttacggctatctggttcagttggctgtggcgagttgcgggcctttcttgaggtctcaggtcccagcattgagcagagtgcccagcacatagtaggaactcactagaaagtacttgttgactttgttaaaggaatagaagtgtttacccatggaggtctgagtgtcagggaagctaaagagaaaatctgtaggaacttcaagtactgggagtgggggtgagaaagagtagtccaaggcactgctgaaaaaaatcgtcccaggcctcaggtcagaatggggatgggtaccattcatgagccagcaagacccagaaccaggaggccaaattagaggtggtgtacaaggggcatacacaggggaatggctcgggtttagccagcaaattggaaggacattggtgtcccgctggtttagggcatcagctgcgtggcttggaggagagagctacttttattttattttattttattttttgagatggagtctcgctctgtcacccaggctggagtgcaatggtgcaatctcggctcgctgcaacctctgcctcccaggttcaagtgattctcctgcctcagcctcccgagaagctgggattacaggcacctgccaccatgcccagctaatttttatattttaatacagatggggtttcaccatgttggtcaggccggtcttgaactcctgacctcaggtgacccacccacctcggtcttcaaaagtgctaggattacaggcgtgagccaccgcgcccagccaagaagactaccttatgagggtagagtgggccagacacactcaggcaatttgttccttgaagttgagtgcctccagtcttttcttcatctgtatcctcccagctctgagcaccgtgcctgacacttggtggatgtttgttgactgtgtgccaggcacagacaatatgtactggacggaacataataaatcaccataggggaaaatgttagaataaattccagatgggctgaggaattgaaagtgaaaacactatgactggaaggatgggaaggagccggccttgtgaagaatgagggagagcattcagccagtgggaactgctggtgggaaagtcctgaggcaggaaagggtgtggcctgttcagggaactggaggacaccagggtggctggagccccgtgggccagcgggagttgggggggttgaggtagagaagtgtgcaggcgccagctctgtcgagcgattgcaatttgtagccaagaacctggattttatttgaagtgccaaggtcagccattgaagggatcttgacagataacacaatgcagattgagttttattaaaatcaccctgtcttctgtgtgatgaaaggaccaggggcctctcagtagacacgatgaatccaggaggaagactatggaagtagcctagggaaagatgtcagtgacttggcccaggatgggggcagtgaggatggaaaagaggaaaaaacagtttaagatttgtttgctgatgtttgcaggattagatgttgggggttagaaaagaggaggattcaaggacgacatccagggtactggcttgagcaactcagtagactcatttgttgaggcagagaacaggggagtgatggtatgaggtttgaactgtgtggtgtggggtgtggtggagggtggtagtcagaaggagggagtcagtttagaggcctatgaaacatgcaggtggacatcaagtagacggctggaaagaaaaacttacattccagttgtgaaatggccaaagagttcaatagaaacatcgaaaaagaaatattaactaaatgcatattcatcttcaccaataatcaagtaaataaatctacattaaaaccactatcaggccgggcacggtggctcatgcctgtaatcccagcactttgggaggctgaggcgagtggatcacctgaggtcaggagtttgagaccagcctggccaacatggggaaacccygtctctactaaaaatacaaaaagtagctgggcgtggtggcaggcgcctgtaatcccagctccttgggaggcggaggcaggaggatcactcaaacctgggaggcagaggttgcagtgagccgagatcatgccactgcactccagcccaggcaacaagagcgagactccgtctccaaataaataaataaataaaaataaaaccactatcagttaccattttacttgtcaaattgrcaaaattggatttttcaaaatagttatgataccaaattttggcaaagaaattgaaatggactcccacacactgctggraagtgtatgttgataaaaacacttcaggaagaagagtagaaatacatattaagtgttttaccgtgcatatcctttggcccaaataaattcatttttagtgtaccctaaggaaaaaatgaatgtatgggaawatagatcattttaaattaaatataccctcacatagtttataacattaaaaaatggggggataataataggacatcaggttaactgtattttgaagaatctttaatgatgtaaaaatgcttgctatgttgagagtgtaagagctaaagtataaactgttacgatgttatgattccaatatttaaaagtacaaatatatatttataaaatatatatacatatgtaatttttcatgttttctccagttaacattattttatgttataaagtaaaattttaacaagaaaatatttaaccttccaagaaattaaggaaatgcagctttaaaaagaataacactttctcaactattaaattatttcttagtctaaaagttactttatttctgaagtaactgatctactactagtgttttgcagatgacacttcatctctttcaaaaagcaatttggtgatattatcaagatcycaaaggccggatgtggtggctcatgcctgtaatcccagcactttgggagtctgaggtgggcagatcacaaggtcaggagtttgagaccagcctggccaacatggtgaaaccacatctctactaaaaatacaaaaattaaccrggygtggtggcaggcgcctatagtcccagctacttgggaggcaggagaatcccttgaacctgggaggcggaggttgcattgagctgagatcatgccactgcacaccagcctaggtgaaagagcgaaactccgtctcaaaaaaaaataaataaartaaaaatacttcatccctttcaaaaagcaatttggtgatattatcaagatcccaagggctgggcgtggtggctcatgcctggaatcctagcactttgsggggctgaagcgagaggatcacttgagtccaggaatctgagaccaacctgtgcaacatagtgagactgtgtctctacagaaaaaaaaagaaaaaaaagaaaagaaagagagctcatttaacctagtaactacctcctgaaaatatattactcattagcaattaatttttttaataaaaggaaaagctatttgtgtatattctttataactgtggcctttcttgtaaaagtgaacatttggtagtagcgtatrtatccagcctgaaacttttggtacatctaccgtatacagcttctataaactatacaaaagattattatagaaaaagttttgtgaaaaacgaaacttggaagtttgtaggaagatgattctacaaatgataatcgagtgtgctcatgagactggaaggaaaataacagaatgagtagagtcatgagggtaaaatactctatttctccaaagttctgtaatatttcatattattttattgttactgtttattttatgccctgcctcactccaaagtatatttgatatgatactgttttctarataataaaacaatgaataaacgtagtgagtgactataaggagattcattattaaatgcatcagaatgttttgccttaacctgaggatggaagaatttatgatctgagtaattgctcaaaggttctttgttgtcacrtggaaggctttgaccttgattttctgatttaggcattcctatagactcagctcattataaggatatgtaatttgcatgctattttatttattcagtccttaaattccatagttgtttaaaacaaataggaagatgtcttagccgagcacagtggcccaagagctcataaccagcctaggcaacatagcaagacccccrtctccacagaaaattcaaaaattagccaggcacaatggtgtgcacctatagtcccagcctactcagtaggcttaggtgagaggattgcttgagcccaagagtttgagaatacagtgagctatgatcatgccactgcactccagcctgggcaacaaagcgagaccctatttctgaaaataaataaatagaaagatatcttatttctctagttcaaccttcacttgactggagacatccacgccatcaccgctgccaataacttgctggctgccgccatcgacacgaggattcttcatgaaaacacgcaaacagataaggtgagaaggatgccttgctagccattttgggtattgtatcctggaattcctggattcttaaggagtttgtggaaagaattctggtgtctgcaaactctgaaatgttattcaattcaattttgtgatttttacatatgtccctgtttcccaaggagaaggagccatcctttgatcagattctcaaatgggtttatgagcactgccaagttattgggagaattgtagtatgttgtaaaagccaaatattctctaagatgagtctttagttttaaagatggtaggtagaccagttctcttcattctggtcataggtccaatctctgatctgttctaaggggattggacagatgtcgttttaagactaatgttatgtggagctattttagatgtgctgaaaagatgtcagagacccttattgggcttcatgtgcttgtaggttaagagttaaaccacacccccaaaggggacagcccaccagaagctaattcctcacagatataggacatagataaaaggggtaccttctggcacattttacaacaagggtcctcactttctttaattaaagtagttccttagtgagtctttgctacataatccagatacatcttcatatggtagttgtagcgatatagatcaagaaatatatttatgcaaactctttgcaatgtgtattatttcagatcttgtcagttttatgaaaatgacagaatttaagtcaacattgtttatattagcccacaaattttaatagggtcttttatctaaatagttyggttataaatgcaatgaatttttgtcatatcctgtgaattgtccaagttcatggacaacnaacttttgtgtggtctcatttttgttttgtgtttttaggctctgtataatcggctggttcctttagtgaatggtgtcagagaattttcagaaattcagcttgctcggctaaaagtaagtttccagttagcaattctttaaaaagaaaatatcntagaaaygcatcagaaagattgtcaaagcctgaaattttcaacttggtttgattttggttttcagatatccttttgggtattaaactctatagagaccgaacactggagcagagagagcacagtgttggaagcctgaaccctggttctacacraaagagccaggtggacaaattaattaaccttttttggtctcagtttcttcgtctatgaaatgagaggactgttttgctaatttatgagtactctagtcaactgacaagttagctgggcacaggagcacatacatacctgtagtccgagctactcatgatgctgatgtgagaggtttgcttgagccaaggagttcaaggtttatagtgcaccatgatggcccctgtgaatagccactgcatgccagcctgagcaacacagcragagcccatctcwyaaaaaaaaataacaaattagaatttttggtgagtccttctctttctaaagtgaaatatttttatgaaatttgttaaatttctaggaaattataggataacctttgaaaactcatctatctcatttgtggttttctgttttgttttgttttgttttttgagacagagttttactcttgttgcccaggctggagtgcagtggcrtgatcttggctcactgcaacctctsccttcctggttcaagtgattctcctgcctcagcctcccaagtagctgtgattacagacacgcaccaccgcacctggctaatttttgtattttcagtacagatgggatttcaccatgttggccaggctggtctcaaacgcctgacctcaagtgatccatccaccttggcctcccaaagtgctgggattacaggtgtgagctactgcgcccagcctcatctacgtttttgttgcagcaaacactacaattatacttgcgtatgccatcttaattcttaaaacctgtcttatcttttttctgatgccatttgctgcctctggtcttctaatcatattgcttgctactagccctgtttcagagactaaaaaataaccctaaatggtataacttaacaaccttactggttggtattaagtggttttaaaaattcacctcctgcctcttactgaaccaagttcagtgtgttgaattagtgagtaattccatcctcggcagctataacaacatgcagtttctgtttcccagatcttttttatgcttcattaaaaatcactattttgccaggcacagtggctcacgcctgtaatcccagcactttgggaggccgaggcaggcagatcctgaggtcaggagattgagaccatcctggctaacacggtgaaaccccatctctactaaaaatacaaaaaattagccgggcgtggtggcaggcgcctgtagtcccagcttctcgggaggctggggcaggagaatggcgtgaacccaggaggcggagcttgcagtgagccgagatcgtgccattgcactccagcctgggcaacagagcaagactccatctcaaaaaagaaaaaaaaaaaagaaaaatcactattttgtgtgtgtgtgacagtcttgctctgttgctcaggctggagtgcaatggcacgatctcggctcgctgcaacctccgcctcctaggttcaagcagttctgcctcggccttctgagtagctgggattacaggtgcccaccaccatgccagcgaattttttgtatttttagtagagaaggggcttcaccatgttggccaggctggtctcgaactcctgacctcaggtgatccacctgcttcagcctcccaaagtgctgggattacaggcatgagccaccacacccagccaaaaatcactttcttaagatgttttatttacacaaaataaataggaagatttcttggcttggtgtggtggctcacccctgtaatctgagcactttgggaggccaagacaagaggattgcttgagcccaggagttcatgaccagcccaggcaacatagcaagacccccgtctctacaaaaaatttaaaaattggctgggcattaaaagttttawtttttttttttctcctccataaattaggaataacttactttgaaacataggaataaacttaacttgaattactggtatttgtatttgaaaaactaaagaactgcggcatcaattatatggacagacagcagtttatgtctcttctgagcagcgtacatggtggccacatagagcagcccaaggagcccctggctaacgcagccagcagcaggcacaagtggtagttagctgtatgctgtccactgcaggacatcttcagatcaatccttttcagagtctattacgaactcacagtatcttactcgtagaagaaatctggccataggtatttgtctgacttggcctaacctataattcactcaaagttcagtttagtttagtttttttttgtttgttttttgttttttgtttttttttgagacggagtttcactcttgttgcccaggctggagtgcaatggcgcaatcttggctcactgcaacttctgcctcccaggttaaagcgaytctcctgcctcagcctcccaagtagctgggattacaggcatgtgccaccacgccaggctaattttgtatttttagtagagacrgagtttctccatgttggtcaggctggtctcgaactcctgacctcaggtgatctgcccacctccgcctcccaaagcgctgggattacaggcgtgagccaccaygcccagcttagttttgatttttgttttttggtttttttggagacagagtcttgctctgtcactcaggctggagtgcagtggcaggatctcagctcattgcaacctctgcctcccaggttcaagtgattcttctgcctcagcctcccaagtagctgggattacaggtgctctccaccatacctggctaatttttttatgtatttttagtagagacggggattcaccatgttggccagtctggtctcgaactcctgaccttaggtgatccacctgcctccaccttccaaagtgctgggattacgggcatgagccaccgcacctggcccagtttagtgttttttttgttttgttttgtttttgagatggagtttckctcttgttgcccaggctggagtgcaatggcacgattttggctcaccgcaacctccgcctcccaggttacagcgattctcctgcctcagtttcccaagtagctgggattacaggcatgcgccaccatgcccagctaatttttgcatttttagtagagatggggtttctccatgttggtcaggctggtctcgaactcctgacctcaggtgatctgcccaccttggcttcccaaagtgccagtttagttttttaaaaggctttaccaatcatggagaaaataaaattagagggataattttggtgaccctttgctttctgtttcttctcaaacttctcaccttttttcttcttaatcattagaaactgggaataaataagactgatccgagcacactgacagaagaggaagtgagtaaatttgcccgtctcgacatcgacccatctaccatcacgtggcagagaggtgggtgctggggagatgccagcaggctgatggccaggtggggaggygtgttcgagccgaagcgcttaaattcagaaacttacagtttgatcctgtccartgatcttcccagcctgtgcttcatattcccaccatttatttcagttactattatcgtaccaccctcccttatccttgcctccaattaaaacaaaaattctgtccagggtcaatcccatctactccygtgtcttctaaatttccaaggaaaattacctaattttctcttctgtttctctctcctttggcctcttgtatctatattaagaaaaaaaaaaagaaactttttttaaagaccacgcctccctggctttgtcctgctcctcctccacccaccatcccaccttcttctgttcacttccttaccactggctctyggcagctctctgtgtgtttccagtgctggattttcctccaagtctgatatgtgctttcacccacttaacgaggcatcgctccactgcttcacatgcatccaggtggagtccccgtgagctccccaccacctcgacttccctgcttccctctcagttgtgaagtccccttccttctcccacactgccctcagtctcatcgctcactatgggatgagacagagggaaatgcactaaacaggaagttaggagccctgagtgtgtgtctcccctgccactgactcactgcatgatctcgagcaggtcgcatgcatgttcttggcgttggagatggagatggtcacatacgctgcacagaaacacggcaaccacattttatgaaccctgtgcaactgcagaaatgttcaatggcatggatccctgattcttcctggattattcttctcayacttgtgccctcatttacctctttatgctcacatttggaacatatttatcagatgcgcattttatagcagttcccgactaatagattatcttgcttccgtttccatcccccagttcagagggttcacattaacagagatatcccgttgtgatcagaggcctccagtggctccccacatcctgggtgatacagttgccatcgcagagcttggtcttcaggacacccrcagtggcttccctcactctgctccctgcctgctttctagtcagcagtgccgacctccatcctcctgccagccctagctgggccatctccatcctgtctcctgcctaggccagtsttgccctctaagatgcacccaggtctcgtcccttcagggagcttcccttctgggaatccacccagccagtccattaagaatttagtgtagtcccacaaaccatgaggtagagagacaaagaccaragactgagcgttggctctgcggtttatgggctgcacaactttggacagactgctcactcagtttcctcrtctttaaaatggaatcataattccagctgccttgctgggaggcttcactgaaacataagcatcctttccagacccaaaagctctgcccacacgatcatcagaagtcactgtggtgatagctgtattgagtagagttttttgtttgttrttattttgagacagagtctcacttgccctgtcacctaggctgaagtgcagtggtgcgatctaggctcactgcaacctctgcatcactggctcagtcgattctcttgcctcatccttacgagtagctgggattacaggcacacaccaccacacgtggctaatttttgtattttactagagatggggtttcaccatgttggccaggctggtctggaactcctgacctcaaacgatccgcccacctcagcctcccaaagtgctgggattacatgcgtgagccactgtgcctggcttgggtagtttttttgagtgtctttgtctcccaaactaaactaaaatctccttggaaactttatggttttttttttkttttttttttgagacagggcctcattctgtcacccaggttggagtgcagtagtgcaatctccactcactgcaagctctgcctcccaggctcaagcaattctcctgcctcagcctcctgagtagctggaggctgtgcgccacaacactcagctaattttcgtatttttagtagagatggggtttcatcatgytgcccaggctggtctcaaactcctgagctcaggtgatcttcctgcctcggcctcccaaagtgctgggattacagacatgaaccactgcacccagcctagaaactttcaaggatacatttttcattttgaaataagtaataacattatagagattttggaaatgtctcaaaagaattttaaaaaccttgctatactaataaaactactattcatagttttttgtgtgcatctagttttttggtataactctagttataactttagtgtatagattttatatcctacgagtttcattcatttatatcataagcattttgtattttgttagctctttgttgtaatggccattttaaatactctagaatattcctttgtggatgaaccacaacttacttaagcaaggctcagttcttgaaaacaccaayagcattttaaataatggacatgaatactttaagcattttattgagaagcctacatattttctttgaaaattttttttataactaggaagatttattattaaaatgtcatcatgtccaaaatgtaytgtcatctttttttttttcaaagcatttgtgattttgtgttactcttcaaaacttttttggaggtttactgatgataggaaaatcaggaaggtggaaattagtgtattttaaaccaagcatatggatgtgctaaaagagaaagttttatgccaattggtattctttggtgtctgctttggggttccagcctgagcagccatcagaaacagggcaatggcttagacatggatcttggaagagaaaggctacatcatcttttatacctgggtctggtctgcaattggtttctctctggagccaggaaggactgaagtgttttgtggttgtgaatcacttttaatggaagtgacaactttacaaaattcttccggaaaaaaatttgaattccattattgttcagggcactgaagtaaagaaaactttattgctgtggacaagctacctgggtcagaggaatttggaatgacatttgataagtagtttggctcttatgaccatgaattaataacagaaataggactcttcatcaaaagaattgagaacattygctagtagggttttttggcttaaacctagaactaatgtaacccttgtgatgaaattggatccttatttgatttgacaactagagcaggacagtcagggtgcacggtggtgggagtgagaccctcttctcaggccatatggatgttgcgccatttaatgaccaccccttcctttcagcctgtgtacaaaatctgatgattgtttcatctttttttttgagacagagtctcactctcttgccaggctggagtgcagtgtgcgatctcggctcaccgcracctccaactccctggatcaagcaattatcctgcctcagcctcccgagtagctgggactacaggcatgcgccaccatgcccagctaatttttgtatttttagtagagayggggtttcatcgtgttggccaggatggtctcgatttcctgacctcgtgatccgcctgccttggcctcccgaagtgctgcgattacaggcgtgagccaccrcgtccagcagattgtttcatcttatgcctcataccgaaagtttaaaggcctcatgttcctggacccagagtggaacaaggaacccacagacctttccagaaatacttaacataagcagaagaaaatatagacatacagccattttgttacagagcataattttgcacagatgagcctctgcctgtccgagccccggggcctcacaggcttgccrtctctccatctccctcgcatgcccaactcctggccatggaccaagggcccacaagcctccctcagcctcagggaatcaaccatcaagtggctggttccttgccccaacaacactctagggaatcagtaccgtgtcttccactggggccgaaacagtggacctgcccctgattgaacaccttgtactgccaggctcttggccaatattggctgtttcatcagccattaggcatactgtggatgttccttaggacatagtcagcactgtagtatagtcagcactgtagtactaaaagggatggtccagagcaaaaaataagcaaacagatctcccccggctgcctccacccccacacccactggcattgtcctagcatgccttacataagaggctggcactgtcttcactatatctctgtacagctggctcgggactaggcacaagtagcccctcaatacatactccaggagtgaataagtgtttcttattccacctttagttctatcattcagagaccaggaattccattttggatcactaacttagggttactttctagtatctttcttgtgggctggaatttaaccttcacatttcttatgtatcactgatgcatcacttaccrggccatgttaaaggcagaggtgggctttggaggccactgattctagttgatcttgccagacatttttttttcttgttttctctttgctagataaaaaacagctgaatttctcttgttgattttaaagaaatttgataaaaagattccctcaatctggtgccaagatcgtgtatactacagagcaggaaagaggtttttagttgattgactttgcaccccatgtacatcttgggaagaacagtggtggctgaggatactattgaaaagcaggcctttcattttgtatatgctctgcttatagctgaaaaactcataaagaaggtttctgtgtgtttatatgagtgtcagttggtgtttgtgtgagggtgtsagtgtgtctgagagagagggagcttgttataaagactaacaacagccgagtcagggaacagccataggccaagagggcaagctggcctgctggtgctttgcgtatgaaagaaaaggttaactttcttcatcctacggatgcctatagtaccaaatacgtaatttccatcaccattttcataagtgctgtatcgtatacattgagtaaagyggatctaaattgtcaatgtggacagcttgttatttgaagctgcataaattaacaaagtcagtgtactggctttgttttgttgcattggtattcactaaaccaaacctaattttcacaaaatgtaaataactgcaattcttgttttgttttgttttgagacagggycttggctgggtgcagtggctcacgcyagttatcccagcactttgggaggccgaggcaggtggatcacatgaggtcaggagttcaagaccagcctggccaaaatggcaaaaccccatctcttctaaaaatacaaaaaattagccaggcatggtggcaggcgcctgtaatcccagctacttgggaggctgagacaggagaatcgcttgatcccmggaggcgaaggttgtagtgagccaagatcacgccactgcactccagcctgcrtgacaaaaaaaaaaagagagacaaggtctcacttccatctcccaaatgggagtgcagagacacaatcatggtcattgcagcctcaacccccaagactcaagcaatcctcccacctcatttttgtattctttgtagagacaaggtctcactgtgttgcccaggctgttctcaaattcctaggtgaccctcccgcctcagcctcccaaagtgctgggaggtgtgtgccaccacacccagccaataactgaaattcwaataagccagtgaagaaaataaagagaactggtacttgctctattcaccattcacccccgccaccccccacaattctactttatttacttttgctttttaaaattgtggtaaaatatacataacgaaatatttttccccatttgtaagcacacaattcatggcattaaatacattcacaatgattgcactatcatcactatctatacccagaaccttttcattatccccaacaaaaactccttatccattaaataattactcccctcttctgcccctgcctattctaggtgcctgatataagtggactcatatagtacttgcctttctgtgtctggcatatttcactatgcaccatgttttcaacatccattcatgtatcaacatgaccttcttttatagccgtctaatattccattgcctgtctgtgccacattttgtttatccattcacctgttggtcgcttcctccttttgactattttgaatagtgctgctatgaacatgggtgtacagatatctgagtgtctccttttggttctttcgggtaatgccaagaagggaagttgctggttgggtttttttttttttttttttttttagagggggtctcactctgtcgcccaggctggagtgcagtggtgcaatctcagctcactgcaacctccgcctcccaggttcaagtaattctcctgcctcagcctcctgagtagctgggactacaggcacacacwaccatgcctggcaaatttttatatttttagtagagatggggtttcaccatgttggccaggctggtctggaactcctgacctcaaacgatccrcccacctcagcctcccaaagtgctgggattacaggcgtgagccactgtgcttggcctctagtggatttttttgtttgtttgttgtttatttgattctttctctatgtctacccactagatggtcagcttgggggagcctgaccttttctctttcaccctctgcaacttcctgagcatcagaacaatgccagacacacaccaggtggctggtccatatttgtcgactgaatgactaatctgttctctttcagtattggatacaaatgaccgatttctacgaaaaataaccatcgggcagggaaacacagagaagggccattaccggcaggtaggtggtgctttcttcccgggtgtggctctgttcttacgttcatttctactggcctgggagctcactctttgcctttcttgtctcatccccaacctgttgtggccagtggttctctcactgttttgggtgctcagcagggctgggagaggatcagaagacatagaggctccagtgtctttttaccatcttttctatgtatgtttatttcattttctttttttcatgtatgtttccaattgtgtttccaggaagagccactcagggtattctttgaatataaattstyacttattttattgggaaccatccaggtaatactacatctgcataactgataaatgaaaatctcagacacattactcaaatttcatatatcaaagaacaaacacctagttattagacttaatagcatgaggattttttaaaggataatggcttattaatacaaaaatggcttattaataaaatacagagaatgcagaagaaaaattatgtctgacttcattgtaatagatattggatgtgcgtcaatggcacttagggaatacaaattaattcctatgatttttcatccaggcacagtgggcttctaaattgtgttgtgtttttttttcttttgaattgattataaactgtacatttaagaacagttttagatttctgtcctttatgttaagtttttattagtgaaaaaagagtcaccwtactataataaccaatccttacgccaaatagacttgtgaccttttgaagtgtcttgaattaaaaagtgaatgtaggtattggattaagaagagaaacttaagttcgtggacctcgtctcctcccagtcctgtaacttacacacacacamaaacagatttcaaatatccatgctagcaaactggaatcattgccatgaagttttagatagttctgaaaaataggaagatggaattagattgatgattaaaaggacarcccaaaatatggtggacttccatccttaacaagcattcttgcttttcatgttcttagcctctcctgctaaagtgggagctttataaaagcagaggttattcccctttttatttgctgctgtgttccctatgytcagaacagaactttgttacatatagtcgtaagtgttcagtaaatatctgttgaacaaatgagtagaataagtaaaagacaatttatggatacagaactaaaatgccaacataaaaagatgttcatgaataatcataaaactgcaaattgaaacaatggagtatcatttacctaggagcttgtcaagtgaaaatagtaggtactaaatgctagtgaggatgcaatgaaatgggggcatttatgcagcgttagtgggagtagaaatcctttttggatgagtttgttattactaaaatttgaaatgacccaacaattacaactttggaactaaaaatattttaatgaaaagaacaagaaaatgtgtaacgtacaggaaaaaattctgtgtattaggatatttgttgtgccattatttgcagtggtgaaaattggaaacaatccaaaygtccaacagtagagatggttgcatatatttggtccgccattttgtcccatgggagagttgaaattaataaatgtgygtatgggtgtcttgacatgagtagagagctctcatacaccattggaaaggttgtaaaaaccattttaaaactttgaagtaaaatactgatattgtaaacctgtttatgttaagaaaaacccagygtgtttacttacattataggcacttacaacttatttgtgtatataagtgcctagaatgaaaagtagaaagatgtatrccaactgttggcattagttgcctgtgtaatraaagcgagtattgaaaaggccctttctctgcatagttttttactgtttaggtactggagagatggaagattcacagtggccttgatttcagtgcctactctgtgcattgtattgatagttccattacatatattagcacagttcatttgtaaagctgatttgcaaatgrggaaattgggatgttatgttaaaaaaacttgcccaaggttatatcttgtgttgcttcgtgcatagatatttttaagtaaaaaggggttatagtgtatttaagagatttaactgctttttatktatcataagactgtagkgaagacatctttttakgtcgataaaggtagacctgtatcttcatttttaatgaccacatcatatctcatagaggtaccatagtagattcagccatttccctgttaatgaacatgtagagtgtttgcagtttcaggctatcacaagtaagctgtagtaagtatacacatatatttgtgtgtatacttgatactatccttaggatattattccagatgtgtgattgcagagtccaagaggatacaaatttccaatgttgacatatgttttgacattaacttccaggaaattcataccrattcacatccttgccaatatcccatattggcctttgtttaaatgtgtgctaaatccctcatttgccctatcrtgattattacacattgcatacctgtatcagaatagttcatgcaatccacaaatatatacacctactatatacctaaaaaaatgaaaaggtaaatactaaatcaataaatgtgtgataagctgatgaacaataatgttttcattggcatctttatatgattttgaaatattttatttgcaaaacagaaatgagcagccttccgctatgcrygtcatttagtcattaaagtgaatracagtgatactttaattgacccagtgtgtttcattttttttatgctcaagatgtgaaattttgtaattgtaacaattacaaatgaagagcttgaatatcgattatatattattcttatttacacagytaatatttcaagaatgtttctagtctcatgttttgtacagaaaatctccatattttttagtcattttctcatatgcactgtttataatagaatggtagtatagagaaccctaaatttcatacaatgaaaraccacttatgtttggaatgagttatattgagaatgtaataattkaatatagttgtatttgactttcaggtaatattttttcactaaatcagtgactaatgcaatctcaaccaggaagtagccagaaagctccttatttccttcctttccttacttgtcagtgayggaaatggataataaaatgtctcataaggtgatcccaccagggcacagccattctctctctgcrtaagcttgaacttgtctggctcacactccccttgggaagaagagaattaagctggggcgtaatgaagtggttctgtccagagaaacattcctagtggctgaattatgaggaggaggaagtacacrttcctgtgtcccttttattccatgttggacttygtacaacgtggagccacagccaagagatgggaataggaagtcctagaactttttgcaaaaagtctgtgctctctagctttcactactgaaagcttcaagatctgatgtggccatatcctcctgggcagctgaaaattgagtctgtgccaccagttgactgggttgccctccctgctgtgttgagatccagctctgggaaagtagcctcacatgcaggaagccagcatctttcactgccccttatctctgtgccagacagacaatgcagccttcttgacagacctattactaacaagggaggtggcccgtaggctagtcattaattcatctgatgcatattgtatgcctactgggtctcatgctccgtgctggggattcagaagtgaacctgcctaatatagtccctgccgtcatggcacttacggtccagtggtagactgataatgaccacactagactgataatgacattagtaatcaattaagtctgagacatgctacaacagcaaaccatgtggtagtgctgtgagcgggtgtaacaggggtcctaactcagcccaccctttgctgagcagagcatggcaaagagcacattccgcctgggaggccaccctagggagcaccaggcacaaaccctgcatggtccagacaygcagaaaactgatgggattgcatgcatggccttttgagggtagactctctgggcctgtggttgcttcatggctgaagtccagctccttgtgggaatggccatcccactggcactgtcgctgaccactacctgtgtttgggctggttcaggcgcagtttgacatcgcagtggccagcgagatcatggcggtgctggccctgacggacagcctcgcagacatgaaggcacggctgggaaggatggtggtggccagtgacaaaagcgggcagcctgtgacagcagatgatttggtgagtgtttccaacycggaagcttcagggagtggacggtcctcgttcttcgttaccagaaaaagaaaggttttcttccttttatcagtgagtgtaatgaggatacagaaaaagttyccacacacacatttcttccccgacaagcatgtttgcctractgcttcctaatgttctcatagtcatatatgacgtgcttatgcctggctgcaacaaaaacatgtgaaatttatttcaggagctttccaccatccttgccaatcctgatctctgcttctgcctgggctggggaggagtcacccccctgcagtcacttggtgacttttaaaaaatgtaccttctatgcctgcctgaaattgagggcaaatcacctttccaaggaacagaaggaagtggctctgcttccatgaacaggaagataaagttaaaattggcacatttctggcaccagcctggcttattatttaatttggggccytagatttgggttttgtattataaaagcaaatctctgcctcaatcagtcttgcttttctagttcccctttgagtagttgtggtgctttctgtaaagcttccatggaacaccatttccttttttagtgctttttctaattggcatgctagtcttcttttcttcttcgtctttctggtataataacaacctttcctgttaacttttttttttttttttttttctgagacagtctggctctgttgcccaggctggagtgcaatggcacgatctcagctcactgcagcccctgcctcccggattcaagcgattctcctgcctccgcctcctgagtagctgagattacaggcgcacgccaccacgcccagttaatttttgtatttttagtagagatggggtttcaccaggttgtccaggctggtctcgaactcctgacctcaggtgatccacccaacttggcctcccaaaatgctgggattacaggcatgagccaccacacctggccttttccagttaacttaaactccacatattccataggtgttttgtttgcttgcatttttgtatataagtgcatgggtgtggacacaggcctctaagatagccattactccaaatttaagtttactttcccatatactgaatctcctacaataatggaacttaaaatgcacactggtgattggtaagcagttgtgaacagagaraggcaaagtcatattttattaatttcaagggcttagggtataatttgaattctttttcaaagtgtccggattgtttttcagctgcttttgaagaaatgaatctaactcatctcagaagtcttgtcaagtaaattcaatagatcaaygtatgtcgcagcctatggaatacttagtataaaaattgaagagaaaaccctcaggttgctataaaagtgctgctttattaaaattaccaaaatctcactatttctatctaaactgacatactacagtttctgtctaaatacattgctctgtattttattaatttgtatggcaataaatatgtgtcaggaacagttttaaaacttaatcctcaaatactgcttccttaaatytatttatttatttttatttatttattttgtttttgagatggagtttcgctcttgttgcccaggctggagtacaatgccgtgatcttggctcactgcaacctcygcctcccagattcaagtgattctcctgcctcagcctcccaagtagctgggattatgggtgcccactgccacacccggctaatttttgtatttttagtagagatggggtttcaccattttggccaggctggtctcgaactcctcaggtgatctgcccacctcgacctcccaaagtgctgggattgcaggcatgagccaccacrcccagcccttaaatgtatttttgtgtgagtgtatgataaaaatcttggatctggaacaaacccaaagattactctttttagttacctttttaaataaactctttatttatctttttaataaactctttttagttatcttttgtgtttcttgtttgcaaaaagtamctaatttattaaattgtgcttcatccagtgggagctattgagagttggccacccatagaaaattgagggaggattttaggaactgctgaaggtttctgccacatgcatgattctgatataccctggaagaatccatctgagccttccccacatggacacagagtgtggaatgctagcagcacacagagggtggcagagcttgccctgcacgtgacagcacaggcgctgagatgtgtcccagaaaaatgagcaggtagaagcctacctgagacatccaacagaaacatccctcttaacttccttcctcctttagtgttttgaatcagtttatttggttgggaagtgtaagcaaggatagtgtacagagaagtaggaaaactactcctcttcttccacctgctctgcattagcacaacaggacaactctcactgagccttcctgtcctgaagatttcttttttcttttcttttctttttttttttttttttgagatggagtcttgctctattgcccaggctggaatgcaatggtgcaatctaagctcactgcaacctccaactcccaggttcaagtgattctcctgcctcagcctctcgagttgctgggatgacaggcacctgccaccatgcctggctaatttttgtatttttagtagagatggggttttgctatgttggctaggctggtctcgaactcctgaccccaggtgatccacccgccttggcctcccaacgtgttgggattacaggtgtgtgccaccatgcccagcctgtcctgcagctttcaaagtgaaccatcttcgtgtatgtataatgagtgggttgcattcatatcatgtgtgttttatacactgaggtagattccagttacgtaggaatatagttagtaatagtgtattcctgaaaattgctaagagagtggttataaagtattctcaccaccaaaatgataactgtgaggtartgcatatgttaattaactaggtttaatcattccacagcatatacttcaaaacatcatgttatacacaataaatacatacagttttatctgtcaatttgaagttaaraaaatagattggattttcttacaccttttaaatgattaaatattataaaaatagaaaccaatcacatgagagaaacatttactactgttgttgataaaagtacggggagaatgtaacgcactttagagtgaggaagattctctggattctaccactgcatctgttagcgccatggcatactgtggtaaaatggcactgttttccgatgctatgtacagcaagggatagcgccctgttttccccccctagagctaccgttacaagcatttgcttatgttatagccttccaataactaatatgttgaaaacaccaagacaccacttaaggtctttacaaagtgagaaggaattgggaaaaaaagaaacaaaggccgggcacrgtggctcacgcctgtaatsctagcactttgagaggccgaggcaggcagatcatgaagtcaggagttcgcgaccagcctggccaatatggtgaaaccccatctctgctaaaaatacaaaaaaaattagccgtgtgtggtggtgcatgcctgtagtcccagctactggggaggctgaggcagaagaatcgcttgaaccctggaggcagaggttgcagtgagcctccagcctgggcaacagagagagattccrttctcaaaaaaagaaagaaaagaatgtgaataktgacatcacattaaaaaataataacaaactttagccttgtggcctttttttggcacatgttttccgctagttctcatgcatcatccctattctctctcttctctgtcttttcttcatccaggaacagagaaagaggacttagaaggaactcaacccagtacttcctaggattggaaggaagctgccttatttcatgtataagtggcaccagcttgactgtaggaagagagatagcgtgaagcctttcasatctaaactagaaagcttttaaacgtggtagtttgttgagttattctctctctgtggaatgaatgatgtagagatggtgagaaatcagagtgggtgattttagacatttccctttaccctacttcattcctgctctgtacagagccttgtttctgttcttcaccttatttctttgagcaagagtaaagcctctgattatgaaaatacactgtgcataaatagccagaaaacacattttcttgcaatgaaagatttgttttatggaaaatctcataaacaccatcaaggaaggttttggaagaaggtcaaatgtccttcaaaatgctattaccccatcaccattcacatcttagtgtgactgacatccgttctcagctctggtggggagaggtggacagagacagcagcactgtcccctgtggcccaggkttgcctgtggggacgcccacccaagaagcaggctggagagaagtgccaaggggttaaccattgcctggatgatattttgtcaggaatctaatgtttttctctctcctgtagggggtgacaggtgctttgacagttttgatgaaagatgcaataaaaccaaacctgatgcagaccctggaagtaagtggttttcttcttatagtaattgtttgcattaactggattgccacmcaatgtgaacatttttagccaatatgaggcaggcatagagcatgcctggggcagcagtgtgctttgcaatctcaggcagaaagagtgaggatctggttaggaacctgtattagtccattttgacattgctacaaggaactacctgagactgggtaatttatgaagaagcatcagaataacttcttggccaaccaaaaaaaaaaawttttaagtgtattcatagcttctttaatataagtcatgtcttggcttaattgacccgagtagaaacttagaaagtcaatgtctgaggccaggcgcggyggctcatgcctgtaatcccagcactttgkgaggccgaggtgggcrgatyatgaggtcaggagttcaagaccggcctgaccaatatggtgaaaccccatctctactaaaaatacaaaaaaattagccgggcattgtggcacacacctgtagtcccagctatttgggaggctgaggcaggagaatcgcttgaacccgggaggcagaggttgcagtgagctgagatcgcaccaccgcactccagcctgggcgacagagcgagactccgtctgaaaaaaaaaaaaaagagaaagtcaatgtctgtctaacatttcaataggttgtatggccatgtttacaatttattttctgtgttcccttaatctctcataatcattgagttgtggattttttggtttgcttttttattgttgtttgtttgtttccaagcaaaatacaataaatgccaagrctttccaggaaagcatttgccaaaggcaagtcaataaacacacagcatgttagttggtggtaaggtctggagaagaaaaatcagaggtcatgaggggcagagtgatgtggggtatgtgtgtctgtgcctgcccgcctgttaaagcagtaccagcacagagctgagtaaaccaagggggtgagccatgcacgtgtcttgaagaacatttggacagagggttacctttagtgcaggggccttgggcagcaaggkgttttgcaatttcagacagcaagagcgaggatctggttaggaacctgtattagtttgttctcgcattgcygtaaggaactacctgagactgggtaatttaagaagaaaattggtttaattggctcacagttctgcaggctgtacaggaagcrtggctggggaggcctcaggaaacttatcatggtggaaggcgaaggggaagcagacaagtcttcacatggcagaacaggagagagagggcgaaggaggaagtgctacacacttttaaacaactagatctcatgaggactcactcacaatcatgagaacagcaagggggaaattcactcccagaatccagtcacctctccccaggcccctcctccaacattgaaggttataattcgacatgagatgtgggtggggacacagagccaaaccatatcagaaccaatatgacagaaatggggggattggccaggcacggtggctcamgcctgtaatcccagcactttgggaggccaaggcgggcagatcccttgaggtcaggaacctcgagaccagcctggccaacatagtgaatcccatgtctactaaaaatacaaaataaattagctgggcatggtggcacgtgcctgaaatcccagctccttgggaggctgaggcaggagaatcacttgaacaggaggcgaagattacagtgaastgagattgcaccactgcactccagcctgggcgacagagtgagcctcttatcttttaaaaaaagggaatagaaaaaaatggggggaccatttctgaaggtgcccagtgaggatgcagactgcaggtgtcccctgagctgaggaagggaggactgaacgcctttgaacaggtgtctgcagccccgggggaggggtgcaggatgcacaggtgccaaggccacacccttctgcggcaggttgtccttcccgtctttcctctcccctgatcattctgccagcakgcacgtrtcctcagaggtaggccatcttaaaaagcaaacaaaaacatttcaaaaacctcctgccccccctgcatcctcatctagcttctgcccagctcttgtctgtcactggggtctccatgttaactgacctcgggttccacctctcctgactgcccttgtccaggtcacttttcccttggagacaccaagtctttgttgctgtgccctcctcagagaagctcagcagagtttgacacagctgcccttgtcttccttcaggagcacctggttcctctggcgtctggggtccccccctccccaggcctgctcgctgctcctcctccgctttgctggcttctctgatgacccctcaccttttttgccccgttctcctccagaattagccaggtgatgactcccaaactcttgtttggaatatcatgcacctggaatttcagacttgcaggtatagttaccaggagccacgtgggtggggaaaagccatttcaaactgatacataaaccaggacccacctcctacctacttccttccagctcgctgcttccctgaaacctwcccagtcattcaaggcagaaacccgaggatgatcctagaggcctgttttcccttcccctcttcctgtgtccatccctgcagagttgtccttggttacatgactctgccctgtccacgatgctcaatgcctccctccttcctgctttagctgccagcacgccccacctgcacgagtgcagcagcctcccaaccagtctctctgctgctactcttttcttccaaaatactctctcctcagcagccayagagactgaaacctaatgaagccctgttgccttcctacttagagttcttccatgatttacccatgtttccacccyggtctgaaaagccctagggatctggctctcaccccttcccgctccttgtcccttatcctcatctctcatcctctgggggaccttygcacggctaacaccactacctgggmcacttcctsatattctcatgtccagctccttcgcctccctctgttctcatgtcatgtaagcatcagctgctcagagaagccacaggaatgtgcagcccccgtccctctgctgtcrttgcagtacatggcacagaatgctgagagcttcctatttccttatctgttttctgtatttctcctcccaccgagatgacagcaagaccttttccatcctgttcaccaccgtatctccagcttctagaaagtgcccgacacctattagaggytcagtaaagacttgttgaataattaagtgaatgtttattatttttactacattctcctaaaaatacacatttattaataaataactgaataagagaaaaaatacgaagtgatgtgatattccttcataacacttctccctcaaagatgaatacttattattagggataatcattttctttattgttgttgtttgttttgttttgttttgttttktttttttgagacggagtctctccctgtcgcccagcctggagtgcaatggtgggatctcggctcactgcaacctctgcctcccaggttcaagcgattctcttgcctcagcctcccaggtagctgggattataggcgcctgccaccacaccyggctaatttttgtattttttttttaagtagagayggggtttcaccacgttggccaggctggtctcaaactcctgacctcaggtgatctgcccgcctgagcccccaaagtgctggaattacaggcgtgagccaccatgccccagccaggataatcattttcttgttttaaataattctttttttttttttttttttgaaacggagttttgctcttgttgcccaggctggagtgcaatggtgtgatcttggctcactgcaacctctgccttccggtttcaagcgattctcctgcctcagcctcctgagcatctgggattacaggcgcccgcyaccatgcctggctaatttttgtatttttagtagagacagggttttaccatgttggccaggctggtctcgaactcctgacctcatgatccacccacctcggcctcccaaagtgctgggattacaggcgtgggccaccacgcccagcaaatttttgtatttttagtagaggcagggtttcaccatgttggccaggccagtctcaaactcctgacctcaggtgatccgtctgcctctgcctctcaaagtactgggattataggygtgagccaccgtgcccggcctgagcactttttaaaayataatctaaacctgttatttctktgctgcctaataaatcagagattcagaacccttaaaaagcaaataaaagtaagggcaataagacctgctgaggctgaggcaggagaatagcttgaaccggggaggtggaggttgcagtgagcagagatcatgccactgcactccagcctgggcgacagattgagacataaaatagactgagaccctgcctcaaaaaaaaaaaaaaagagtcctcaaactgttcatatacaggactgggcttgctagggawagaagggggaattcttcagactactttacaaggacacaagaactcctcaacctaaacaaagtatgaaggtacatagacaagtttcttgtaagtcggaaaacagagaaatccacagtaactataatacatcccttaaagrataagcatgcatttgtaggaagcaaacaaagctttccatagagaaaccacttccaccagatgattatatggacttgggttttgtttctgcatctgtcacttggcaaatgaagataccatcttcaggatgttccgtgtcatcgatttcatttaaggcataggctgttttaagattactttaaaagatatggacctttttacaaaataaaacactgcattcacttaaaatatttgcagacgtgaactcttgtaccctgatcctatgttgtcactctgggttttatgtatctaatcattgactaggaatctatctcagcagataatccaaaaatctagtttgactagttkgtagattatgctttcccgctcacatctgaacacacctggttgttagtctggtaggaggtcatcaagggccacatccttacaggttgccaggagaccagtagttcttaatcctgactgcacttgagaagctcctgggaaggtttaagaatattgattgattgatgccgggctccccatcagacccagtgaacgtaatgtctgaggataaggcttgggtatcatgtattgccagactgaggaagacttaagacaagaaaacagtgagagctgttaacattttcccacaggttagccgtgtgtggtgttgatggaaacttcacatgcgagagcacactgtccaatatggcggccactggacatgtggccatttcaatctaaattacctaaacttcaataaaatttggaattcagttcttcagtcattttagccacatttccatttatgcatttatttgtttatattttactgttcatatttaagtgcttagaactctggtaarctaacaattacttgaaattacttgaaatattaatcttatgaaatgtttgaaagggccattatggagaatattcatagcaagatagttyctgccttattttcctgagtgttctgcatgtaaaataaaacccagaactcaagataaatgtgtgtatgcctttgagttagtcatagaattttttaagcaacatgtttaatttgatgtactgtatcttatagctatatccatgtttgagtgtgcaagtgtgtgtgtacctgtgtttggaartctaacaatgacattccaatatttttttctcaccaactccatactgggagttttaaaaccagagccctaatcttgacttaattattaatttcctccgtggccctgaagaattcccttascctctctgggccttaaatttctggataaagaagttggctgcttcgtgctctcaacattatctgattctgtgatttctagctaaagctacatttatacaaaaatataaagtgcttttgcaaagtaaagagtagaatagtggttatcagaggcagtgggggatggagaagttgaccaaataatacaaaattccagttagacaccacctgtgtattcataaacatgtgtccctaggttttatttatttatttttatttattatttttttcatttttgagtcagagtcggtctgtcacccacactggagtgcagtggtgcgatctcagctcactgcaacctccacctcccaggttcaagctrttcttgtgcttcagcctcccgagtagctgagctgggtttacaggagcacaccaccacaccctgctaaattttgtatttttagtagagacgggtttcactgttggccaggccagtcttgaactcctgacctcaggcgatccgcccatcttggcctyccaaagtackgggattacaggcgtgagtcactgtgcccagccaattgtaatgatttttatggttaccttttcttgaatggaatcatttcttaattaaaaaaataaatataccttttataccatcagggtttaatttcattcttttaaaaaaatatagtgcatggcaacataaaataaggtaaataatttatttcatggtcattgaggcaactaacaaaatggtttaacaatattttggaaggaagtgactgtattctcacagttttgtctctcaggttcagcattaaatgtagaataacatttttctagaatccggagggaatttggtcctttgattgagtcagggtgttttgactgtctttgaaatattttatgcattaaatatgcagtattcataaaagctttcctaccccatttgccccaaattgatcttggtttccatgcttctgtttgtyttttgggattttgatttgctttttcacttctctaggggacacctgtgttcgtgcatgcgggcccttttgctaacattgctcacggcaactcttcagtgttggctgataaaattgccctgaaactggttggtgaagaaggatttgtaggtaagttatttcttttaaatttagttgttgtagaatattgaagaaatctaaaagctgatgactggaatggagtgatatccatmctgacatgaaacatattctttcaggcaccctctttcatagagggtctcaataatggaaaagccctaaggtctggtctatactcgtgaaattatgcttgtgcttgaatcatagagtctggtatcaagtacatatgggtttgagtataaactctgactcttgcaaactgagtgacattggacacattttaattactactgagcttcggttttcttgtgtgtaaaatagtgataacaatactgtatcaaaccttttagggttgttatgaaaactgaatgagatattttagtcattcagcaaatgttttttgagaacctaccacttagaaggcatgttagctagggatccagtggtaagcaaaacagataggcgcagtggcacatgcctcgctactcaggaagccgaggcaggaggattgctcgagcccaggagtttgtgtccagcctgggcagcatagaagaccctgcctctgtgaaaaaattaaaattaaaacaaccagcyttagcccctgctcctgtggagcgtactgtctaatggtaattgaataagagaaagtgctcattgactgtcagccattactacccttactatgtagtactgataacttgaagtcgtgggtttatttccatgtacagtttctccttgttttttgtgagctaatataggagagattcccaaccagtagacttagaaatgttaattggtagtactgcacaccttttgctgctgtcaagttctttgcagaacctgttcctctttggcttttcttgcatattccagctagaaagaaggggcaactctcatagagtttactaagtcagtgccagccccagtctcacccacaatactaaggcagcaaggaaacaaaagacaaaaccaaaacacaggcattcatggaggagtcccttaatctgacatatgagggactgcattggcagatttcccatgctaacargtaattcmcattaaccacacgtatacctataatcggagacagcaatctcttctttcactcttatcatcagctttggatcaaactcaaaagagttattttattagaagagagtgtgctggacaaaagaacttggcactgcattttatgctcagacatcacaaagttcattcagtgttattgagactcttttaagaattccttgtggactggcagtcaggatcagatgaggcttggtggagctccactcctccatgatctgttttctgcagctctcatgtactttgctccttcggtagcaaatccactgcaagagtggctagacatrctgtctaagtggatttgctcaattgatcgctgcctaattgtagagctaatggacgaggaggctgggtcagggcgggcactggaaagttgggtgcttaagtgaagtggtggttctgatgcatcagctctgcaaataaagtagcttctagaaggaagcactctattttatgctgacagagatctctgcccrtaccagttcttactttgtcaaacacatatttataaaatacatgttatcatggcagaatactttcaaagatataaactgatgatgtatgcaaagcaaacgagccctctgtgtgaccttgaacaagccattagcctctctgggtgtgtccyctgtagacattctcatctgaaaaatgagaagttggaccagatgaggagttggatgtggatgtgtagccrtggactcagagttagacactgtggaattggagccctgactggtagtgtgttttcatttctctagggctcaattttttatttaataaaaagaatacttctgtattttaatgaataggatcaagtgagaaactgctttgtaaaatatgaactatgttcaggtcagcaattatrctaattctttctatgatctcatctagtctaagatgccgtaagtgggggggtttttcatgaggatgaaatctgtccgttgccagatggttcaaagggcaagccctaagtcagaggttttacctcaactgctttcaagtcacagataaccttgggcacatgaacccttctcttccttggtttccctacctgtaaaatagggctttggatagggcttccctctcgaaaggacttggtaggtttgaaatgaggcatcaatgagatcatggggttgagtcctggcacctgacacatggtaagactcaatccttcttggccactcctggctgtcattgttacccccactattgatacactactgatgaaggttacattttcttttttctttggatctttttattttttggatgattttatttatagttgttataaaatacacgtaacatgaaagttaccatcttcaccatttttgagtgtacgttcattagtgaagtacaccyycattgttgtgcaaccaagctgcagaaccgaagtcccatgcccattaaatattcctcattctccagcccctggcagtgcccttctactttctgtctcaatgaagttgactcctggataccccatgtgagtggaatcatgtagtatttgtccttctgtgactgacttatttcacttagcataatgtcctcaaggttcatccatgttgcagcaggcgtcagaattctcttccttttttttttttttttttttattttttgtgagatggagtttcgctcttgttgcccaggctggagcgcaatrgcacaatctcrgctcacygcaacctccgcctcccaggttcaagcgatcctcctacctcagcctcccgagtagctgggattacaaacatgcaccaccacgcccagctaatttttgtattttttagtagagatggggtttctccatgttggtcagtctggtctcaaactcctgacctcaggtgatccacccatatcagcctcccaaagtgctgggattacaggtgtgagccaccacacccggctagaattctcttcctttttaaggcggaataatattccatcgtatggatagaccatactttgtttatccactcatcctacattggacatttgacttgtttccacctttggctcttatgaataatgctgctatgaacatagatgtacaaatatattttaatgtctaaaaatcgtgctctatgatgtctaaatatgtgatggcaatgacttatattcacaaatacgtaccacggaactctagccctgtaatgttgaactctcccgaaggtggtgtgtccatgctgtggctctgttggaatgctggtggcaaagccagtgtattgcacagtgggaacggggtgtggtcaggagacagtgttcyttgcccattgcttggtcaagcctgcactgtggggctcgttcattccttgcccttggatgaagtttataatagttccctctcattctcagttaatatctagtccctctaacacatatattttttaattcctctggtcactttcaatcataagaatagcccctaaaattaaaaatgcatatccagttgtatatcaaaaccaaaaactccaaatgtcactcagayttgagctcctctcctcccctgtctgggcctcctctggctgacagtgggaaggggaaggtggctgcttgcttctctgccacccttgtcttgcacttrggctcgccctggcccctcctaggttgaagctttggcatgaaatggtgcccatgtagcctctaccagcagacgtcctcacacttttggcagaagcyccctgagcagtacctcatttagactttcctacctctgattccacacctggtctcgggtaccacagacctctgacctctggctggggacaygccctgagccttgccaactggtcttctggtcctcacttgtggcttaagggggaagcggggacgccaaggcgggtgkatcacctgaggtcaggtgttcaaaaccagcctggccaacatggtgaaaccccrtctctactaaaaatacaaaaaaatttagcrgggcttggtggcgcatgatgtaatatcagctactcaggaggctgaggcaggagaatcgcttgaaccccaggaggcagaggttgcagtragctgagatcacaccattgcactccagcctaggcaacagagacagactctgtctcaaaaaataaaaataagggggaagcagcttcgcatgctcttcactgggagctgggaggggagctggatgtggcacactgataactttctttgaagaaattctttcccaggttctaacccgtcaacccttttgaagcctsaatgggctaaggcatacaaaatctatttcaaactgctttgcaaaccctcccaggtcagccagcaccatcctttggcatgtgagcaaaytgacaccaatttgaggcccgaaacaaaagtgagacaaaaagaygttcatttcaacatccttctacagaarttaaatagagtaggcacatctgaggtgtatctgaagtctgagcaggaattcatgttcttcaaaaagttgtcgtttatagtagactatctttatgacctcataatagggaaggatctcttaaaatatgaaaagctcaaaccatagagaaaaatgtcgataatttggcctgcattaagaagtaaactgtatgtgataaaagatacaaggataaaaaacaagtgacagattggaaagaaacgtttgcaaagatagtagacaatgattagcattgagaatatgtaaaacactaaagactaaagactgataagagaaagacaaataatccaatacaaaaatagagaatttgaaaaggtgattcgcagcaaatgagcaatttggtggaatttctaggtagaactgaaaatgaacaaatgatttagcaatttcacttctatgtatactctggaaaagaagtagtcaaaaatatatttaagtcctttgaaataattgacttcagtacccctttaatgagcatttattaagcttctgctatatgtcaagtactatctgctaggagctgggaatcaaatatgaataagacaggtttcttgccctccagtaattgatgatgtgctgtgagagacaagaacttcaatggtaagtacaatgcacttgattaagtactatattagttaaggttcttaactaagaatttyaagggatgatgggcatctcttagatagaactgtctccatattactggttttgctgatttagtctaatttttgttctaacaaaaagcacacacaaggaaggaattattttgtctattctgaataattagtctaagataatagaatcagtagtccatttagacttaaaacagagtgacatttattttaaaaaagcatgaatttgcaaaacactttatgagaatttttcaaaaactgctgtgatcactgttgtggctgtttcttccgttagtcagcagtcctcatgggagttcacctaacttccatttacatgctgtaaaggcaaacagatatttggcatcgaattctaatcatgtattacatttaaaaaataaagcaaaaggaaagaaagaaaggaaaaagcagtattgagttcctggattttaaaaacattattatctcatctttaaactatttgtaggaatttcaaacttacccattaacttaggattttttaatttgttttctgctctctcagttggttttgattccagttttcagataaagatcttgtctttgcagaggagtgcagaatgcaattgtgtgtccttataggcaggtgtcattaactgagggtcaccagccactggtggactcctggatagacttcgatctacaactctgtcccataattaaatataggttcgtgcatatggagacatatatatatacacctttttttttttttttgagatggagtcccactctgtcttccaggctggagtgcagtggcgtgacctcagctcacggtgacctccacctcccaggttcaagcgattctcctacctcagcctcttgagtagcttggattacaggtgcatgccaccacactcggctaatttttgtattttcagtagagacctggtttcaccatgttagccaggctggtctcgaactgacctcaggtgttccacccgcctcggcctcccaaagtgctaggattacaggtgtgagctgccgcacctggccaccttttttttttaacctggagaaaattacacaattcttggattctcacaggggaccatgacataagagagagaaagaactgttggtgcatatctcaaagcctagctctactttcgacggtagctttcgatgtcccatacacatttggcatttattatccttatccagaggtgcttgtcaagaagctacctaattgattgcaactctgctgcttgctctctgtagagaatcacacagacctggctgtgttccccaggtgcttcctgggtacatgagcataaacactcatgcagcagaggagaaatatgagacaagtgcccaattaaaacacagggtgatctttgcctcagacatttcaggattaggatttagaaatcagaatgaatcgacwtagcagttccaagacaaattgaatgggattkggaaacaaagccttgttaatattttcattaaaaacgccccygtttctgagccattcctgagcattagaccggtgctgagactatcatataccttctcactcaatccttaaaaccgtctgtgggatcagtgttactatcctcatcttacagatgatgtaacagaagcttagcaagatgatgatacatgtccacgatcaatcagagagtaagtgacagaggacgtgacctgagggctcctcctcgccaaagcttgtgggtgatcaggcggctattgtgctcagtgtttttctcaatgctcttkacctggttgccaccctctcccattaaaaaataattttagctgggcgcagtggctcactcctgtaatcctagcactttgggaggccgaggtgggtggatcacttgaggtcaggagttcgagactagcctgaccaacatggtgaaaccctgtctctgctraaaatacaaaattagccragygtggttgtgggccctgtaatcccagctacttgggagggtgaggcaggagaatcgcttgaacctgggaggcagaggctgcagtgagctgagattgtgccatcgcactccagcctgggcaacaagagcaaaactctgtctcaaaaaaataagaagaattttgggtgagctgtctacagcagatggtcacagttacaggaagtaccaatataactatattgtaccaatatatcgtaatgtgcgccaacagtggtggtcctttttggtcctttttttcttttctgtgttctactttaacatttcttcctcccaagtaggttactgattgaagatgaccttatcgagtcccactgtttccttgctctacctctcaacctgtatttttgggggacagttttttaatttttttattttccttttttgagacggagtctcactctgtctcctaggcttgagttcagtggcacgatcttggctcactgcaacctccgcctcccgggttcaagcgattctactgccttagcctcccaagtagctgggattacaggcacgcaccaccatgcccggctagttttgtatttttagtagagatggagtttctccatgttagccaggctagtctcaaattcctgacctcaggcgatccactcaccyctgcctcccaaagtgtmgagattatagctgtgcaccrctgcacccagcctaggggacagttttataatcagtcttcttggccttcagaggactctgctggtggctatacccagctagtggcttgttctctctttccacttttattgccctgaaattctaaatattccatcattttggtagaagaaaaccagaccaaactaaacattctcatgatttcatccacctttwaaaaaaaaaaaaaatctgacgtcaagtgatcctgcagctctaagctgtaattctcccagaccttgccctgtttacattatttaaaaacactgatctcagcctgggctccacttttgttattatgatrcttccaggttttttrtctttagtaaatttattcataattaaatcaaggttgagaagtgctggcttattagagactctggctgaaggtcatgtgcgaactcaggaaactgctaatcacrggtcgtgtttttcagcccctgtcttcaggaaggcttaactctaagggagggttgttttgtgtcatctccagagctctcatttctcctgtgtggcttggtgccgaagctcattcgtcccctcgctgtctgttcggcccttgtcctacctcccctttctctttccacgcttttgtgtaaagtagccctctttcaagctgctcctctgtcctttgaaaacaaatgaaaaagcaaaatgttcttcatatacactaaacaggaaagtatgcaaagtaatgttacaaacacccatgttcccaccactctgtttcatcaaaatcttaacatgtcgctgtgtgtcctttagwttttttgtttttttaaagagatacgtttagctgggcatggtggcgcatgcctatagtcctagctacttgggagtctgaggcaggaggatcaattatgcccagcagtttaattctcctgggcaacagagtgagaccctgtctctaaaaaaaaaaaaaaaagaaagaaagaaaagaaaagagagaagagaagaaatcagatattagagacacagttgaagttcccgtggaccctcctgatcccgttcttytttctgcttctctcctgatttgagtgattatcgtttccgggtgtgtgtttctactttgaccacacacatatatgtacactagagatctgtagcggaggttctcagactttctctgctcgtgaccattaatggcccagcaatttttttcatggtaccgcccgggcaagagaaatacctaacatgtccatttattaaataggtccaaacaacttaatgagtatttatgtccttacaactaagtggccacctgaaaaaaaaatacatatgaattcgaaggaaaaaataacatcatttcatttttaaattaccaccataygttatgaatgagatgtgtgtccttgtcaggcaccagacaacttctgaccctttgtaaccagttgacacccgcacctcatttcctgttccacgttgattttcacacgatttttgcattttgctgcggtacctgccaaaaactttgctttgcaaatatatgatgtcatggaaagggatgtagagcactattgttgaagcagtgaaaaacctcacatgagtagtatttgcagtgtccaacggatgtcctgtattaccgcgtttccgtcaaaaatttaaaataccccacggtgcctctgagyttgctgcaatgcctcacggcacctcattgcayattagaatcacagatgtgcggcttttcttggtattttttatgtgttttcaaattttatatattaatagatattaactgactgcattgttctctaatgaggtcactgcactttttctgtaaatggcaagatcataaatagtttgggtcacagagtctctgtcccaagtactcaatttagaaagcagccataggtaaagcatgaattcataaactagtccatgtttaggaatgagtctggctgtgttccaacagatgttattattggttcctaacatttgaatttcatataattttcacgtgtaataatactcttctgatattgttggcaacattttaaaaggtggccaggcacagtggctcatgcctgtaattccactgcttttggaggccaaggtgggaggattgcttgagcccaggggttcaagaccagactgggcaacatagcaagatcccatctctataaaaaaaatttttaattagccaggtttggtggcacatgcctgtagttccagctactcgggaggctgaggtgggaagatcacttgagtccaaaagtttaaggctgcagcaagctatgatcacacctagctacttggtaagctactatggacaacatggtgaaaccctgtcttgaaagaaagagagagagagagggagagggggagagagagagataatactttttaaaagagaaagaaagaaaagaaagaaagagaacactttttaaaaggataaataatttttaaaaacttaataatttaacatgtaaaaaaaaaaagatgtagaccatatacaaaacccagaggcacctggatttgtcctgctagccatactggccaacccctgctctataacttgatatttttgtgcaacataacagttttgcatttctctaygtcrctgtgatccaaaaagcctcattttgcctgcagtttagccttctgtgcgtgcatgtagcacgtgcatttgtgcattatttgtcaaggggctttcagattgcttccagtgttctgctgttacaaataatgctacgggggacattcttgtccatgtctctgagatttagtctaaaaggtcttctagggactatatacaggagtgagatttggggggttaaaagtacgcttagcaacaacttaatagataaagccaaattgttctgcaacgtaataccaatttatatcactaccaattgtgtgtgtgagatttctgacctctccacgtttgtcctgacacttcttttttttttttttcttgagacagagtctctctctgttgcccaggctggcgtgcagtggcatgatctcagctcattgcaacctccacctcccaggttcaagcaattctcctgcctcagcctcccaagtagctgggcttacaggtgcacaccatcacacgtggctaagttttgtatttttagtagagatggggtttcgccaagttgaccaggttggtttcaaactcctgacctcaggtgatccacccaccttggcctcccaaagtactgggattacaggcatgagccactatgaccggctgaacgcttctattgttagatttttttagctcttgctaatctgatggtagttcattatagttgtgagatttagcatctttatggctgtttctgggcatttgtgaattgtctattttgtattgtgctatttacctttttcttactaattaatggaaatcctttatagattccgaatacgaatactttgccattatgagttacaaatatcttctcccctgtatggcttatcttttaaatatgcttgttgtaccttttcttgtccaccctttttctttatgatttctgcttttggaggttataaagataatcatttgtattgccttataactgttgtctcttgcattgaggcctttaatcatcttagaatttgtttgtgtaatggtgtcttttttccttaactcttacagtttgtgagacttttctgccctggtgatatgtgcatcagtggttgttagcccagccctatgaaaagggccagctggcctccatagatctaaggcagccgagagtgctgtcccctttgtcccaggctctgcagcatccaaggcgagtgcagatggggccagctgttcttccaaaaccatcatctcttctttacctgctccttctgagcttcacctgacatggctgtgcagtccccaggaaaaagaaagtctctcttgtcttcctacttcctaagtcaatcctaggaactgttacgttcaattccaagcagttgtcataaaagaagtttccttggaactttgaaaacaaaagaaagggtttaattttcttcttttcgttttgttttgttttgtttttaattttttgagacagagtctcgttctatcccccaggctaacagctcactgcaacctctacctcctgggctcgagcgatcctcccacctctgcctcctgagtagctgagactgcaggcacaatccactacacccagccaattgttcaatttttttctggagatgaggtctcactacgttgcccaggctggtcttaaactcctgagctcmagtgatcgcctgcctcagcctcccaaaatgctgggattacaggcatgaaccactgcgcccatccaaaaggatttaattttatggtcaaattctacattgtctattgactttaatatttttataaaattctttaaataaaatgtctttacctggaataccttcartgtacttactggattagaggcaggtaggtcctgtttgtatggctagtatgttcattaaatatgaaagtaatggaaagatgtttatgacataaggagagaggaaccttcgcctgtcaggataatagaaattgaaagatttttatgacctggctcagcagaaaaaggagtatatgatgttagcaattttttagaattgatttttcagaagaaacatgcaaaacaaatgagaattaagtagctagaaagcctttttcccccctttattcagataaagtaactgaagacttttaatgagaagcctggtttctgtctttctacacggtgcactgggaatagtaagctgttagaagtcagtgcttagaagtacctaccatcctaaacacaggaaccaaaaacaaggggaaaaaaaaaaaaaaggaagataaataaagtaaaagtaaaaaagtacctaccgtcccaaattttgtatatgatgatgttcacgtttttgaacttacacatattcttctgtataagtaaaatatttcataaaattaaaaatgttttataaaattaggaacagaatttcttaaagatcaacatggtactaatacatcttacaatctgtctttcaaagtttcaatagacttaacttagagtcattttttaaattgcattttgatgccaatataattcatgtgtcattttccgctataatacaatgaaaatccagataatggagatggattttcttctgagtagccacgcatattaggtttcaggctccaattgcctggttttgaattgctctttgccatgtgctgtctgtgaccttgggtgggtcacttcacctcccccaaatctaggtttctccaatacctacctccaggcttgttctaggcatgaagtgcagtgatgatggagaaggcatggactgtggcacaaatagaagagtcaggggttggcagctcctattcccactgtacgatgccaaggatctttacctataggataagccttcagaaacataatttgktctttcaagtgctgaatacctctgtgagtatacttttttccatcttttttcttttggtaaatgaaactcactgagaaatttgacttctgataatgggaaacagtgctgcttatgtgttctccttgtacaaaggtgtctgggaccattatacttagaggtgatctgagaaatcggaggggctctgattgttttgaaaactctcctttgaggtcgggcacagtggctcatgcctgtaatcccagcactttgggaggccgaggcgggtggatcacttgagaccagcttggccaacatgatgaaacctgtctctactaaaaatacaaaaattagccgggcttggtagcatgcatttgtaatcccagctacttggggggctgaggaaagagaattgcttgaacctggaaggtggaggttgcggtgagccaagatcacaccattgcactccagcctgggtgacagagtgagactctgtctcaaaaaaaaaaaaaaaaaaaaaagaaagaaagaaaaagaaaactctcctttgaattaaggtaatccttcttgaaaggcttgtttaaaatgtttccttgttacctgggagagagcaggaagcgctgggaaatagcacgtcactggtgcctcgtgccatttccgtgcctttccctgtcttgcctcagccttgcactgtggaatgcaaaagagtagaagaaactccaacgtgaaaattgtcgacaaacaatgcagagaatcttcggtggcattaaacattaaaattaaagacacatggtcttaaattcagctgatatacttgacacctcagatatactcttggtgccaaaagggatgttaagcaaaatttgagggatttgactccttatttgggaaagaccatgactaccaaggggagagaaaccagaggcaaaccttattgaaaaatggagtagctaagtcattttgtatatgttacttttacccagccaagtacagtctgtagttttacacagtgaatttgatctttactctaaattcttttcctttaatgaaagtgctagtcagtaatgcagaacttgggcaagttttataaatatgtttgctttacaaccagtcttattaagtcagggtatcatctaagggcccaatcaaggacttttcatttaaaaaagaaaaactctaaattgcattgtgatataacccttaaattccaactgtcatggggaatcccaagacctacatctgtatgtatgtgctgtgttctaaacactgctccccaacctttttggcaccagggaccggtgtcttggaagacaacatttccgtggttttgggattaaacggttccacctcagatcataaggcgtgggtcctagatcccttacatgcgcagttcacagtagcattcacactcctatgagaatctaatgccactgctgatctgacaggaggtggagctcaggcagtaatgctcacttgcccgctgctcacctcctgcwgtgcgacccagttccttacaggggctgcagaccagggggttaggggtctctgtttttgtttttttggagatcaagtctcactctgtcgcccaggctgaagtgcagtggcacaatatcggctcaccacactcttcacctcccaggttcaagtgattctcctgtttcagcctcccaagtagctggractacaggcatstaccatgcccagttaatttttgtcattttagtagagactgagtttcaccatgttggccaggctggtctcgaactcctgacctcaagtgatctgcccccctcagcctctcaaagtgctgggattacagacgtgagccaccgcgcctggctggggacctctgttctaatatgcttaccatgccaaatgcattatgaagaaaaacagaaacaaggcttttaatgttaaagtcttattttctcgctactgaaataggcaaaatgtttcaattttgcaaaaataatatagtattgtgtataggatcttccctaacctgctttttacatttaattaggcttctacgagtcattcgggtagttgcatctagcaggctatttatccattctttatagaccctttagaggtttgaracccctttatagaggtttgagagccctttcttgccccagttctcttgtctgtaaagctgtaggaaataatatgacctaacatacaaggcagtgtgaggacagcagaagtgacttctgtaatgcatatggtgctgttccaggcatggataaatctttgctaacagtcgtaagagtttacctcctgtgaggacctggctacgtgctgagcaccctgcttggtgctttgtacattgtgactcattcagttgctcaaacaacaccatgagtagtttaccagaattacccccatcttgcaggtgagaaaactgagcatccgagygagttagtagtttgctcaaaggcaggcagctagcgcaagggggagcaggaatttgaacctgagtgtcggccccacagcctttgcttttaccaccgtgctttgccacctctgaatgttcactttcattccatagcagcatcrtacagccctgtgcataacaggaagtgyacgtttgttaaatgagaaactagtaacacttctggtagctgaatgacttaactactggtaaacctgtctgcatggccactaggctttttatggtgaacacaggcatattttccatgtgctgtgttgaagcagcaattaaataaatcaggtaaaagagtaattaaatttaaaaggtaaaacgttttggaaggagttttgaggtttagggctgtctaacctgaccttgactgtttctctatgtgctgtaagatgcagattgattttcaatgagatattcagcccatccctgcttatgatttatatatattctaagtaatatgcttagaatgtagttctgcttaccatcataaaatgtggagttaaaataagatccttgtcaaaacattgtcatgcagagattagtgctatgaaagttaacattaaatgattttaaaatgtgatccagaggttaaactgaagttttgaaattcataaaatgcataagctttttgagaatttttaaaaatatccgttacataataactttaaaattacgttatatgattgctatcttaccccatcttagccaagagcattcagcctgaggatactcaaaaagagtcaaattaccccttccttgtataagctatagtttaggatattgcaattatatgaggtcgttttaaagtttttagcaacgtttggtataattacaatattgtgctgttcttacacaaagaaaacataacagaattttgagctaggaatattgggaaaccagccattgctaaaggaagatgcatttagtgtatctttctatgtacctcttaacatcttttgtggggtgtagaaaaacagattattagggctttctttttttgggkgggggcgggagcggggatggagtttcactcttgttgcccaggctggagtgcaatgaygtaatctcggctcaccacaacctcctcctcccaggtttaagtgattcttctgcctcagcctcccaagtagctgggattacaggcatgtgccaccacacccggctaattttgtatttttagtagaggtggggtttctccatgttggtcaggctggtctcgaactcctgacctcaggtgatctgcccaccttggcctcccaaagcgctgggattacaggcatgtgccaccatacccrgctaattttgtatttttagtagagatggggtttctccatgttggtcaggctggtgtcgaactcctgacctcaggtgatctgcccacctcagcttcccaaagtgctgggattacaggcgtgagccaccacgcctggcctattagggatctctaaaagccgcaagcctcttgctagccatagctgtgaatgttgtcttaaccattaatgcttcagtataaataatatcaatttaaaarctgcctaagatttaaaagtactatgcaaattacaaactgcttgggtatctagatcaaaataaagcagagcaaagaagtaactttaggaatgaaagggtatctaagtggaatgataaaggaagacttcatgcaacagaagaatttaagtaaaactgaaaaactgaaactaatgtgatcatggcattaaatagtgtaaccctgaagacgcatccagtatataaggaacaccacagcagtgcctatactcaccgttattattcatcattattctgaagcayraataagaacaatttcaaaaattataaatattggaaaggaagagacacattttattatttatgtacagaataattatataactagaaaattcaagagaggcaactgacaacttattttaagtaataaaagttttagtttgctagtggatgcaatrtaaatatgtaaatgtcaatagttttctttttttgttagccataaatacatactgtaatagagaaaatgtcctacttatacatgtcccccaaaggatagaatacttaggaaataagtttagcaagaaatgagcacatagaataaaactataaaacttyattgaaagacaaacaacaagacctgaataaatggtaagacacatgacatactcttagatgggaataactggtattaatcatccttcctctgtcaaactaacacctaaattactataaaattactatactatatcatgccacactatactatactgtatttactgtaaaaactgcagaggaaaatgaacttsgtggttaaattaatcacagcatttgtctagattctgcaagaatgaattcatgaggatggatttaaaagctttttcaaggccgggcgcagtggctcacgcctgtaatctcagcactttgggaggccaaggtgggcagatcacttgaggtcaggagttcgagaccagcttggccaacatggtgaaaccctgtctctactaaaaatacaaaaattagccaggtgaggtggtgcgtgcctgtagtcccagctacttgggaggctgaggcaggagaatcgcttgaaccagggaggcagaggttgcagtgagcctagattgtaccactgcactccagcccggcgacrgagtgagattctgtctcaaaaaaaaaaaaggctttttcaagaaccatgatggatgattaaactaattgtaartatcagaacaagataaccctatagcaaaacagttaatagcagaggaataccctggagtgtcctgagatagatttcttccagtagtaatttgataagatgacattttatttttatttttatttttttcttttcttttatttttttgagacagagtttcactcttcttgcccaggctggagtgcaatggcgtgatcttagctcactgcaacctccacctcccaggttcaagtgattctcctgcctcagcctcccgagtagccgggattacaggcatgcgccaccatgcccagctatttttttgtattttttagtagagacagggcttcaccargttggccagcctggtcttgaactcccaacctcaggtgatccatctgccttggccttccaamgtgctgggattacaggcatgagccactgcacctggccagatgacattttaaattagtggtgaatggatgggatactgattaaatgatgttggaacatttgactaataattttaaaacataaaccatagagtttgttgttgttgttgtttgaaatgtagtctcgctctgtcacccaggctggagcgcagtggtgcgatctcagctcactgcaacctccgcctcctgcgttcaagtgattttcctgcctcagcctccctgagtagctgggattacaggcacatgccaccatgcctggctaawttttgtatttttagtagagacggagtttygccatgttgtccaggctgstcttgaaytcgtgacctcaggtgatccatctgcctctgcttcccaaagtgctgggattacaggcatgagctgccatgccctgccaaaatataaaccatagagctttgtatcacaatatattcaaaataaagatagagtgactttttactttttagtgtgcaaattaaacataaagcttccaggaaaaagcaaaaaaaaaaaattattgttggtatcctatcaaggctagtaaaaagaatagataaatgtatacatggaacatgggaaaacattcacaaaatataaagttaaaaaaatcaggttgtaaaataatatatctccaatttgtatgagatttatatctatatatggaatgaagagatatagaagtatatcaaatgattatttttgtttgcctggaggtaatggaatcatggtgattttcacttcacactttgtgwtttggcattctcaaatttttacaattactgtgtattactttkgtagtagttttttttataaaaggaaaaaatgacttgaaaaatcaagtaatttgacatgtagacacagggaaattacattcgaggcagagagcaaacracaggcatgtgactgtagctgacaagtgtcrgcagattgtgggcatagtttagagtctaagacatctgggggagatgagtttcatcattagatgaagtcatattctggaggggaataaatgctaatctgaaatactatgctttcaattgccagtgaggagaaattgacagttttgaaatagtggtttcaggaaggctctcctgagaagatggcactgaggcgagccttgaagaaggygagaggggagaaagattggcctgtgttcaaggaatcaaaatagttcgctagttcagagacagggtaaagcaaatagactggagtctcattcaatgtctttaaaagtcatggagaagagttagtatagtttctaatccatgaggacttcctgaatgattttgccaggactgtactttaagatactgtttctttccaaccccccatcagataagtcataccacttttctgaagtcgaataagtgaagggaaagagtggacaaattgttatctaacagggctccctccccaggaaaggactccttcgtcagtaagagatgtgcacgtggtataaccaacaatgctacttctgggtatgtccacactgctggagctcagaaatgcacaatgaaaaaacaaaacgggttgtggaagtgtgtatacaatctgttacatttttgaaaaacacayaacacaatgctatattctgtttatgcatgtgtgcttatgtagaaaaagtctgaaaacctgatctgcataagctctgagttcataggagttatgaccatgggaagaagtagaggggtgggatgagcgcatgggatactgaactcagctatgctgctttacttctctgaaagaggaacaatcttaagtaatcatggtaaaatgttaatgtttgtccatttcagggtggggaaggaaatttaggtctgtaatttaggagagaggttgaggccagagccaagattggcagttgtgatgagtatgtggttacatcttcactttttttagaactaaatctggatgtcaatggccatgtttagtgggccaggggccttacattactttcttgcagcactgatggcttttgtttgaggctgcacaaattcctgcatttcccttgggttgaatggtagggatgcgggcagttggtgactgggtgaaccacctgacttgagcagggctacgactctctctgcaaacgaaacccagagacatgaacagtgctgagatttctcagtggtttcccatgtaggctgctttccaagggcagcaagcatggcttcatcactcacccagtgcttctgattcagcactgtgatgctcggttaagttttaatgaggttttaaattttttcgtatgtttgagtgtttatgcaaacaaagatgctgaattgtaaacaccagcaatctgagtaccttcttttgatttctctctccatattgtttagtccctttttctttgtttgttttatgaaattgcatagatgttttggttgagagtagattgtttttacttttcagggacaggcaacaatttcatgatataacttctaaaaatattttaaacmagtatgaaaatagttttttcttccaaaaaaccatttcttcrtttggcacatacacaaacaaatgagcagaatttagagtaatttagagacagaatttagataatttgggtggktttttttttggacagtcttgccctgttgtccaggctggagtgcagtgatgtgatctcggcgcaccacagcctcctcctcccaggctcaagcgrttcttgtgccttagcctctcaagctacaggcacacaccaccacgtccagctaatttttgtatttttattagagacgagtttttgccatgttgcccaggctggtcttgaactcctggccttaagtgatcctcctgcctcggcctccttaagggctgggattacaggcatgagccaccacagccggcctagtgtgaaagcagtttttaaggacagttgaacaggaaagctcctggattcctgcacatagatcttgtgcccctccaaagtgccgtaagtaccratttctgctgtcttgatttaactcagtgtctggagcttacgatccttcctctctgtttccttcagtggcgtagcttgggggtgtcaattaaagagttattgcaagatctcagcctctgaaagtttagcttattcatcagcaaaactttaagcaagtctcacctcttctaaattagaattgtaaccttgactttagtctcagagttaacattgtgcagaaaaagaaaacactgcgcagtgttgaagcagtttgcaaactgaaatgatacaaatgaaaaatgctatgatgtttctcagtagtctctgtatttgcaaatgagtcagttaggattagttttacccacaaataacaacaacagtaaaaaaaaaaaaaaaagaaagaaagaaagwaagtgacccarcactataatacaagtttatttctctctcacatcaaggaagttcagggtagccagtctgggctggtttagcaactccttgatcatcatgggttctgtgctacctggtagtccaggatggttgcacaagctccagccattgcatctgtatcccaatcagcaagaaaaaggaagaaaggcatacccccttttcaggaggcttcctggaaatcacatacaacatacctggttacatctcatcagtgaccttagtcacacagccatacttagctgcaagacaagcgaagacattcagattctacctcttcttcttgaaatagaaaggtgagttgccaatccactstcagcgtgacgacagttcaagaggttttcctagacacagagttgagttaatcccgtcatctgtgtcatcgtctctattttgacagcatctgtcaggtggtcaaccagagtttaggcaagaagacctatgacttctctacacagacatgattaggattatcttctaaatcaaccaaactgaccagcccaccctttcattcttctgtgcatcacagatcatttttgaaaaagagtttaggacacatccaatagtaagagtgtagttttataaatcaggactcagtcttacagtggaagattatatggtagttagtgtcatggagaaaagcttcatattagattagttgaatcgattgggatacagaaccgtctttagagcatggcatcgttacattgcagataaagcatgtaggtagagaatgatatctttgttggggagagccccaaactgctcttcaggaacctttctccgagatttgcaagccaattaggcataatgaaaccttgtttttaatgcatatcttttgccagtataataaacataataattaaatgtttatatatctttcgtattttcctgtataatacaactaatcatatttttgtcaggctgaggacatctcaagaggagggaaaggtggcaaattgagggtctgttcttcttttataccagatggcaattataacaaattacttctggacttagggatgggggaggggtggggagatgggaacatgagaattattcctgatttttgttactttttgtcctgtaaaatatgcttaccaggccgggcacggtggctcacgcctgtatcccagcactttgggaggccgaggcaggcagatcrcctgaggtcgggagttcgagaccagcctgaccaacatggagaaacactgtctctactaaaaatacaaaattagccaggcgtggtggcacatgcctgtaatcccagctactaggaagggtgaggcaggagaatcacttgaacctgggaggcggaggtggcggtgagctgagatcaygccattgcattccagcctgggcaacaagagcgaaactccgtctcaaaaaaaaaaaaaaaaatgcttaccgggacatctcaaggacatcattcctttgtcaacggtacaaagataacctgagacataaagtgaaaatgatttatggttttttgttttcttccttacattaaattttccaataacatatcgctaataacatatttcttttgttttgagacggagttttgctcttgttgcccaggctggagtgcagtggtgcaatctcgactcaccgcaacctccgcctcccaggttcaagtgatttctcctgcctcagcctcccaagtagctgggattacctgccaccacatcaggctaattttttgtatttttagtagagacgggrtttcaccatgttggccaggctggttttgaactcctgactttgtgatccacctgccttggcctcccaaagtgctgggattacaggcgtgagccacggtgcctggccaacatatttctaataatatattaatttgataaacagaagttattttggaaataagccaaaacaacaaaaaatgctcatccctgcttttcaaggctrttatctgtagtttgaggttttatcaaatgtagatatgaactgcgggcctcttcaggatgtcctcattgcttctgttaatgcttttaccatccagtaccactgaacaggcagcagggtgccttcttgggcacaccggaaggacccaggaaaaggaagatagtgtggcctgttcttgtctccatgccccaaaatggaccactacaccagtggggtaggaaatagcaggtgtgttatgggttgagtttggagaccttgacttgatcaaccatctgctcacccaggtcatctttcytttttttgcagaggtgaggtctcactatcttgcccaggctggtctcctgggctcaagtgatcttaccgcctttacctcccaaagtgctggtattacaggtgtgagccaccatgcctggttcttgtcaccattcttaacatcagcagcagcagaaaaaccccctgtttagccttcaatgttaatttcctccttgatctatgtgttctacacaaaccactcccttgttgtcccccatatattacatttgtggactcttctcaaactctgcagctcagccctggttcctgctgagcctacagccccaggcctgagcagccggctgggccaagttaccctcagtctcaagatgacttcctcacaaggcaaaacatttctccagctgggttggagacctaagctggggaactgggctctcacattccaagatagaggtttgcctatggacccctgaaagtaggcgtgtagaagcaggttcctctgatggcagaggccctctgtttatctctgaaagatcctgaatgctatgcttctttcatcccctctgccttgaattcgcctgctttctaggtgcggtggagaaagctgggaaaagagycacctctgctcccaggggccactgagagggtagaacactgacygaatcccagactcactacctcaggggctgagatgggtccaaaggggcccttaacctctcacttgatcacctgactcttaccgctgtcattgatctgacatgttctcctgggcgctgtcccagctctgtcccagcttctcagcactgtgtcctggtcagccctgagggctcatttcctttatccatactgaggaccaagacctgtctttcctgtagggcagtgagggccacgggctagtgcctgagccgatgagtgcactgctggtactgtgctgagccctggacaagggtgtaggttgctctaaaaaacaacttcccaatattctacaaaataacgttcaaactgaacagagcttgactgaagattcttcttacttcatttgttttcatgctacatttttgctgtccggctccaagtctgtgacaatgggtcacgggatcagtgcgagtaacagtgaagatgtttttcttcatctttgggctatgattgtgctttgtgatcctaagtataaatacattgaggctgggcacggtgtctcacacctgtaatcccagcactttgggaggccaaggcaggtggatgcctcgagcccaggagttcgagaccagcctgggcaacatgtcaaaaccccatctctacaaaaaaaatacaaaaattagccaggtgtggtggtgtgcacctgtggtcccagctgctcaggaggctgaggtgggaggatcacctgagccctggagatcaaggctgaagtgagttatgatcgtaccactgcactccagcctgtctcaaaaaacaaracaaaaaaaatacatacactgactaataacaccagcaatattgtttcatgggagctgcctctgctgtttgtaccaaaactgagcagattctttaggccaggcccgagtaatcattaaatcgatctgcttgtgagaaaccggtaggtctaggcatgagcacaaagtggcaggtccgtctcttcccttcttaaataaggaatcaccagaggtagactctgtgcctgtgactcttgaatgtttaactgaaatccagagcagcaattgcattttatatgacaccatgtgtgtgcaaaaactgaatcaaaatcttgtgaaacagtgctactttcacttactatatatgatgtagtctaatamttttctatcctattttatttcctttttttaaatgctggttgaaattctgtaaatttatataatgacaaactactgggactctatcttggttcaaaagtccatgatcagcctgcttgtattgagttactacattgtacgatcttataattgtaaagtttaagatattttccttctgtctgtcttaatttattctgtaatctaagttgtcctgccaggaatgctggcatatttactttgtttttgaattcaataatcatagtttctcttgctaagttacattaatggtaccaaaaaaaagttactgcatggtttttgaaactgttctttcctaggaagttttaaagtaaaatgtttttaccttttattgtttacacaggttaagcatccctaattcaaaaatccaaaatccaaagaagtgctcaaaaatccaaagttttttgagtgacaacatgatgccaccagtggaaaattccacacctgatctcgtgtgrcgggttgcagtcagcatgcagttaaatctttcatatatgcacaaaattattaaaactattgtycagggccaggcacagtggctcacacctgtaatcccagcattttgggaggccagggcaggcagatcacttgagctcaggagttcgagaccagcctaggcaaggtgatgaaaccctgtctcctctaaaaatmcaaaaaaaaaaaaaaaacattagctgggcacggtggcacacacctgtagtcccagctatttgggaggctgaggtgggagaatcacttgaactgggtggcagaggttgcagtgagccaagatcatgtcactgcactccagcctgggcaaacagagggagaccctgtcttaaaaaaatatatatacatatatatatatagtttaggctatgtctataaggagtatatgaaatataaatgaatttcatgtttagacaggggtcccaaccccaagatatctcgttatgtatatgcaaatattacaaaatctgaaaaaatttaaaagccaaaaatcacttcagtctggtgccaaccatttttgcataattgcattttccatgttgcattttgcaaccattttgcataattctgtacttctttcccttttgggtttgttttcataactgctcagtaaaaagtgttctgtgtcatctttccattattttgggctaaatcatgttaatggccaagcctgtcagaattcatttgttttgagttaacttcctggtgtccagttctcaggagttgcaagaatagagctcttccctcatgcaatcatccaaaatcccaggcctctaaccaggattggggaacaccactgttggccaagagcagaaggcttaaagctctggtcatagtcatggcactgtacaaactgttcttgttccctacaagaacatgggaactatttggataatggatttatgaatttaattctgatggatttttataaaggagctaaaaataagcctatataatttattacatgtataatcatataattttaaatgtgtataatttataatattcatcgaaacatttctttttggaaattaaatttcactttggtcaaaatcatcttacaaaacaagatgactcatgatggttctaaataatgtaaaccggtgtctgtaactaattaatgctctggaggaaggaaattctgagttctgacacaaaagcacgtctaagtggtattggtattttcaaagcttttactacaaccaaaaatatgttcacgtgtacctgtctcctctttacactgcttactttctctatcrcttttcccaaatacgtccccagtaacttcctcatgttctgtgcaccacctccaatcttcccctaatgtgtatgaacttggtcatcaccaaagaggtggaaaggaagaagggcatgtgctaatattaatattgaggtttgggctgggtgtggtggctcatgcctgtaatcccagaattttgggaagccgaggcaggtggatcacgaggtcaagacattgagaccatcytggccacatggtgaaaccccgtctctactaaaaatacaaaaattagctgagtgtgatggtgcacaactgtagtcccagctactcgggaggctgaggcaggagaattgcttgaaccagggaggtggaggttgcagtgagccgagatcgtgccactgcactccagcctggcaacagggagagactctgtctcaaaaaaaaaaaaaaaaagaaaaaaattgaggtttgtgccagtttctttttcctttaggtctcctgatatgtgtctagttagttctatatacttcctggaaattcgactccaagatatttaataaaactaaacagggttatatgttgaatagacaaatcctaaagagcagaaaggatttagtggttagtgaaatttcattgacttaagatgagttggatcctcaaaattaatatattctaaacaaagttctatttttaagctgcagtaataatgccgaatttctyttatagttaattgaatgatttatcctggtgttgtctcctggtagtcactgaaaaagtcattacaatcctcactttctcccctttaattcaagttcagaattcatgtgttgctgtgacttyttttgagtttatctgcagacagctgccattgaataaacatgtttatatagggcagaaaaaggcagcctgaagattctactttctatttcttttagcactgtttggcagttaacaccaacagcgcttcagaatgaggtactgtccagcatacaccttgcttgttcctctacaaagcttctatttttgtttttgatttgttgtgaggaagcaaagtgtagcctttacttgaatgaaagctacagttttatttttctttcttatttacaagaaattcttttgatgattaagttagccagataygccccgtgcgctcatatttcttaacctattttgagctgagctagttgcaaggactagttcttctgtgaaacctctggcagtccataaattcaagttcgtgtccagacgtaatggtgaactcaatatgttgtatatttgatatatgtttgttgcacacatggagagaaaagttgctaccattgtgaagtagccatgaaatccgacagttctaatttctttatcttctgagtacccatggaataaaggacctcttagtgccatagcaaggcagaagtttaatttgcaattctggtggcaacatccaggtatttcaagtagaaattaagaaaactttacggaaaaactatctcagcacttcagtttaactatttttcaaagtccaaggagggttttccccagtgtaaaagcagaaatgagaatttcagatctaaagcggttcttgccttttcttttccctccatgcacatgtgctgacaacagaaagtaaaatttgaaaagaaaacccaggctagagcattggggtcactcatttcccatccagcgaagggagagctggtgcctggctgggggaggttaggaaggcaagtcttgggatctgatcactcggctgggagtgggtaaaatacctggacctcaggaggccggattgcagcgccagtgttctctacctgtgtggcctgttcctgcctgrggttgggtaccaagtccaggtggaagtggtccctggagcatcctctctctgaagtgtttctttgtcaaacagaatactccctgctgctgccccagaactcatcactgttgacacatggaccaagaactagcagaggaggtgatttataatctctaaatgaattgctctaaaagagacaacaagcactctgacttaagtaaaggaagggagggtgggtggaaaggaaggaggatcataaagaacattctagattgcatactttggtaatcacagcagggccttattgcagttagaacaaaagcctggacacacttacctctcagttcaggaaaataatttagagctacttgttaaatgctggagtattattgaagtaccaagtgttaagattttcactgaaagcaaaactgaccaagcagctcagctagggaaatgctatgtgatcagttgattgtttgatgaggagtatggagcagggactttggcagaggttgctagcagacaggccttggttttagtccaagctctatcgcttaatagctgtgtgaccttggggaaaattataaaattttccagtccttagtatcataaactgtaaatggaggagaaagatgcctcacagatgttgaaggtgaagtgagacaggacacctagtacattgcctggctacatagaaaatgtttcacaaatgttaacttgaggccctctccccatgcctcggtctcttagaatggtttttccccatcgtgtgcacattgagcggtaaggcggacagctgccgccgcccatgctgccccrtgttgagagcatttctgttgaccttcccttcttccctgtgaagctggttcagcagtcacctcatcactgtttttcttctccagagagtgctgggttgtagcgaccatactgttgacgcaacacatcccaaccacrctggacggaatttttactgcgataattcatattccaggatcttacagtgcacagggttacaacgattagcataatgatcttgcacaatctttctgcctagcatgtagtgcattcgtaatattctcagaggaggcgtctagaaagcgccaggctccttcctcctgcgtgagccactgcaagctgtcggcgcctcagtgctatggagaccttgggtggattattccttgttggcggggggagggtcccagctgtcctgtgcattataggatatttagcagcatccttgctagatgccatttacaacaatcaaaaatgtctccaggcattgctaagtgtccaggtggggagcggaataggcagaaccgcctccagtcgagaagggctgaactgtacttaggatttgtgattctgcagaaatgggttctgtgaatgcactaaagcatgagaacatccaaaaatcagtgtggcacagaactgaattcaaatttacctggatccaggtaaataagcacaattttgaaagtaccaaacagaattcaagaaaaacaacaacaacaacaaaaaacacattaaaaacagaaaagttggccgggcgccgtggctcacgcctgtaatcccaacactttgggaggccgaggtgggcggatcacctgaggtcagaagttcgagaccagcccgaccaacatggtgaaaccctgactctacaaaaaatacaaaaattagccgagcgtggtggtgggtgcctgtagtcccacctactcgggaggctgaggcaggagaatcgctcgaacctggagggcggaggttgcagtaagccgagatcgcaccattgcattccagcctgggcaaaaagagtgaaactccatatccaaaaaaaaaggggggaaaggtcagaaagacgttctttttcactaggtgatgaattaatctttcccatctttgtcatgttaaaaatgtgcctgtggctgtttctccactaaatgaagacactggcacacagatgattgtgtgtaaacactaggcaagacactaggcacaatcgtaggggttcagtaattattgaatgagaagaaagaaaggttgttcttgaattctgtgatgtgagtgtttaatgatgtttttgaggagaatgccatatgtagcagacagaaccctgggctgggcatcagagggaccgggggcaccacactgggctttgtgtcattatctccagaaagtaactggcctggtgcacaggagaaagttagagtacattgtccatacagttcccacatagctgtagggttttatgaacccatattttaaagggccttctaatgaagtgaggatgttaatgctttttttwaaaaaaaaaaaaaaaaaaagagagagagagattggtgattactttaaaatctgagtcctggccaggactcacgcctgtaatcccagcactttgggaggctgagacgggcagatcatttgaggtcaggagttcragaccagcctggccaacatggtgaaatcctgtctctactaaatacaaaaatcacgctcctgtaatcccagttacttgggaggctgaggcagaagaatcacttgaacgtgggaggcggaggttgcagtgagccaagatcacaccactgcactccagcctgggcaacagaatgagactccatctcaaaacaaacaaaaaaatccaagtcctaattatcgctgcagctttctttaatgtgtgcagtaaggtggggacatacagaataacttaagatgtagaaatcgtctctccctccctgaagaatatcatggatactacatttgcctgccaggaatgttgtgttgttctggtgttctcgtttctgccgttatcattgtttctgcttaatttttacaacacaactctggccgcacccgtggatgatcatggaaaggcagctgcctggctttccagaattgttttgactctccatctgaacccagagctctgtttcctgtacaggttgctagcagtatttacccaaattgtcccttcccaactcagacccactgacccttcctttctcagctgattacgggtttaagtttgaatcaaaccatgctatagaatcactatctagcagcttctgtgcttgcacaataagagtattagtcagcgtttcctgttttcattcatattgtaagttgaatagctgtaacaaaagggaaagagattgccaagacaaataattcttatggcttgtgcaaacaatttattacaagccttattaaatatgcagctttcagaagtctacgtgatatgcctttcagcaaagctaaatcctactatgtggacttgcttcatgacttaagaacaagtctatattgaatttaacattaaataattatttggcctgtatctcttttaagctttgttaagaactgcaaatatgataagggaataaattgctcatttcaagtcactaagaaaacctaacctataggttatatatgttggcagttcccaagaagtacctaggaaatggaaccttcctataagagtggtttgtccccttctcacgagatgggtcttcatatcaaggccccctaaggcacagatacacagcactccacagtgtccaagttcgtagtaattggtggcaccttattaaagtagtttttactttcataattactgattacacatcagcataccttttccatgttctgtttccttggcagcctgatatttgaatacaaacgacataaaagtgattacatgcagcatttcaggacagttttcaaactgagagaatttggcactttcttttattttcttcccattcttcgtctatttcctttgcatttggaagccaaactcctcgaacctttacttctgcatgttgttttcgtcccctagctagagttctctttattactacttttttgtttccaattggtctctttttaaaaataaaacatggtgaaaccccatcaatacaaaaattagccgggcatgatggcgggtgcctgtgatcccagctactcgggagactgaggtgggagaatcaattgaacccaggagacggaggttgcagtgagctgtgatcgtgccattgcactccagcctgggcgacaagagtgaaactccgtttcaaaaataaatgaataagtaaattaaaatatgaaattaagcttagctagcctgtgtagatgttttagatggtcatatctttatcggatatgacatttatgcctttcagtaaaaccattgtagtattgtaagaaaaaaagggaagtatgatagggaggactaagaacatatttgtacttctatgtaatgctattttatgtgtctatttccattgaagtgtggccttgacatcactggctcccaagtcccatcctgttttttcattgacctgcttgtgccaggtactgcgttaggaagtggagctaccagatgaataaggcgtggtcccgccctccatgtgggagacggcacgtcagtgtacttaggatgctgcatgtggtgacagatgagggccctgcaagggagcacaccacagggccgggagggtgggatgggcrggaggagtagccaactttgcccgaaagcatcaggacaagcttccaggaaatggcacatccaagctgagtcttggacagcgggttaaagaggcagagaggggagagaggaatgttccacatgggaaaagaggtctggaggtgacaacaagtaacatagagtatgtgggctgtgccggaagcttgatattacagaggcacgaagtctgaggcaggragtgtgaaggaagatgaaggtaggggaaggaagtttacacaagggtggccttgacttttatattaaggcactttagggaagcaggaaccactgaagacaggagaacatggtgactacacgggcgcattgaagsggggaggagctaggtttttgaagggaatttgagcttgcaattkttcaagggcattcaatggttataaatgaaacttttcattaatatatttgtgtccaagtgtttttagatgtgcttttctgctactctctttttatttggtttggagatagatgrtgactttccttcagtgccttctatgtgtcttgacatgttaatgtctcaaacacatggtccrtatcatcatggagcttgcartctaacagggtagtttaacacataaatatgcatccagttggaaagaacttagagatcacttgatcagcccccgttatgtaaaatgtatgcaacaatctacctccaactatagggcgacattaaacagtttttcaaaataccatggcattgaaaaaaatgcgtaacatttgggttacttcagtcccactccccrgtactaatcaggccagtgaaccagtcttgctggtgaaataatgacttctccagtcatgatggatgatttcccttcatcatgaccatttcttccctggctctgcctttacctatgaatctcttctttcctccctctccttcctcctcttggtctctgcctgccatacccaactccacatttctctgcttggaaaaatcctacttgattctcagagcctgactccatcaccccctctctccaaccctcccaggcaaactccgtccctcccagtgtgccgccctccagctctctctagttgaatagcagatgttctctctcccacttccctgcagggcttcagggtagtgaccctaagagtgagcttctaccagtgagaaaaacgcctggatggagcaggaattcccacaaatgcttaggaattcaatatgatttttagcaagtgggagaattatccttttggttacaaagatgtgaactatttttgtgagttctcagtatgcaccaagaaaaaccccagtgactcagtaatgtacctgtgccgtctcacttaacccttccaacaaggaacttgccaaggtgcacagctgggagggatccggggtcccgtccgtgtgctaacctgcaggacagcgccgcataatccagtactggggccttattgtccagccttccacctccaggagcccactcagtgatgacttttgacaaaagtcacccggattatccctcttttggggtccatgatgccaccaacggctaaagttaacaaatgcattaccaggaggtaccactgaggtaaggattgttactgtaagtgattttctctgattttgaccactacaagtaaaatcacaagatttgtcccaaatactatataaagaggaatgtcttttatttctcgaaattgttctgccactttgtttgttcaaataacacataataaaggataaatggcttgtagctatatttatccaaattgaacatttttgatgtaatttttttaatttgtcaaaagcatatcaatggtcataamaattttttatgtcctctggccctattaccttacccttgggaatttattccaagaacgtaatttgaaagagattaaagcacataggcacaaatattttcagtgcagtattgtttatattggaaacaacccaaatgttcagtaacagggggaacaattttgtaaatcttgctacagcaacttaacaaaattataagctgccacttataattgtaaattttgaaagtttgtagcacagcaaggaaactgatcatgttaaatgtttctgatatcttagttaatttttctcccgccagttccgatcrgtgtcctggtcataccgtcagcatataagtatgtatttcataaacatttactttgtattaactcagtagtattcccttcctagagtggtttgcttcccagattgtaatggacaatcatctcacctggggatcttgtaacaatgtgattctgattctgtaaactttgtggggagcccaagattccacatgtcttagaggctctcagatactgctgatgctgttgatcacgaatcacgcattgagcagcaaggtcctagagctctttgtgtatgaagaagatactactgacccagtgcctcgctatcttgaaaggcagctgtgacctttctagcaactgagggggtggggactagaaacgagtgttttctggtgtttctctaataaagctgctgtcttgtatccagattgaccatcagtatccttatgcccttcaactaacttgaaatttgtcagttaacagaaattactgggtggcactaaaataaattattcttaatataaagggtaagaaagggtcgggtgtggtggctcatgcctgtaatcccagcactttgggaggccaaggtgggcagatcacctgagatcaggactttgagaccagcctggccaacatggcaaaaacccgtctctactaacaataaaaaaaaaaaattagccgggtgtggtggtgggttcctgtaatcccagctacttgggaagctgaggcaggagaatcgcttgaacccgggaggcggaggttgcagtgagctgagatygtgccattgcactccagcctgggggacaagagcgaaactccatctcaaaaaaaaaaaaaaaaaaaagagtaagaaaggatcttccattgtaatcatactatcattgccttttgaaacaatttggaacctgattacaaagttgaaaatccccatctgtatgaagaaaagcttcactggctggtcaccttggctcaacgcctgtaatcccagcactttgtgaggctgaggcgggtggatcacaaggtcaggagtttgagaccagtctggccaacatggtgaaaccccatctctactaaaaatacaaaaataaaaaattagccaggtgtggtggcaaacacctgtagctactcaggaggctgagtcaggagaatcgcttgtgcccgggaggcagaggttgcagtgagccgagatcatgccgctgtactccagcctgtgcgacagggcaagacaccatctccaaaaaaaaaagcttcrctgtgagttatgatatgggaagaaaagtcttggcctggccaccacaaggaatccctcaggcctggyggtgggaagcagaggagggcgcagtctctttagggcagaaagtgaagaacatttctatgacaatggggaaatcagttcacctttgtgttggtaaacaaaaggaatgtaagctgtcctttgagctcgaatcatagtggtgattgccaaaacctacctttgtttttagaagataatarcacatattccacttgcttccccacagtgaccgaagctggctttggtgctgacatcggaatggagaaattcttcaacatcaagtgccgagcttccggcttggtgcccaacgtggttgtgttagtggcaacggtgcgagctctgaagatgcatggaggcgggccaagtgtaagtgcccacaccgccttcctaataccaaagaaatttcattatgttaaaacagaattgagcatttgaaaaattcctgcccatttaatgactatagttttctagagtatttttcttaaaactttttttttcctgtagacctccctcgtggacatctaaaacgttttttgttttgtgttgttttttgttttttcccaacaccaccatagggcactttgagtttagtaagttcgagtaaacagtaacacccacagttctttctaaacaatattttggaaaggagcataatgcaaccactttttagtctcaagcttcacatctgatactcaggccaagattgtataaccatatggtaatgggaggttagaggctcttgtccctgaacgaagaacaagaggattagagtgagttctttgatgacagagatttttcattgtttgtacagatagtttttcggttcactgatgctgcaactcatcagatttcatctaaaactattttccttctctttctgtttattatgatttctcctcacaactctgttataatactggattgtttctaagagctttgcttggaaaacacaaattcgattttaacttctttaaagactttttatatttacctatcctaatatatatagaaattacagacattataaaggaaatrtattcctttccacagaaaacctgtgcatagatttttgggggtttttttgttgttgtttgcttgtttgttgtttttttgtttcatttttaggaatttccaagtggagaataagacattttatactgattaatcattttgaaataaaataaaatttctctatcataatattcacatatgagacgaactgccaaatctgatttcttaattggtatactgtactgtgtatgtgacaaaagtcatatattcaatgattattgcatagtcaaaacaagtagcaggtttgccatcatgaaacgctgtaaagcaattctttctcctgggagaggtggacatgatttttataccattttacagataaggaagctgagttttgataggcttagggaatatggacaatgtcagcaggccagcagagagccgagaacttcagatctaaatctcctactatgtccaccatgcagagctggatgttaatgaagggcagaagttttctaaatccaaatccactcctaatacccgacacttaagcacttcatttttgcctaaagcttcatcatcatttcaaatgcaagaatgatataatacagattaaaagtagtaaatcataaagaattctgacttcactcaaaacaccccttgttgctacagtccttcctggattttagacattgaatctgtataacaacttctatttttaaaaactacttccgcccatgtaggatgcatttggaattctccctccctgccctgccaccctgaaaattatagaaagggcttagagattgtctgatctcattcagtctttataaagagaaaatctctgaggcacagggagacgcagtgacttgagtggtgtcacacatctatttcagggactgatcagatctacagtcctggtctcttgacatcagtcccatagttttccagactctggtctctgtcctgtaaaaattctctacatggtttacaatcctatttcattcatcttaacatatgtgctctgttattcagtggttgcactttcgtgccacattaatcctttgtgtctcttccactgctgcttaatgtcatggttctcagccagtgatcatggtaacatggaacagggttagtaggcacagatatgggtggaggataagaaaaggtggggaccagccaggcgtggtggctcatgcctgtaatcccagcactttggaggctgaggcaggtggatcacctgaggagttcaagaccagtggtggcgggcgcctgtaattcccactactcaggaggctgaggcaagagaatcgcttgaacttgggaggcagaggttgcagtgatctgagattgcaccattgcactccagcctgggtgacaagaacaaaagtccatctcaacaacaacaacaacaacaaaaaaaaaaaaaaaaaaaaaaaaaaaaaaamccagcagggaccaggaagccctgtgaagctaggcatccctctcctgggctccagtagtaccttctgcctcacattgtttcatgaatgccttgttctgtgtctccctatgtaattctcaattccttgagtttagggactgtgtcttattaattggtatggtccaagtgtctggcatggtctatatgcagggagtgttttcaataatggcaagataaatgaactttcatcctcttaatcctctattccatagtgctcatctcggtgtccttccttcatattgaatagctctgtatttttraaccatgattattcatttctacttctgttttcttttttcttttttgctacaaatactgcgctgggatcgacttccttttgatcattacacaaataaccatggctgcctcttatgtttattcagcttgttttttttccataatttgtacagtggaaaatcttgtggcccttgaatttgcccattttaaatttgccctcagtcattttaaactcacatcctgtcccccagagtgctcggccattcccagtgcaatccaataactaatattgtgctatgctttgggatccacagattctttcacaattagatctttaaactaaccattgtatgaatcagcattcttcacacayagaaccaataaggatgtgtgtatatatagagaaagatatttattgtaaggaattgggtcacatgattacagaagctggcaagtccaaaatctgcactgtgggctggcaagctgaagacccaggagaggcagtggtgctaatgcagtctgaaggcagcagtctgctggagaattctcctgctctcaggggaggccagtctttttgttgtactcaaaaaggcctttgactggtcagttgagacccacccacattatgtaggacaacttgcctactcagaggctgctgatttccatatcaatttcatcatagacaccctcacagaaacacgcaaaataatgtttgaacaaatactggacaccctatggccccagcaaagttgacacataagattaaccacaaggccaggcacagtgtttcaccctgtaatgccagcactttgagaggccgaggtgggaggactgcttgagcccaagagttcgagaccagcctggggaagatagcaagacctcgtctctacaaaataataaaaaattatctgggtgtggtggtacacacctgtattcctagctactggggaggctgaggcaggaggatcacttgagcccaggagtttgagaccgcagtgagctgtgattgtgccactgccctccagcctggacaacagaactttatggcaattaccgtaaaatgatttcgaatggtgatgtactctgtataaatcargtattaaacatattattagttttatgttctaatttgaaccaatgtttgagaagtttcatactgttccattggctcaaattagaatcatccagggagattttaaacattactgatcccaggttcccctcccagaacttctgctttcattggtctgggtggagcccagggatcagtgttttctaaaagcttcccgcaggagtttaggtttagccagtgctgccagctactgttttaaaagcacaaaacatagaggtacatttctaaaaattgaatgtgattatgttgttctttctttcagatcggttgtgtaagcatttttataggattattcttcatgttttctctccttatttcaggtaacggctggtgttcctcttaagaaagaatatacagaggaggtaagaggagctgtttagaygcttatgtgaagaatctcttaaatccagtgactcgttggctttcagtgaatgagccctccttcagtggcctcttagaaaagtgctgttctgtccgggcgcagtgactcacacctgtaatttcagcactttgggaggccaaggcgacyggatcacatgaggccaggagttcaagaccagccaggcaaaacccatggccaacatggcaaaacctcatctctactaaaaatacaaaaattagctgggcatggtggctcacgcctgtagtcccagcatgagaatcgcttgaacctgggaggcagaggttgcagtgagctgcgatcgcaccactgtactccagcctggacgacagagtgagactctgtctcaaaaaaaagaaaagaaaagtgccgttctaagaatccgagaggaaatggatgggatgaaaggataaaattcattcagttaactcttaaatatcaagaaaagatggatataggctttgtctactattgtgtactcccagggtagccatcagagcaggaactcaaggtctccaggtcagaaacaaatatgaagcttacacttctgtattcttttgtcatggaaggtctatatacagttggctttatgatttacaggagtggcttactcttttctgtaaatagactttgatttgctggcagcagtacctcttagctcctacaggtggcgccagggatctgagccaggaatacctggwcagagctcctcacccacctggggccttgtgcctgtcaggcctcaacctgcagagcatgggcgcattgcatagaccctgcagcctgtcctcagcagggtgagctgccaggcttcagacccacccatatgccattggatccagaatcattttagaaattattttgaagacgaacctctttattcttgcagccatctttcttggaggaaaaagtgaaaaaagatgtagcaaatcctgccagagaggtgctggcagtttagcttggcaggtttggtgggagacaatacacaggggtctgggttttgcttttttcttttttacagaacatccagctggtggcagacggctgctgtaacctccagaagcaaattcagatcactcagctctttggggttcccgttgtggtggctctgaatgtcttcaagtaagtccagcctcctcctttaaatgtgggcattatcactaggccaccctgtgaacgatatttgtgtcttggggtatttggtctttctgtgcttcatctaaaagtatacagaaatacccagttctttctgtttgtttatttggtttggtttcattttagcaaatgtgttctcacaatgttattaaggaagtgaaatktatatatagtgagttactatctccttggcttttttttttttttttttttttaattctacccagcatttttgtctgaaacaaactgtgaatgatcaaagggatatgttatggaattttcttgataacacccttaacgacttgaaatatttgagtcactttagagaggactttttttttccatgctttaagtctgatttatttaaacacgatgtgaccacttttgatgtttaaaatgtattcagtgttagggagcgaagttctgtataaatggtgagtctttctttgaaaacatagctaaatggatacagatgcaaaaccacaaacattttcttcactaggaccgacacccgcgctgagattgacttggtgtgtgagcttgcaaagcgggctggtgcctttgatgcagtcccctgctatcactggtcsgttggtggaaaaggatcggtggacttggctcgggctgtgagagaggctgygagtaaaagaagccgattccagttcctgtatgatgttcaggtaagatctagtaaaaacaatggctcacatttcttacaccttagcatgggttgtcccattctgttgtcaccacaaccctacagataagaaaactaaagatagaagagtttaggccmggtgcagtggctcacgcctgtaatcccaacactttgggaggctagggcgggcagatcacttgaggtcaggagttcgagaccagcctggccaacatagagaaaccccatctctactaaaaatacaaaaattaggtgggcatggtggcgtgcacctatagtcccagctactcgggaggctgaggtgggagaattgcttgaacccaggaggtggaggctgcagtgagccaagatcgagatcacaccactgcactccagcctgggcgacagagtgagaccctgtctcaamcaaacaaacaaaaaggtagaagagtttaagccatatgacaaagtcacatttccaagtacagaccctagctccttgtcccaaagcctgtgcttttgaagactcccaaatcgcagtcctaagtgaggaggtactttagcgaacaggatttgacagctgacgctttcaggagttgcacaggaacaagagcaatttcgtgaggattgggaaaccatgggaggtattttccttgttcatttctcttttttttttttgagacagtctctgttgctcaggctggagtacagtggtgcaatctcggcttactgcaacctctgcctcccaggttcaagcacttctctgcctcagcctcctgactagctgggattacaggcacctgccaacacgtctggctaagtttttgtatttttagtagagacggggtttcaccatcttgggcaggctggtctcaaactccygatctcatggttcacccacctcggcctcccaaagtgctgggattataggcatgagccaccacacctggcctctgcttgttcatttctgttatggttcttttctcttgtggttttattgaactatgtctagtgtatgtgtgtgtatatatacatacataatatatttatttattttcattgtggtaaatatatatataacaaaatttactatcttagccttttttttttttttttttttttgagacagagccttgctctgttgcccaggctggagtgcaatggcgtgatctcggctcactgcaacctccacctcccgggttcaagcaattcttctgcctcagcctcccaagtagctgggactacaggcgcaagcaagcgtgcctggctaatttcttttttattttagtagagtcggggtttcaccgtgttgcccgggctggtctcgaactcctgagctccggcagtccacccgcctcggcctcccagagtgctagggttgcaggcgtgagccaccacacctggcccatcttaaccatttttaagtgcacgtcagtagtgttaagtacattcacattgtcatgcagccaatctccagaacgcttttcatcttgcaaaactgaaactgtacccactgaacaactccccatgcccctccctacagtccctgccagctaccattctccttcatttccatgaatgtaacaactccagggacctcatgtaagtagcatcatactgtggctggcttatttcacttagcataatgtgcgtgcatgttgtagagtgtcakaatttcccttcttttttttttttgagatggagtttcgcttttgttgcccgggctggagtgcagaggcaccatctcagctcaccgcaaccttctgctctcgggttcaagcaattctcctgcctcaggctcccgagtagctgggattacaggcgtgcaccaccacgcccagctaatttttgtatttttagcagagacagggtttcaccatgttcgtcaggctggtctcaaactcctgaccttgtgatccacccacctcggcytcccaaagtgctgggattacaggtgtgagccaccgcgcccggccagaatttcctttatttttcgggctgaatacgctcccattctttggatatcccacattttgtttctttgtccatctgtggatggacacttgagctccccctcacagctattgtaagtaatgctgtatgagcatgcgtgtttatggcatatggcatatgtacaagtatcccttcaagaccgtgttttcttttttttttttttttttttttgagacggagtcttgctctgtcgcccaggctggagtgcagtggcgcaatctcggctcactgcaagctccgcctcccgggttcatgccatgttttcaattcttttggaaatgtattcccagaagtgggattgctgggtcctctaggatatttttaagcacatgtcgatggttcagtcagaagacctgagcttcccagggctcactctcctcctcagatcgtctgtctttgcacccgtctgacatctccattctgaattttgtggttccrattctggctgatggatttgtcttcaggggtagtgcatgattgtggagtgcccaggcttcaagctgattgctgcttctcctgttccttcatccctcacatattctattgttgagtcactcagatgtcacagacactcttctttcctgttcagtggcataaatcaatagcataagtgaagaagaaatcmgtgaagcaagagcttagcagcgttgttgataagcctggagtcacagtggtgagagaacggggctgatgtattaatatttaatattaccacagctctcgcttttaaggagttgtttgtgagctgggtatatgggcgctttgcacatgttcacctctttggtcctaacatccctcttaggtggaaactggtgatatcttcccattttacagacaagaaaactaaagcacgaagagactaagtcaactgctcagtgtcccatagctaggaagaggcagagctgggagaaagaatatccagatggttgaggtcatcaccctgctctgttcttcagagctaagtactgtgctcaaaagtgtgtgtgtattggaggtctggggggagacatagttaaaggggacagtgactgagtgacccccctgaagagaaagggtgacagtgatgggcataggcacagattccatgccacacaggggacatcatcgctggcacgcagtcagtgtttacggaaggaaggacacagggaattaattggaggctagctcataaaaggtttttcatttttatgaggccattttgtgaatgaggaactagaatattctggactacagaggcggtagagatcaattgagggagaagattttggatgagtgaaaagaaaaatgttccagttggaagctttgagttctcagacctagaggtgttcagcgcaaaatagatgtagccctgctgtgggcaagtcagaggcattgaagccaactcagatggcaggtggccaaggagaccctgggttcctgttctttggtcctgggtaaggcttgccagggtacctacaacccttggcacatgccagagcctttctacataaaccactgtagggagagtcacccccagatcctgctgtgagtgtgcctctgatcatgccatctgatcatgccatcttgccgtctgatcatgaaccaccccactctgcatagcaaaggcagttattttcatgaatgatttcacaaagtgcggctcttttcaaggaaaacatcccaggtgaaaaagaggtcagtaatcagaagaaatgcttctgagttatgctgtctcagacatgcactaaccctaacatgaacccttttcctttccactgatatttcaatttttttttctgaattcccattcttcatgcagataatgctgctaaaatgtcagctctcttctgaaaggaggaaaatgtttaataataatgtggtctaaagtcctctattgataggcgacctcaaggccaggatccctgcctcctttgccaacacacttctcgcttttcttgtaacagaaattcgatttgagctgcataattgtttgttagataatcagcctcccagcctactgcagcatgacagttcatgaaaagagctgctgctgctgctggctctctttgtactgtctgcctgttagctgtgttcctcacaccagcaagatttagatcatctaagaccatttacagtcttgtcttgtcaccatgtaaaaatctgaattcattggtgcagtcagtaatagagctcaagccttctttscccckgatttcttgcattgattggtgctggtaaaactttagtaacttaagtaatggttttctggaagccctttttacctccccyacaaccccacaccctcacaaccaacccttgggtgctgggcagtgagaaagatatggcattgctctataggagaaagaagttataaatgctttgcatatgacactctcccacctttgcttctcaaagcaaactgggtttctgtgtgccccttggtgtctccccagactttatatccccaagaatgtattcagtacaagactaatggcatcttgygtgctattctttctccaccccagtcttgtggaaggaaaacaccggagatgatttagggtaatgggaaatagtgctagagcccagggcatgactgcatttgaatgtgaagtagaaattgtctcggaaccccactggagagtgattcagctggagagagtggggcacctggctctcagaggcactgtgcggccagacagcagtgtgctggacttcctaatggcgagctcacaggttaagtgagaaacaggctgcacttctgacttgggagtctctgctgaactttatagaaaactgacttcagcagcaactgctgtctagagaacaatttggcatctctttttgccagagtaacttctaactcaagagtaggcaacttttaattatggtaccggatggaggcagcaatgaataatttagaataaagattgaaaaatatggaataaggtgtagtagactaattgctcagaagaagttttattgtgtgaaaatgaatgtgtttaaacttgaaatacagaggatcatttcctctctacccttgagggtgattgcagtcccttttaagaagctgttaaaagtccccctcaagatcatcttctctttgaattttcctttctaatgtgacttttgacaattatatctttatcgttcactaagagaatatctccatgtctgcagggatgcagggaaatatgatggctgaaagaaacgctaatctacatgcgcactttattagctaagaaatccctcctccatacrttcttccaggcatgcctccgcacatcccatctgctatgtgggctcaactctgcattatagatgggaaggtgatggacttgtccataagaaatggacgcttgataggagaaggaacatattacatagagctaacaggctaaagctttgggatcatgcaaattaagtttaaaccttgagtaggcctcctactgtggacacaatttggggaagctgactaatctctcgagcctcagcatcctcatttgtacaatggtgtctgacagtgacaccaacttcaccaagttgctgtgagacccaaatgaaatgccccagagtaaaatgctggaacatagaaagcaggcaatgaaggccaggagtggtggctctcgcctgtaatcccagcaccttgggaggctgaggcaggtggatcacctgaggccaggagttcgagaccagcctgggaaacatggtgaaaccccatctctactaaaaatacaaaaactagacaggtgtggtgtcacgcacctgtagtcccagctactcgggaggctgaggcaggagaatcgcttgaacctgggaggtagaggttgcagtgagctgagatcacaccactgcactccagcctgggcaacagagttagactctgtctcaaaaagaaaaaaatggaggaaagtagtcaatcaatgctggttcttcctcctgtcatgttcacttggaaagagagtgggcctcctgaattcaccttcaagaattctcctgtaactcaaggtaactttgtcaaactccaagattggtttattttgctctgggttaaaaccaggaattagaagtcaagtctcctaaagcactactgaactaaaccaagacactgacgtttttccttctccgtgagaattgggagcccttagtgatatcataaaacatcagtcatttttgcaaagaaggaggtatgacccggagaagtcagcttgacattcagtcggaatattgtttgttaaatgaggagttaaggttgaaaatcatctctgtatccttcctctagccttgcaaacattttaaggtgtagccttgacagcaagacaggatagtgtttgtttttattaaaaggtctttcctgttccttgcgtgaagccattctcttgatcccagtgggggctggatgaaggaagagcaaaacaaaccacgaagacagcctggagccgcagccagctctgctgacttctgaacttcacgctctcactgcccagatggccaggggtgtttcctcctctgctggtcttttttaaggcaggatgtttgttgttattgttgttgtttttctggttggttcttaagaaattattttctacatcttgaaaatgccagctggaacctacaccagttgttggtggggtgtgagaactatcctttacatggacttggagcatttgcaactagagcctccacattgaaataaacatttaaaaatgcatatctatggatatacagtgggggatcttccattgtggtaaaaatatgtataacatacaatttcccctttaatcgcttttacatgtatagtctgtggcattaagtacattcacattgtacatacagggtttaattaataggatcttaaaacttaaaagggtattgatgcacatctctgttgccttttacatttcacagtaattagaaggraaaaaacacactctaggttgaaaggctgtcctttcttttggttgtccttgtccctggaaaagctgtcttccccctcagggcctttgacctcccccggctctccctcccatcttcagacacgcccagggccagcctgagtcagtagccctttcttcagcgctccctcttctcctgttgtgcattagaatgtttggagtgttctgtggaaagctggtccttacattttccagtcagttatgcatctcactcataaacctgtttctycccccatgctctttaatattctgctttcttaattatggttgagctgcctttaaacagtcttagattgttcaatgtgagtggcttcaacaagcctcccataagcctcttatcccctggccccctttccatgatccaaccccaaatctccagataccccctgctttttttatgtttttttgtttgttggttggttggttggtttttgggtttttttttttttttgaggcagagtctcgctctgtcacccaggctggagtgcattggcacgatctcggctcactgcaacctccacctcccggtttcaagcaattcttctgcctcagcctcctgagtagctgggattacaggtgtgggccactatgcccagcaaatttttgtatttttagtaaaggcagagtttcaccatgttggctgggctggtctcgaactcctgacctcaagtgatctgtcctcctcagcctcccaaagtgccgggattacaggcatgagccactgcaccaagccccggatacctcctgcttgaccagaccttctgcaaacacaccttagatccctctcaaatctagatgcttctccaacactggcttctaggttctttatgaaacctctgctggccggcagtatataacccaccacccagcctgccaggcacgtcattcagctgtgttagacagtttcgagggatctgcacctgtcatgagcactggcccaaccttctcaaagcatcccactcatccctgtgattctggcaaagcttgccccagctttctttcctcgatggttgaaatagcacccaatgagaaaaaaacagtggcctgtatttattatacttacacatgtcacaagaatccctgtagtgtcattgaaagctttcttctagcatgcaaaatgattgtcactatgatgtaagtttctagaaatgccttatttcatctaaaattatgagagaaggtaaaatgatgaactatcaaagtcacactacatgttggccggctgccttctaccactcactccatccctccccaggctttctgacttaaatttagatcacatgagaccattgcagtggagagagtgtccactttctcaatctaaaagcaagctcgtgaagaccattaaatatgatcacaggaacaaacaytaaaggtaccacacgtaatggaccacttaagacagaaaactacgatcttagggtttaggggaaaaaaacactcaaacagcacaggcttccagtctccccagtctctgagaggttgggatttttttttttaataaagtacaagggctccttgaacatgaacacggaacgagcgttgcacctgtattcattcatttcgctcttgtaacacattgatgttcctaagtcagatttgtagaagaggaacgagcagatgcatcatgagaacactgtgcttggccaggcgcggcggctcatgcctgtaatcctagcacttagggaggccaaggtaggaggatcgctagaatcgaggagttcaagactaacctgggtgacatggcagatcctgtctctactaaaaatattttaaaaattagccaggcatagtggcacatgcactgtagtctcagctactcaggaggctgaggtgggaggattgcttgagcttgggaggcagaggttgcagtgagccaagatcaccccactgcattccagcctaagcaacagagccaagctcaaaaaaaaaaggccaggcacgatggctccctcctataatctcaaccctttgggagactgaggcgggcagatcacttgaagtcaggagttggagaccagcctggccaacatggcaaaaccccatctgtactaaaaatacaaaaatgagccgggcatcgtggtgcgtgcctgtaattccagctactctggaggctaaggcccaagaatcacttgaacctgggaagtggaggttgcggtgagccaagaacatgccactacacaccatcatgcccggcctgttttttttgtgtgtgtttgttttgggttttttttgagcctgggcaacagaacaagactctgtctcaaagaaaacaaaacagaacactgtacatgagtgttcctgggcccagcagagtgctcgaaccagtcagcactttgccctcttttgggtgagatgagatctttaaaatcacttattcccatatattccgttttttggcattgctacactattctatttgagagtaataaaagattacccatgtggatttcttactatttcatgtggagaaatgcagcttttctagcggcgagcctttcttccatttcccagagtccggttaccctcaccgcaccccaggtttgccgtagaaggatgagattccctacatgtaggcgtcttcagagtgaacctgttgctcagggcccgcgagcccacagggctccatgcccactgagcaggctcgtggacgtcggcacgtagctcagatgtgctgatttccagccaaggacatgctttgtgtcaacgatacaggggcctgttgttctcagtaacaagggcagagccgctcccgggactccagttggtattggtaatgcaagcccttgcacctagtgtggtgtggtcagtataaattaatatcgacagcttcatgttgtactttaatttgaagtacaggaaaggctgcttgccaaactgtatttgtagatcatttaaaatttatgcttcatttaaaatgcaaaatacgaatggaaataattactgtgtatccggaaatgtctattcaacttacaagtttattaattgatccttctctttacatgttttacgggacttggaatacactttgctaatatcacagcataggaagatttaacccatatgaattcaactctgtagccttggtgaaagaaaagaaccatgtatttgtcattcactgtggcccccgatgtatgccaacgacttcatttggtgcagggctgaagaaatggcagtgtgttccaatacttcacaacagtggggcctcattaagagatgctagggtattgagagtggagtgttacatagtgtttttcrtaggtcttctaaaagatttttcagagttgctgacttaagaatttggcctctgagtaagatgagacgcccctactacgttataaagccttcatggatctttatttctaacagttcatttttaaacttttgttccatttcattttattttgtccattttttgtcatcaaaaaattattttaaaatgtaacagctcttctagaatgtacagatcaattttattccactaaaaaacaggacttcaataatttaattgaagaattctagtgagcatttccagagcctttccaagaaagctatactgtttaactttgagtgactcagcttctaggaccctggtccaccacacctacaaaatgaatttaataaagcatgaaggtcaccaaatcctctactatttcttcgtggagtcattcagctagtgtttatgttgtgcctgctctgtgcgagagactgtgccaccaatataaccactggtcacagttattttctagagccatactgcctgatatcccatgtggctaagattgacagttcagtttctggattgttccagtcccatttccagtgcttttaatagccacatgaggccagtgaacacacgatacatcttccattgtgatagaaagtggcagtggacagctttgttctagagtatttccgtttctgaaatacatgtttaagaagtttgraaaggaattagtgtagagtatgagaagggttacatttttggtgaatatgaagatttaacrtaatgttagttcaaaaatgaccaaagacacaagtgtagacaccaggcttttgaagtagctaatatgttaagcagctgtgcattatatagacagaatattcactatgtcccactcagccctgtgtttgacaccatttcaccttggcttctgcctttctttcccttctttgcctattgagatttttcctgtcctttctatcctttttttttttttttttttttttttttttgaggcagagtcttgctgtgtcaccaggctggagtccagtggcacgatctcagctcactgcagtctccacctcccgggttcaagtgattctcctgcctcaccctcccaagtagctttgactacaggaatgcgccaccactcccagctaatttttgtattatttaaatagagatggggtttcaccatgttggccaggatggtctcgatctcttaacctcatgatccgcccaccttggcctcccaaagtgctgggattacaggtgtgagccaccgcaccaggcctcctgtcctttctttaatgcactattccagctttttttttaatatcttgccagcttttgctgattttcatgcctccctctgcaacctgtgatctcttgactttaatagtaatgtttatacagagtcttgactgcacactctcttctgtcatcgttgtttgttgtgtctcattgtccccaatccatcagaagttcttggtacacaaagtccctgaagctgtatgaacaatgccctgacgtcttgaaaggacttgccataggtggttatttgatcacttagcagatgcctttgggatcctactttgtgcaggccactctccaaggcacaatgtggcaagtaaatatattagtcaatatttacagaaccaagagaaagccagcaatgattaatgcataaacagtcataaattggccattttatttgtttataaaagctatcatttactacagagaagtacaagtgaatatcaagctcagatcaagacctttggactgagcttggctttttttttttttttctttaaagattacacttctcccccaaatcaagcagattaaccataggaagttccttgcctgctaacagaatataaatagattgcatgcaaggggaaggaccttatcagggcagattttagtatttacactaaacccaaaagattatttccttaattgtacttgtgagtgaaaaacaaaaattgtagcaggagtcccaagagcactctggccatgggcttttgagctgtgagttgaagcactttattcagcatgtggctgcagggttgtagctcaggttgtagacagtgcattctcttcaggtcccaggaaacagtgtcatacctgtggaagccaccagaatgcaccttcatcttctccagtggtggcgaggttgaggccaagcatcagaagtgctgagtgctgggaaactgtggggctggatagatggcagtgcctgctgggaagcacacagccctgggttgaggcagggaagcagggccgcccagttgggattcattcgtactactggcccctcacagtaccgtcatgtgtgggtggtcgcgcttgtcctacaggaagtaaaccacaactactcatctcacacagtcagcccggcacctccttggaattcccaaaacactttccaataaacattggaaaggaagaaagtttagttggtaacaaaaaaatgtatgttgccttacgcccaaaagcattgaaagcagggactcaagcaggtactcatgcagccctgttgatagcagcattgttcccagtagctgaaaggtgggaacccccttgtctgtcagcggggatcagctaaatatggcacacacatactatggaacattattcagccttgggaaggacacctcctatcacacggatgaaccttgagaacattatgctaaatgaaatacaccagacacggaaggacagatactgcttgattccacttgtaggggcctgtagagccgtcacattcatagacaggaagtagaatggtggttgtcaggggccaaggggaggggcatggaaagttgctgcttaatgggtacagtttcagttttgctaaatacagagagttctggaggttggttgcccgacaccataaatggacttaacgctactgaactgtacacttagaaatggttaaaatggtaaattaggccaggcatggtagcttgcggctgtaatcccagcactttggaagtctgaggcaggcagatcacttgagcccaggagttcaagaccagcctggacaacatagcaagacccccatctctacaacaattttagaaattagctggtggcttacacctgtagtcatagctacacagtatgctgaggtaagaggatcacttgagcccaggaagttgaggctgcagtgagccgtgatcacatcaccgaactccagaatgagaccctgggtcacraaaaaagaaaagaagatggtaaattatatgttatgtgtacgttaccaaaattaaagttcttaaaaatatatattttaggccagacacagtggctcacacctgaaatcccagcactttgggaggccgaggcaggcagatcacctgaggtcaggagttcaagaccagcctggccaacatagtgaaaccccatctctactaaaaatacaaaaattagccaggcgtggtggcgggagcctgtaatcccagctgttcgggaggctgaggcagaaagaattgcttgacccagaaggcagaggttaccgtgagccaagatcgcgccactacactaccagcctgggtaacagagtgagactctgtctcaaataaataaataaataatatatatatacatattatatagatagatagatagatttcttacaaaacattttcgtgtttaaaaataacaaatcaggccaggcacagtggctcacgcctgtaatcccagcactttgggaggccgaggcaagcggatcacctgaggtcaggagtttgagaccagcctgaccaacatggtgaaaccctgtctctactaaaaatacaaaattagcygggcgtggtggcacatgcctgtaatcccagctacttgggaggctgaggcaggagaatcacttgaacccaggaggcagaggttgcagtcagccaagatctcgccattccactccaccctgggtgacagagtgagtctctgtataaaaaaaatttttttaaataacaactcagccatccactcgcatcaatttattcactagtcattcgattgctattactttgctcccatgtgagttttttaaattattaacagaaaaatcacactctttatttttgaattatgatcttgagttcagtaaagaatgcattctgttgattaaatgtgttatgagtaacagtatcttgttttgctgtacttccaagcaaaatgtaattctttcagtcctccctaccgttctcactccataataatatgacttaaggtttgtatagcatgacgtttacaacgtgcttgcgttttacactgactcaacgtgtgcagtacagtgatgtatagtgaagtattcacatcctcatcttagaaatgaggaaataaattcagggaggttacatgatttaaccacacataaggaggggctgcattctctctgagcccttctacctcacacagccaccaagctcctttgtgcagagcccatggagggttggagtggccacactggggtaggtgcaggccagagactggatgcaacaggaacattgcctgcttcccaaaaccactgttctactgcccggagaacacacccttctgggagctgacttctaacaaagcaaggtccttggacttgccctgcggcttctttcctgcaagaagtatcttccagcatcctaccaacttttatttcttaaaaaaggttgttccttgccaggcattggttgatcagcagaggagctcgcattagtttcagtgcagtgttgggagcaagcacttgagtgcccagcaacataggctgctcatgatctaagattcatggaaaaagtcttctgcgctgttgcctgcagcacatcaacacctgaattttcttatcatcttgtgtggctattgaaccacagggaacccaagcttagtcaataggaaatatagaaatattcattggttcaactgtatagggagggccttgtatatattccaggggctgtatcctatcttgcctctaggtaaataagagatggtcccgaggctcaaagagtttatcaaccattctttattcttcagctaatatgaacattgaatcttttacattagaagttgcccatgcagggcacgcctgtaatcccagcaacctgggaggccaatgcaggaaaatcacttgaggccgggagtttgagaccagcctgggcaacatggtgagacctcatctctaccaaaaataaattttaaaaaaagttacccttaaatttctttctctaacccagcctcaactttgtactcaggcagtaactctttgtacaacattcctggcaccatattcagcttatacagaaccctccaggcaaggacaggtcactgctaagtgagagagctctggttattatagttcttccttaaacactgcactcaaaacgacttccttctaacgtttgtcccttggttcacattctgccctcctttcgattttttgtatggcatggccctccaagagatttcagtgtcagtgtggtgctgccaagtctgtgtgactgttcacacactcgggctccattcacacaccccaagattgcatgagcttttgctgcagccactcacagtcaggccccagtgaatccctgtcctctgaagctgcaggtaggagcgccccaagggcatctagatgtcaaagaagaggatgctcacatgtgcctaaggttcatccatgaaggcttcgtggaggaggtggcttttgggatagatcttagaaagctcagagagttttaacaaagattggtccttgaagattactaatcttttgactttataaatacttgcatatatcttcttccagtctgtctcttattttttgaccttatttataatgtcttcttaaaacaagttttaaattttgctgtagtgaaatctatatatcatttcctttatgggttattctattgttacctcatttaagaaatccttctctacttcagaataatagagttcccactgttttcttccaatatgtagagttataattttcaagtttatgcctttgttccatattgggtttatttggaggcctggtatgtggtaggaatataattttatttctctccagccaaaagtcagatggtagtcagcctttctctgttgatttgtgtcacctctgttatatactatcctgcacatgctgagtgtctttgtgggttctttcttcttttccgttgattaatttgtctatacttgtgccagtacccatggaatttattagcatagttttgtggtatgattgatagctagtagaaaagtcytctttctttgttcttttggttttgttttatttttaaagttatctgactatttatgccattaccctgtgttagttcactctcgagttgctataaaggcatccctgagactggttaatggataaagaaaagtagtttattttggctcatggttctgaaggctgtgcaagcatggcaccaacatctgctgggcttctggtgagggcctcaggaagcttccactcagggcagaaggtgaaggcggggggagccagtgcatcacatggcaagagcgggagcaagagatggggtgggaggtgccaacaagcagacctcctgagaactcagagtgagaactcactcattatcgtgaggacagtaccaagccattcatgagggatccgcccccgtgatccaaacacctcccacckggccccacctccaacattgaggattacatttcaccatgagatttggaggggaccaccatccaaaccacatcaaccctttattgtaagtttcagaactaattggccaagtaaccaaaaatgagcttgggatttttattggacttgcattgaactgagtaagtttcagagaagtgacgtctgtacagtgttaagtctcctcatccatgagcaaactattttcctccattgactcagactctttttatgtccctcagtgaaaggttataaggcttgcaccttcatttctttttatttgttagaatattcaatatttatgttccagaccacagaacacctctacagtaataaaaactgtagtaatgaaaaacacgttttaaagcagttttgggttctatcagggttgggaggggaagagtgctagcttttatttattttctcttgggtaactcttgtatcaatagtatttcatacaaatgtgacactagctgttgccaagcaaagtccttgaggcacatcacgggagacttgtgccccttggttgacatctgttccatcagcatttggttcagcagttgttcaccaaacagtaaatccactaattgcatcatgcatatgctttctttttttttttttttgagacagagtcttgctctgtcacccaggcttgaagtrcagtggcgcgatcttggctcactgcaacctctgcctcccagggtcaagcgattctcctgcctcagcctcctgagtagctgggattacagaagtgcgctgccacacccagctgatttttgtacttttagcagagacggggtttcaccatgttggccacgctgatcttgaacacctgacctcaagtgatccacccacctcagcctcccaaagtgctgggattacaggtgtgagccactgcacctggccacatatgcatctttacccacaggaggattgtagataattttgccaaatgtgtttcttaaatttagaattactttatctgtggaatattattttcctaatgaatcattcttgtttctgaagatcccttgccgtatgctatcaatagtctgtgtcctggttttcaatctaacattatggaaatcttctcctccaacacacttatttgcctgtatctagtcttctcacatttcttccatgccacatgacttctcataatttgcttaagtgacagtaggttcaacctctgattttccaatatagtgtttgatcacatcagcatttatgttaaaatctcaatccattactgctcatgaaaaaatacttgtttttaatactatgaacccgtattcagacccacttaaaaaccagcactcacaatttcgttgggagactcctgtcctgacatatatgattatttgaaaattatagtaaacaggccaggcgtgatggctcatgcctgtaatcccagtactttgggaggccgaggtggacagtttgcttgagcccaggagttcaagaccaacctgggcaacgtggtgaaacccagtctctacaaaaaatgcagaaaaaaaattagcttggagtcatggtgcacccctgtagtcgcagctactcaggaggctgagatgggaggatcacttgagcctgggaggttgaggctgcagtgggctgagattgtgccactgcacgacagagtgatactgtcttaaaaaaaaaaaagaaattatagtaaactatatttttttaatgctacaatggataaaaatggttacaactagataagaagcctctaaattgcctgaacacctaagacttatttgctagttgacatctgatctatttctgacactgaaaatttcagtgctttagggtgctaaaaggaaaaaagagggtttgctaggaatcctgcagttgctgagggggtactctgataagggaattttaagcaattacagaacatctcactaaagttttwaaaaaatctttaaccagattaaacttatacaattttkttataatttgtgtttctccaggttccaattgtggacaagataaggaccattgctcaggctgtctrtggagccaaagatattgaactctctcctgaggcacaagccaaaatagatcgttacactcaacaggtaaaagttctacttttargggaaaagaaaaaattcaccttaggctctcagaatactcagcttgacttgaggatttgtacatatcgcaccagctaacctttgcttaatctattgtatggttaacaaagatgaaggyaatatcctcgggtagagtgyaractatatttagaactttatggtgaggcatatatcctctgatccatgcatcatttacttctgtgactataaatgtgtctgatatgggtggtatccctgtttttaggtgatgtgtgatctttcatccctcccactcagccctgaatgttgaagctatcctttggagtagagctgcggagtcagatttagatgaattgcaatgcttcctcttccttacaggcctcttacttactaccttaaaaatgctagcgtggtgccagggtaggcagataggagtgcagcctataaagatgggaatgtttgctgttcttcttatgcaarcggttcactggctttttactgagcttgtccgctgagattgaaggctccatcatcttctacctctagccactgacaaaggcaagtaggcaaacagctgggaargtggctgtgatctgacagcatgcatcaccatctagtccagtgacaktcatgatcaatcaactccactayaggaggctcagccmmcttcaccaaaaggaycgtatgcctcgagtgtccctcctactttggtgtagtcggatagatagcagtcagaacactttaagagcctgytggctaaagaacttcatgatgggtagcgttgaccttttctttaaaaaaaatctccaactccttaytcttttytgtaaacccatttgaaattttgttaaatgytgccgttgccagccagggtatttgttctcctaggtttggtaaaatagtcagcaactcaggaagttctaaattcttagaattttccctgtatgttcttggcttatcctttacaaaaaggattcccaagcactgctctgtgcacaggcattgtggtgaaattttcattcatgtgcaatgaaccaagtaaaataaggtcattctcataagrttggtttgtttkttwttccgtyagtttttaataatgatatttaagactatcatttattctaatattaagtcttttctcctttcagtgttaaaatggtatttcttttatgaagtaatstggtgagagtatatggcatattggttggtttttttctttttaatatgcctactracaaaatttttacattagcaaacctgtattagttcatagaaattacttcaatatttaaccatgtctgaaatttaaaattctggcaycatttctgaaagacagttgtgattgtcactcagcaaaattcttatcggtatagaagagtggagatttcaaaaagaaaatggccccaagtccaagtcctccctgagttgataagactctaagatcttccaaatagttttaggctaagtcttatgaaaatttaactaaagatttcattccctttatctctatcaaggaaatattccttaaaagtgatgtcaaccgggcacggtgctcacacctstaatcccagcactttgtggggtcaaggcagaggatcagttgaagccaggagtttgagaccactctgggcaacatagcaaaacctccatctctatttttattttttttttaaagttagtgtcaagtatgtggttgcaatgaattagcaaagcctctraaggaacactrtgtgccatttaatcagaaccaggcttmkaggacactgtgctttttgtgagacaccacrtgtgacttcctgctctttcacctttggaactctgggtcagacatagacttyggtccttaaaaacaagaagcttaaatagtgacctcatcttagytcttataatgtaattgcagatcaaatagccatgattcatraaccaacacaaaggaaccctttgcttcctgactgactccagaatgagtgaacaacatgagtaagagcctcgtcgcagagcctttctccagactaccttgctgggtcccggatattaatagtcttggaaagtggtttctacagctgctgctttgcctgaaaatagccatgctttccccaaacwtgcacataacactgccttctcttaaagagagcctccaaaataaacaatagtcacccytgacctgctaaacagtcatcacatggagatgagtttttatcctcaccttcttgcttcttcagtgaacaagtartaacaagcagctcctgcgtgtgcctcgatctgagccggcataccwttgctgccgagactgtataaagtgcaaattgaaaagcacaggagactaacatctgtatcagtgaacacattttctttcctttctcacagggttttggaaatttgcccatctgcatggcaaagacccayctttctctatctcaccaacctgacaaaaaaggtgtgccaagggacttcatcttacctatcagtgacgtccgggycagcataggcgctgggttcatttaccctttggtcggaacggtgartgagtcacattttccaaaawccctccccattctgcattgccgtggtgcctcaaatcgttatgctccrcccgctctttaaaaatcatggattagggaaaattgggagtaattaatagtacagtattcgctatttttctaaacactgtgtctcacctacttttgccattgtgstttggatttttctttttttagatcatgtgttcagggtccttagagtcataatactaatttccttcctaaggtgagtaagaacataacttgggagaattcagtctgttatttaaatggtagaatggcttaagacagtggttgtcaacctttrtcacacatagcacccaaaatgatgtcatcacggtggggttgamtgctcacaccagacaggatctgcccagtcacccyaagggctggggaaagcagtcctcaccctctctcacttccccagcacgtcaggtgggaagctctggcttaggaaattactgaatcataggagttctcatttttgatgttgttgtgatgggatcaygttgctattggatgattattctgttattttgtgttatctatgggggtaaasgagatgggcagataaataaaagcttatcaaagtgcttaaaatccatgaagatgggcttcatttggtacagctacacagtgatagccttccgttggtaccgtcagtggcctaaatttgacttcttgtctttgggagtgctcctaaatttggtttagaacaaaaaagaattcttacaacctagcagatcccatggcaagcaaagaaaaaaatattctaacccatcattatcgtcatcattagtgcaaagtgatctgagcttaaacagcatacattatcataattttttataataaaccatgttgctttattgtgcaaacaagcaatagatagataaaaagtgcagattcttgccttgatatttacawacttcatctaatattggacacaatgttttttcaatcagcattttttgaattcttcctgcatgtgaggcacagagattttaggatgagcaggtgtgagacgcatgggtttgaatagcacagaggtatctggagagcactgtgttggtattctgaatrccctcagagcccagggggataacagctcattatgcctggggtagaacttacccaggatgtggaagaagaggggattcttcaaaaagagctcagcctctgaactggcaaaacagtgagttttgactcaaaggcaccaaagtactaatacatgacaycctctcctggggtgatccgatgtggctggagttggatgagggggggtggctggggatgggaatgggaatgggattgggatagcaggacagggtcacatggccaaggatcttgaagaccatctcatggaacttgaatctgatctctacacactggggagccacggtagggtgggttttttgtttgtttgtttcttggttttttgtttttttggttttamataaggaggagaagaatgtggtctgatgtgtattttagaaaaatagctctggcagcaatatggagaatgtttagtgaaaagagaaccaggcccagagaggtgggttaattcagctcgggccagaggcaatcaaggtccgcactttggccacagaagtagatacagagagtgggggtgaattgcagacatactctaaaagtatcctcctacmgtgggggccgggggaagggaccgttctagcttggtgactctggctagtgatgccatcggtcatggaaaggacaygggagaaggcagattggcagagccagaaatgagcctggcttgaacakagagagctcagagggttaataggatctaaggaatagtctgtgtctccactggaaatacagacacagtgcttcaaagaaagaggcaggaaggtcaccctggtgggtttaaggatatgggtgaaggcagtcgttaaacaagagacacagggatagctggaaatcagtgagaagacagtgaaggaagacacccctgaaacacccacgttaatgcagccgactcctagcaggggtgccttccaggaggcgggaaggaaggagcagcggcatggcagagaacgtccagaaaaatcccacagacaccgctcgtagcagtgttggcacagggagaagggcctggatgaaatgggttctgaatgacattttcaggtctacagttcagatcagtggttgccaggagytgggggaggggaagcgtttgactgcagaggggcaggagggaactttttgggataatgcaaataccctatgttttgacgtggtagtgattccatggctatatacattcttccagactcatagacctattcacgtgtgttgcccaggctggactcaaactcctgggctcaagcaatcctcccacctcagcttcccaagtagctgtgactacaggctcatgccactgtgccgggcctgtgyataatttaattatacctcagttaacaaaaatgggtgstgaagagcttgctttatattcgttagaatggcctcagtcagccgggtgcggtggctcacgcctgtaatcccagcactttgggaggccgaggcgggcggatcacaaggtcaggagttcgagacctgcctggccaaaatggtgaaaccccatcactactaaaaatacaaaaatttgccgggcggggtggtgggcacctataatcccagctgctcaggaggctgaggcaggagaatcgcttgaacccgggaggcagaagttgcagtaagccaagattgcgccattgcacttcagcctgggtgacagagcaagacttcatctctaaatacatacatacatacatacatacatacatacatgcatacatgcatacatagaatggcctcagtgatggccactttactcctgagctttagctggtgaaagccttggcttagggataagagggcggctggacagtgcaggcccagagagactggaccatcaggggaggtgaggggtgacggaggtgcccaaacagagcatgaaatggtagagtagctgagaaggttagcctckgtcacgatctgtcctgtcctaccctctgcggactctaaaccccgcagtagttcacccaacaaattcatkcactcggccaatgctgcataaggcactcagctcggggctacagggagccccaactttaagaagctttctctgcttcaggtagtttacaggtggtagamgcagatagaagtgaattagtaaagaaaatagtttggtgtaaaaattgtgcatttaactgaaaccttaattcactactgagcatttaatagccattaaataaaaaccagggcccgcacagtggctcacacttacaatccgagcacttttggaagccaaggtagaaggattgcttcaggccaggagtttgagaccagcctgggcaacatagccagactttgtctctacttaaacaaaaattagccaggagtcatggcacgcacctggagtcccagctactcargaggctgaaatgggaggattacttgagcccaggartttgaggctacagtgagctatgatcatatcattgcactccagcctgggagatagagtgagatctctgtctctaaaaaaatgaaakaaaataataaaaaacacaatataatttaaaatctttggagtcactaaacaaatatacaatgtgaatctcctctcactccagctaacgccaccatatccaacactaggtaaagaccaaagccgttctggaaaatcagaatctgttgccatggctcatgcctggacaccaggctgtccgctcctgacgtcactctttcacttacgacttgttagaaaatgaatgygtggaatggccctggatagctgctgcagctccctggtttcctgaagtgagccctctgtgtcattatctggtcttctcagccctcagccgagttcctcctgtggccacacacggggtcgcagtgagcgtcagtgcacagtgatgaaatctcctggaacagycgggtgtggggcatgaggaagggagtggtgcctgactacagaagttcctggaggtcaggaaactctcactggaggcggtggccctagagggctgctttctatgacagagcaggaagctgcatgtgtagtgggacacacgcaccagaggggccaggatctcctaataaggactggtatttatttttacttgaccccattctgggccttgccacagtctgctgaaatgccttgaacattcatcacccgtgtgggagacaggatagtaatttcctgctgagatgactgaggggacggggaatggggacaccagggggactggctcctgcaggtgggaaaattctagcaaaatgaatcactcttctgcttagtcacccaatgtgcacttattagggtgctgctgaaatacatattcatctatcaaytccagaaagatagtccaaactgagacctcargatcagaaagcctcccattctcctgcagggttcattcayttactcagtgaattattaaatgcctacagcacgcagggccatcagccccacagctatgagaaagattcagtccttccctcacaggccttatgatagactccagtaaataaaaccatacaggcacagaatgcggcgggctttataacaaaggcagaaagcccctcttktgtcctcaagggaggcagagaagctcccctctggctctagytggagaatcccaacccaagcaagtccatccttaaacaataaacatctccagcattgctggctttggaagaccccatggtgagatgctggagcttttttccrctccagatttcgcttctaaatatttacttttactttccatgttcacttataggccagggtttttttttcctaccattgaattatttcgtcatgttctatttaattattgcyttaattggcattggtgacsacaaataataataaatactattaactggtgtaacagcttcactagtctatttcactgycccatgctgttgtaactgaagcccccagcacaagcattcccagctcgtggtcatctaagacctttgaggtcattcttacatgcattgctagtgttttccatattccttgatggtagccaatttttccttcttaaaataactttcttcattcctagtaagcttcatatgtattttatgtattcttccctcttttttatgacgtgatacatattattgaaagctaggaaataatgcaagattcttgaacgacataataccacttagtacatctttttgtaagagatagtttttctaatacaaatctttgatatgggaagaaacaagcaagttgttttttaaggttttccaaccctatattctactacaaattaccctgttatggtatgcttccaaaattctttcaaggattatggtttatagagttcaataaacctaatagtttataaaacttctcaaaaaataatctcatgccaaaaataatttagtagtaggtggtctttgtcttgtggtcacatggttttgatattgtctttaagtttctataatttacaagggctgtttaatcagttggcataaatttcatgacaaaaatactaatatgtaagcaaagwatatgaaacaatattattgagaagtaaattacattccatgtagaaaaagactagaaagacaacaccaaaaccttaaattagacagtgttattatgagtagctttttttcttctctttttccatatagatcaaattactacattgggcgtatatcacttttataacatgaaaatacagtaaatagggcgatgataaactgcaagtgcttggggagaatgcttaactcaggccagttgcaagagagtgagaacacacacgcagcctgtgggagcgggctccatgccatcacctggccggtcctggctgtgttgctgtgttttcgcacctcaaaagttgggacagcraagaaaggccataagagctagaacgtttccataagaagtgtattcagtatgatttgtctagctctgactaatgtgtgcaaaccccacattccactaagcaaatgcaagattgtttttccctgttcatttgttcctgggcccttcttgcttactgtgttgggagttggagaggggataattgacttctttcttctcacagtgttttctcttttttttttttttttttttttttgagacagagtattgctctgtcgcccaggctggagtgcagtagcatgatctcggctcactgcaacctccgccttccaggttcaagtgatactcctgcctcagcctcccaagtagctgggactacaggtatatgccaccacatctggctcattttttgtatttttcaaagagactggggtctcaccatgttggccaggctggtctcaaactcctgacctcaagtaagccactgcgcccggccatctctcacagtgttttttaaaacaacaatgcattttcataacagttggcctggagaggtgtccgaccaagttggaattcatagtagaatccattggaagttaatttttgatgtatttgactgttttccattgacttcgcattgaggcagtgagagagacttgaagaacttagaatacgcacccttttgtcactggcaaacatgggacatagaggcatgtcttgacagcaatttgtggcaacactctgggctggaatctaggggttagacagcctggccggttttgtaaattagatagccaggccaccctcagagtcagtttgagggttgagtgggaagcctgaataaaaagagaagttaaacttttaagaaaagggtcaagctttaaaactggaattgggttttcaaatttaatgaggaaaaagaaaccccaaaactggaattgtaattgtggagaaatacaactgataatatttggaatatcatctacaaggaatgaaactatccagaagcatttagatggtagtcagtgccatgtagggcacctctgggggcagggtggctcctggcactgtggagaaagacgactggtgcttccttctcccaatcggaggaaagggatacactgtggaggtcccagcagcttagggcctgccccccatgtggttatctctgtgccgtttccttccctctgtcttcctgtaactccttcactttggcccctctgccctttctgggcagagggtgacaggaggcaccgcatgggtacattctttttttttttttttcttttttttgagacagagtctcactctgtcacctgggctggagtgcagtggcgcaatctcgactcactgcaacctccatctccgggtttcaagcgattctcctgcctcagcctcccgagtagctgggattacaggtggccgccactacgccccgctagttttttgtatttttaatagagatrgcatttcactatgttgttcaggctggtctcaaactcctgacctcgtgattcacctgcctcagcctcccaaagtgctgggattacaggagtgagccactgcgcccggccaactacatgcttttttcctcctgtcgggattggcctgggctgtacctatctcatggtggaaacctgcccagggaccaggccctagaagaccagcagtttatttaactgggttggcctttgtccccactccctgtgacccggccctgccacatctttacccaggtgcaccactgacatcatcgcttggctggactctggaaagcaggaaactgctggagcgtgtttggggcatcagtgatgtcayccgctacgaatgctgggtggggttactggactgagggccatgaaaaaagaaagctgcggccccggcccgtggactcactgccattctgctctttctcacgtttcagttcagctcggtttgttttccgtccccctccctctactgtaaaagtatgtactcaktgtttcgtttcctgctggatctgattcaggtcagtgatgaagttatttgtgaactcagtggggaggtgtttcctcccctttgtaccggccctacttagggatgcacggttggttatacgcttgcttcactcggttaggcatggaggagaattcattcagccctcataggtttaaatcaaatgcatgacccttcacattttccagagatttacggccagttacaatgagacaattaaacattcacccccccgccaagctgcacttggagatgtgtaagcagtaatgtagtcatgcgctccccatgatgtgagagcgtgcagaacgccactccccccagcaggtccgccaggacctccgcagggagcatcttgcctgcaaaatcacacatccctttttccccctctctccactttccctactacttttccactcccacacccacaaataaacaaagaaaccttgagcttattttacaaaagtctttgaaatggccctcgtctctccartgctcctgggycctggtttggccccatctgtgcaatctctctgatgagtgtgaaataagccaggtttggctcatgctctgccggtgagcttgccctccccatgagcctgtcctctccatctggcctcactttgtttgtgtccctgtgtcctttgtctcccatcctgggatcctggtggtttcctcctcccctcccagcatgagtccttttccccagggttcttccctatctctacatcagaatttcctgctttctcccaaatatgcatttccctggcccaggcatccactgcttcctctcatcgtgaggtccctgccgcaggctgctgatggtattgtggccatgccttcctccacaacccagggaaagctacgtgtgtgtctgtcccatagggaaggagtcatccctgtctcctcagtgtggtgtgttcaggaggaaggaaagtaaccagcgtcgttctcaatttmcagaaactgtttatcatattgacaagaagaagaaagctttgtgactcatgagaatgatgttttcytctctggtacataaggttatctaggtccaatccatttgtgtagaggatcttctctcccctagtgtgatatgcacttatttttagcacaagtataaaactactttaaatgaaatcagcctcagccagggaaatatgctgagtaataatgttgccaggtactataccactgagttgagtttgtaattcactgctattaatmcctgtgtattagttctgattttttactctttgcatacatagaaaaatggtgtttctcttcagagtcaaggagggaaaaaaagaaaagataaaagatgcttataacacttttgtgtccacccctaaaatcagcatattgatctattattttttctaggtattgatgagatgttgactcatatactttcatacaactggtaatatatatatatatataatatgtgtgtgtatatatatatatatatatatatatatatatatatagactcatttttcttccactttcatctacagcctacttgttttcttccccccatttttcgtatggattcatagcataaattgacaacaaagatacatctcaatttagagcttccaaaaggcacccataaaagtatctggtgctcatggaattgctctttcttctatgtctcttagttacacttttctcttattacacttttctatcccagccatggctaagaggcgtataatcagaagcagctaagcaatatatgcaagggaaataaaatgaatgcaaaccaagataccggttttgtaaattagatagccaggccaccctcagagtcagtttgagggtatagtgggaagcctgaataaaaagagaagttaaacttttaagaaaagggtcaagctttaaaactggaattgggttttcaaatctaatgagtraaaagaaaccccaaaactggaattgtaattgtggagaaatataacggataatatctggaactcgcggcagtttacaggcttaactatgtatgtgttccttaaattatccacccgcagatatcagattacaataagtcctcacttaatgtcattgataggttcttggaaactaccactttaagcaaaaagacatgatgcatatgaaaccagttttcccatagtctaattgataggaaaaagagttaagttatgcagccacacagtacctcgtttggcttaaagtcactgtttccaagaacctatccacaatgttaagtaaggacttaccgtatatgaaaatatttgcagtaaattgcttttgagagaattggttatcacactcttctctgggtatcattgaaaattcagaatgtttarttacatcaggctatactcactggtatraaatcagggagcaagtataaagtaggtgtagggaaataatttatgttggattaaatgatccaatgaaggrattttattaagcccctagaagtcccagaatgaaaatgtataactgcatgactaacccctaagaatttgctggggtttctgcattawgtacgcttcccaggccatttgtaatgaaggtaccgtgatctgttaaggaagagacctacasctgggaacawaaasagccaattccatcctrgacatcagtctcctgtttgactcattccaaccccaagaatatgttgtagagtgtaggacccatgaaagttacytactgtgcttccctgtaccttccrtcatccagttcccaracatatctgtgtttcttctctgaatgcctagtwacttgggatcccatgctgtattggtctgttctcacactgctgtaaagaactacctgagactggatagtttataaagaaaagaggtttaattgactcagttttacaggctatacgggaagcatggctggggaggcctcaggaaacttacaatcatggtggaaggcaaaggggaagcaagcmcatcktcacatggcggcaggaaagagagagagtgaaggggcagtgccacacacttttaaacaaccagatctcatgagaactcactatcacgagaacaacaagggggaaattcacccccatgatccagtcacctcccaccaggcccctcctccaacactgaagatcataattcatyatgagatttggctggggayacagcgccaaaccatakcacatgcctttcccaggactggtgatggaggaacggtgcccttgtcacacctaccagaatatactcacccacctccagacactccatttctctttcaagcacacctcttcacttgtgccgccagctaaggtttactgcagttacttcctttgtgtgtcctcttaccttaccaagtcgcctcacccaccatctactgttaattaaattaccacctcccccacttcccacctccagagtagagactgtgtcttcagttctcttggccttcccacaatgggaagtccagtgtagaacataccctaggagccaactaaatgtgctagtggcctgccaaccctgcagagggctagggaatcttcaaggagtctgctgccagtgaaactcaccagtactagaatcccaggctccaaagaagtctagaaaagtacatcttttaaggaggtaataagaggctyaagtgcccacaaatcctatctgctcttggcctagttcttttgggatcaatgtgctagtctctcttgtcgaaccagttactgaccagcaagactaaaaaaccaggcccaaacacattctattcatgtgcttagatatggacctacggatcaaatatcccactgtaaagcaaaacagcaaactgtttttcccttgtactttcacactcaacaatagcacgcttctgtggctggctgtgtgggggcttttccttacacaccaaatatttctcacaaacaccaaccaggtgtcctcttattcaattcaatcctgacactgtctacctggagatggtgtcggatcccacagattgacggctcagtcccatgagaccagccccacttcaggcactaattgcaaatccaggccatgcatacttctctgactgcctggctaaaaaccgcrttcacagccgggcacggtggctcatgcctgtaatsccaacactttgggagaccaaggtaggtggatcacttgaggtcggaggttcgagaccagcctggccaacatggtgaaaccccatctctattaaaaatacaaagattaggccgggcacagtggctgacgccagtaatcccggcactttgggaggccgaggcaggcagatcacgaggtcaggagattgagaccatcctggctaacacagtgaaaccctgtctctactaaaaatacaaaaaaattagccaggtgtggtggcagatgcctgtagtcccagctactcaggaggctgaggcaggagaatggcgtgaacccgggaggcggagcttgcagtgagcggagaccgcgccactgcactccagcctgggcaagacagcgagactccgtctcaaaaaaaaaaaaaaaaaaaattagctgggtgtggtggcgggctcctgtaagccaagctactagggaggctgaggcaggagaatcgcttgaacccaggaggcggaagttgcagtgagttgagatcctgccactgcactccagcctgggagacagagtgagactccatctcaaaaaaaaaaaaaaaaatgggttcgcatgagccccctccttgggttcaattaagttcctaggatggctcacagaactgagagaaacacttatttacagaggtgttatgatatatattgattttcgtccatggttcctggttcctgaatcccataaaccttcttacagccttttgttataatgttgggggtgtcacgcctcaggggcaggcctctgaccttccctgccctccttgcactgtaatgtttcccccatttctgattgtgagtcttaagaccctcccatgagagggtcccaccctacaccttgtgggaaggaatgtggatgtcatgaagtgtccataaaaacccaagaggacagggttcaaggggattccagatagccagacatgtggagcttcctggaaggcagggcacccaggtcgggcatggaagttctgcacctcttcccccatacctcgccctacacacctcttcatatgtgtcctttgcaatatctttttgttgttgttgtttgtttgagacagagtctcgctctgctgcccaggctggaatacaatggcatgatcttggctccctgctacctccgcctcctgggttcaagcgactctcccacctcagcctcctgagtagctgggattacaggcatccaccatcatgcctggctagtttttgtatttttgtagagacggggtttcaccatgttggccaggctggtcttgaactcctgaccttaggtgacccgcccgccttggcctcccaaagtgctgggattacaggcgtgagccaccgtgcctggcctgtagtatcctttataataaactggaaatgttaagcatgtgtttcctttagttctgttagctgctccagcaaattaatcaaacccaaagaggggagtcctaggaactccaatttgaaaccagttggtcagaagttccagaggcccagacttgcractggtatggtggggggcactcggccctgtgggatctgacactatctctgggtagacagggtcggaactgaactggaagccaccccacctggtgtctgctgcttggtgtatggggaaaccccatacacatttggtcacagaagtcttctatgttgatgactgttgtggtgcgacagcagaggaaaacayggtttgaggagagcttttcccaacacgcttatgtgtgccagtttattatagaagacacagatgaacaccagatgaagagatgcatagggcatggtctgtggagttggggttcacctccctcctggcacaaggatgccttcaccaacccagaaactcatcaagtcttgttcaaggatttttgtagagcttaatctccactccccgccctccacccttcctggaggttgatgggtggggctgaaagttccagccctccaatcttctacttacttggtctttccatcctgaggctagctggaggcccaccccgtcactccattaccttaagctcaggtgttattgaaggagctccttatgaatagagcaaaatcacccctatcagaaatttcaagagttttaggaaacctgtgactggaaccaaggacaaagatgaaatatatttygtatgatagcacacccaccagattggatcgtggggccatatggcctttagtgtggaagctgcttgaccacattttccgcccatgcactgccattctcatttcaggctgcgtcatcatcatcatcaccatcacctgttcttagcaaaggtcgcacaccttccaaatgctttgtatagattagctcatcactccccatactcaccctgggagcatagtcagggataagaggtagagttctagcgctctgtggctactatggtttatgggatctttgcgcaggaataactggactttaaacatcttggcttttcttttcagtaggtcagtcggcatgtactcacagggccgtgcatgctgagcattgagacacatcacaagggagtgaaaacctgctgccatacccccccagaggcagcaggatgtttggataaataaggcataaacacctggagaattaaagcaagtacaattagtgcagcctttgccaagagaaaggtgtaagtgctaaatgcagtagatgttcaaatacggcagagaccacagtgggcagggtaggccaagaatgctgcctaaggagtggggcttggggtgaaactggggcatttgagacactgcaggcccatcaccctggctgcgccctcctgagggaggcagggactgaggcgggaggcctggagaggtctgtgcgtgagcctgggggctcattgataaggagcttccagtgggggcaataacattggaagtggagaggatggcatgtgtgccgggagacgcagtggagtggaagtcgccggaactgacaagggatgggatgtgagcaaggagtccaggtgagtcctggggacctgaaaggatggacccagagagataaacgacttcaaaccggcacggcagtgaagtgactgacccgcgagtgccctgcaccgaggctgacatttgacttcctgccaagttggccatcagacagttagaaatcaattttggagttcaggagagaggccagagctgaaaattggggagttgtttacattgggagtgatrtacagtctctacatttccatccagttcaaaacattcttgcgtgtctgctatgcactgtgcactgaggttaccaagactggaaagacccaatccctgtcctggaagcttagtgttggcaggaggcagacaagctgatacatgcaaacaaagggctcacaggtgccaggatgccaagggatacagaagaaggatggttgcttctctacccaggagtgccctgaggtgtcttaaaaagaggagcatttatgactcaggcagggtggcacattccagacggcagtgggcaggagcctgactccagagcgccttagaggctgccgctgggagttgagctggaccctgaaggcagtagggtaagccataaattagggttaaggaaccaagggaataaggggatcagaccattgcatagctccagcagcaccattactagcagcctgtgtgaatgatggtcccctcttacatgcccaccatgcaagggctctaggccattcttcactctttaatgcagaaaagcaaaacttccagctgttttcccctacccaaaatgtgtgagcctgagcccagccccaggatggatcttgtcctaggtaaccaagaaggccttaagtgtcagaagaggtagctccaggctgaataaagggacaaatgaagcattactgcactgagatcgcccgtcgtggggtgggtctatacccatctagtcattaagcctcaataatttggtttctaaatggactattatttgctacagatcaaaagttgttggaaactatattacacagataaatagaattgtcctgcaaataaaggaagtaatctcttctctgtttgagataccatgcagtatttgtccaacttgtacaaatagttctgatccatgagaatcctccactttcaacttacttgctgctatatcccaactattataaggccatggagaccagtagcctggtttccattatctttgctctgtttttttttatggcatggttgacactacctccagtagcaaagagttaacttgtcatcagagctataaaatcacaatgataagtgaaaagttctcttttgtactttagcatccaagagaagtgtaattcccaactacaatgctcaaaataatagagagtttttactttgggcctgaaaatacttataggtcaggtctcctagttgggtccatgctgttgttggtgttccctcccaagtaaatacatactgaatttarcaaattattcatttgtgatcctctgtgccatctaaaaatatatatagtttaaaacgctggccaggcgcagtggctcatgcctataatctcagcactttgggaggctgaggcaggtggatcacctgaggtcgggaattgaagaccaaactggccaacatggtgaaaccccctctctactaaaaatacaaaaattagctgggcatggtgttggactcctataatcccagctactagggaggctgaggcaggagaatctcttgaacccgggaggtggaggttgcagtgagccgagattgtggcactgtactccagcctgggtgacagagtgagactccatctcaaaaaaaaaaaaaaaaatgcttatcattgcacagatagctgtacagttttttattatttatgataacggtaactgactttttgttaaagctggtttggaatctggaggttattttaattttgataactttatgattttaacttttaattttaactttatgatgtttgtcataaaagagtggaatgtgctcctattttgagatggaaacatttcggcagggagagagaagagagacaccaaaccacctaacagccaggttccaaggggagattcattcagcgtctttgaagcattgttagttttcatttgaggcataaattggaaacttatatctttctttggagtaggaagtatttcagacagaaaaaaaatgattgctacaacaacatcacgaaaaagaacagaaggtttcatgaagagtaataaagttaagtttatgaattagagcttcagatgggaaatcttatttggacagtaaatggttaatggtacagggacaccatgatgggggatctttgcagcattgaaaaaacacgcgtccataaatccttctctagcacttctttgtgatcacagagtcaagctgaggacaatgatggagtgctccagttcatccgaagtgcacgagtcccctttgcagcagactctgacattcccggcccctctccggagtgttatcaacatgcagtcagtgctctctacgtcattactttaaaaacaaaaactcggccagcagcagttcagtacatcttcaaagatcttgacttgtaattttttcccctgcatcttctctattgagcacatgaactgacatctttctacccccaaataatcagttctttccccctaaataaaatgggtaatccaaaaaagacccatcaaaaggaagctaaagatagtaatgcctaggtagtttcgggaccagaatgattgtctctaaatatgtacatgtacagtgattacgtgtttaaaatgtttaatgacttggagaaatagtgtgttgagtggagaaaaatgagatttagtagagcataacgtcaacagtgtaaaaatacatagaaaagcaagcaggaataaaggaatgtttaaataaattacaaagataaaaattaaaaccgtaattcagccgagcctggtgggtcatgcctgtaatcccagcactttgagaggctgaggcaggcagatcacttgaggtcaggattttgagaccagcctggccaacgtggtgaaacctcatttctactaaaaatacaaaaattagctgggcatggtgttgggtgcctgtaatcccagctactcagaaggctgaggcagaagaatcgcttaaacccaggagatggagtttgcagtgagcctagttcgcgccactggactagactaggtgacagagggagactccgtctcaaggaaaaaaaaaaaacttaactagaacatttattgagcacttactaggtgccagctagtgctctgagtgctttgtgtgtattaactcattaatgcccccagcacctcttgaggtagattaaaatctccatctcggttttacatgcaaggaaaccagagcaggaagagcttcaggaacttgccctcctagtaaagatagaaagtagcaaacccaggattcaaccccagaaatattatatactatgtttgtgctgaatcttttttttttttttttgtttttggagatggagttttgctcttgttgcccaggctggagtgcagtggcgcgatctcggctcaccgcaacctccgcctcccaggttcaagtgattctcctgcctcagcctcccaagtagctgggattgcaggtgctcactaccacgccggctaattttgtatttttagtagagacagagtttctccatgttggtcaggctgttctcaagctcccgacctcgggtgatctgcctgcctcggcctcccaaagtgttgggattacaggcgagagccaccgcacctggcctttgtgctgattctatagtcttattttcacatcctatcagttactgtaagtaactcttgattccaagaactgtmtaatargaaagggtagcttccaattatctactcttgcttgataatgcattaattccacatagcctttaaaagtttagtaaattttaggataaattttcgaactgttatttcctattggctgttagaaaattgtgttgctcaaaggggaacatgtctattgtgccttgtggagattttcctacagcttttctggctgacccgtcacttgcactctggaactctcctaaaccagatacggcccaccacgtggcatggtgtggatcctggactttctgtcatccgttaggttcatattcttgaagcaagtctagaactattttctgagagattccctggctgttgttctgtgtttgggtgggttagtcacctttttaggtgagagacttgatttgggtacacagtttcacaaaagtattgtcaaccctgctggccaagtgactgacgtgctgggcatgggagcacactccatcggcatggcagagtggattcactccatgccattgccagagaataggactttgaaccacagccacccggctttttctgaaaggcctgcttgggcaatgatgcctggagaattatctgaagaatgcagtctgtccattcctctggagatggtctagtttttatccccagaccaagctgaacctcttagagctgtgcatttatattgtgtggaattgccttcagcgacgtgttctataacgtcgtgttcttgtcaccttttgagggacactggtgctgtggggaagatcctcaccaatacgcaacagcagggccctgttctctcacctgccatcccctctggaaagctcacagagagggtttcctgggttgctccttttccaagcaggacttctactgtagacttacagctccagttacaagcctgtgtgcttgtctgtttccccacaaggtgttctgacctgggagggaagggacggaatcctattcatctctgaatcctaaatgccaggcctagcacttggcacacagtgggttccagttgtggaatgaatttttttcagtcctgacaataaatgttggggttctttagtttgtttgttgttattgtctgttttatttgtattttggggttttttgctttttcccccagggaatgaaaatgccttctccatatgaaccagacatatcctggggctggggctgagtgtcctttgttgtttgctctaattataactaatgaacagttcagctctggtaattgtaggcttgctggacccagtgcctgccttctaactgaatcttgactctgctccattatgtattttccatgatcctgatttctgtcaatstaatttttaaatttcattctaaggcaaacctgctcatgttcttcgctgaaatcaacctcccctttctggaatggacatatggaaaattggaggcaaaatataataatggtggtgactcagactgctttaaggcctgagagaccggccaggtactgtggctcacgtctgtaatcccaacattttgggaggctgaggtgggtggattgcttgagcccaggagtttgagaccagcctgggcaacataatgaaaactcatctctacaaaaagttactgggctcagtggtgtgcacctgtagtcccagctactcaggaggctggggtgggaccatcgcttgggcccaggaggtaaaggctgaagtgagctgtgattgcgccactgcactccagcctgggcaacagagtgagaccctgtcttaaaaaaacaaaaagacccatgagacctagactccccctgtcaaaaatactcacacacacacatatacgataagatagtatttctaccttttctttctcaaaacattccacagaacagtcttaccttcgaggagagccgtatgcatgaccttttgtttgtttgtttgagacggagtctggctctgtggcccaggctggagtgcagtggtgccatctcggctcactgcaacctccgcctcccaggctcaagtgattttcctgcctcagcctcccaagtagctgggattacaggcgcgtgccaccatgcccagctaatttttgtatttttagaagagacagtttcaccatattggccagactggtctcaaactcctgaccgcacattatctgcctgccaccacctcccaaagtgctaggatttcaggcataagccaccatgcccagctggaggccttatttttactgctattcagagaacctgtggcttatccatggagggcttaagctttgccttttctcttgctcatttccatacctagcaagagcttaagctggwttattgcactgacattctaatgaaatataaatagcttctcaacagagagataagaaagaggagtatctagtacagcaagaccctctgggtgggtcagggccagctggggccgtgccggggctctgagtggaggaggtggcgtgggagcactgatgctcgggctctgtcacatccgtttttggcatttgtcctggcaaaggctgcatttctgatctttcagaaagctgtgggtacactgtacagaaatgtgttttgcttgctttgaaggatgacctactggctgacagccagccagaattaattccatatacatttgcagattttcagtatgagagacggcaattagcctacagaaacccatttaacccccgaggtggagctgtatggtgaagactgttatttatgggagtctgtgtaatttgcctctgtgacaagggacagccatggctcaggagggcccacgccaccctccttttcaaggactcctgcccctgcctgagtggcttggcctggcctggccatgtgagtcttgtggacacgtgcacatcagtcagggacccctgtggtatggaccaaagggttgttttttactgttttaasttatttaatagcatctcatcagtattacaggcatgtgccgccacgccaggctaattttttttgtatttttaatagagacggggtttcaccatattggccaggctggtcttgaactcctgacctcaggtgatcaccccgtgtcagcttccaaagtgctgggagtacaggcgtgagccaccgcacctggcccacagagcttctaaaggaaatgtgttggttttttaatcaaagttgaggcagtgcctcagtgaggggcaggctggagcagtggtaagcgcgctgaaggagtcgggctctctgggcccaaagtcctgccctggccacagagtggctcccttccccctgaggtgggatgatgttctccagggccttttagctccaggctgctacagttctaaactggtggtggtggtggtggtggtggtggttgtggtggttgttttagatgcagtctcactcttttccccaggctgggatgcagtggcatgatctcggctcactgcaaccttcgcctcctgggttcaagcgattttcctgcctgcgccaccacgcacagctaatttttgtattagtagagttggggttttgccatgttggccaggctgctctcgaactcctgacctcaggtgatccgctcacctcagcctcccaaagtgctgggattacagatacgagccaccgcacctggccatgattgttgtttttataaaatcagaatataaaatttgaaaatgttcttttttggtgagaaatgagaactaccaaaggagtaaaatgctctaaaagccatcaggtccttcccacagtattgaggctctgctcttaccattttgttaaataagttttgttcctaacactctttgtgatatgaagtattcttgctaatcaagctgcccggagactggcgtttcccagagcagtttcgaaagtggaaatgatgctgcatttcctacccacagtctggagggtggctgtgctctctgcacggtgggtctgtgctgctcagttacgggatggtaagggaaggctctaactcggtgtcttacaccatgcactagggagtcgcccgctttatttacgagcgagttgatgctttcagtgggttttggctttgcctggttccagactcaagcccttcctctaatgtagggcgggtacaagagagacttgagcaaggatattgggatttaagggaagggcagtgcaggccaaggtcagcaagaggacatctctaagatgaacagcactgcatttgtgggaagcaaccctgccataaacaactcagttaacgtttacatagtaaataattgcattgccttgggctggaatagggacgccagaaggtataggaccatgtggaattcagaaaagggagccctgaagaatgagattttattgttcttaccaggagagtccaggtgctagagttctctccttgtaagtgactaaccttctcccttttggtacacaatcctcagatgaacggagatgattcattaggccattctagcttaatggatgcatcactgtgcaaccacgcaaatgcctcatttctgattcactcatttaatatttattgaggagtgctgggtactaggccattagaaraacaaacaacaacaacataggcctggaccttgcacttgcagagttcacaggctagagaggcacacaagttaaatatagagacagctgaaagagctgacrtctgggacagagggagccccctgctccaggagccagggagcagatgccatggggggctggcagggatagggaagtcaggccaggaatggggttacctaagccggatcatgaaggacgagaacagactcaccaggggtcgagggacaaggaggcagcaagtccgcagcatgaaggcaggagagaacattgctgtaagcctttaccatggccactgcatggggaggaaacaggagatttggaatgagctrtgacactgggcaggaaagcaagacccaggtcttgtgaggccttgagcgtcaagcttaggagtcaggacctggggattttaagtacagcaatatcataattacattcatgtttcagagagatcactcaggcagcagtctggaaggtggagtggaaaacggagaaattagtcatgaagacctatttagaaagtagtaggcaagaaatacccagggcctaacctgaggtgkaggcaggggatgggaatgagagcaattaccgaactagaatgaactaaactcaatgaacaggagcggggaagagggaatgcagaaatggctctcagatttctgacttgttcgcttaatgactggggttgtcatttgtttagataagcaataaagaacctagaaacaattttaggcggaagatagttgtgttgggagcccctaagaccatgatttattacagcacaaggatacaaagcaaaattagcaaaaggaaacagcacgtggggtcaagtccaggggagctcaggcgcaagcttccagagtactctccccatagagtcacacaagatacacttagttcctccagcattgaactatgacgacacctgaaatattgtctgcagaagaggctcattagagactcagtccccaaggtttttattgggtaatggtcacgtaccaaatttcagtctctcagaacaaaagcaaatgttcagcatagaccattttgtttgtgaaatttaggcacagtgagcccctcttgtcagttagaggatagttgaaaccctcccacaatccaagttctcagactcaggcctgctacattatttctttcctacacagtagtggatttggttactaacatgttggatctgaagcatttgttgtaatttacagtgaagatgtccactgcacagttccgtattgagtctgaggttcactggagacatctgtgctatcaatgaaagtttctggagtcattagcccctcaaagggtcattaaaaccaggtcttctagagagaaagtctaaccctgtattcctttaaaccaccatagagaccatctagttcttcacattataaaaatgagaaaactgagtccccagcgatgtggcttggttgcacatttttctatttcaagtctgttactccttccatcataccagactgcctcacaaaatgacaaagtcaggcattgttcataaaagaacaaaatggcatttaggttataaatcaggcccttgtaagtttggttaatacaacttatttcccaaagatcctggtcctcagaccctcaaaaggagagctgatcacatcaaggcctctacctggaaggaatttctaagcagcctctaagtcaactgttcatgttcagtccaccttgatttacaaagaacagtgaatcattaagacctttctctccaaggccgggtgcggtggctcacgcctgtaatcccagcactttggaaggccgaggcgagcggatcacgaggtcaggagatygagaccattctagctaatacrrtgaaaccccgtctctactaaaaatacaaaaaaaattagccaggcttggtggcgtgcacctgtagtcccagctactcgggaggctgaggtaggagaatggcgtgaatccggggggcagagcttgcagtgagccragatcgcgccactgcactccagcctggagaacagagactccatctcaaaaaaaaagacctttygctcctctttgctcttgtgtctgtttaacagatttttatgttaacaggcactctgtttgccactaggaataaaaagataaatgggacaaagtctttgccctcaagttacttatattctagagccaagaaagagatagatgaagaacacatcttatatattaggactgtgttgggggcaggagtaggcagagtaaccctttggatatgggaaatgaaaataaatcaaactcaaaacaagtttattatttgcttgaagctctggtaaaagataaagtgaaacctgcaaactgtaaaatgaagttgctgctacacatttctccagttttggatttcattcttggatggcctttaacttggatagaaggatacaagacagccatatatatatatatatacagctgttgctctttaagatatccacttcaccctgttgtggggtgggaggaggggggagggatagcattaggagatatacctaatgtaaatgtcgagttaatgggtgcagcacaccaacatggcacatgtatacatatgtaacaaacctgcaccttgtgcgcatgtaccctagaacttaaagtacaataaaaaaaaaaattaaagaaaagagatccacttcgctcagcacatgtgatttggctttggtctttggtgttaatttggatgcctaaagaactgactttccttgatgctcactccagcctttttaggactagattggatacatttacatgtttgctggctgttttttctacagtcacacatcctacccataataatattgcaatattctaagttgtcttggaggatatcatcaagtaggtgtcaagtaaaacttaatggtagactgtaaattttaaaacaagttacaggtcatttgtgtagtctctctctctatatatattaaaagaaacaaaacttttccctcttgaatctttattcctatctcagcttcatttattgcctcgtttgtcatctaaatggtctttgttctttcagctttcaaacatgattaattgacattgtgcagcatagcacagggaaaaggctgaatattttgtatgatgagtaatctagttaaacgcccatctttcttttcaactttaccaacaaatgtgtcttatgcagatgtaagggcggtttgcttatttccctgttcaaaattttatgctattagcctagcatagcatgtttcttttccattgagctagccaaaaataatattgacaaattcatgaagccttccatctgatactgttgcaaacttatgcaaatgtattttagactgttaagggaatgtaagaattaaataattaaacatccaaatgtcaagaatgggataggaagaagtaactggcctcatgttggaagttaatgaaatatttgaaaatatacctttaaaatcaaagacatgaatttgtgttttgggtttttttttttcagatttgaataaagcagagtataatattatagttgctgcaggaagttatgagcatttctggaagtgcttattttcagcacatgctacttagaattttaaaggacattcagtgtatctttgtcatgaatctttctactgggaccaggccactcctggatgaactcacagattgagagcttctcaaaatgtaaaatcaaattgtcttttaaaatatgctattttaaagttctggagaatcaatgarmwttrmatgaaaatcggccaatacttggcaaaaagtcaatttgaagagttgtctctttataatctctgatttcacttatagagcttgcttccaaaaaaagtactacgtatgtcataaatctgaaatgttttgcttttatgccatttttaagtcctgataaatattcttgaagtgttaaattattattattattattatttgagatggagtcactctgtcgcccaggctggagtacagtggtgtgatcttggctcattgcaacctccgcccccccggattcgagtgattctcctgcctcagcctcccgagtatctgggattacaggtgcctgccactgcatccggctaatgttttgtatttttagtagagacagggttttaccatcttggccaggctgttcttgaactcctgaccttgtgatccgcctgcctcggcctcccaaagtgctggaattataggcatgagccgccgtgcccagccagtgttaaattatttttaacttgttagaaataattgtcccacaacttactgaaggttggtttaatattcactattgttcccaaaaaactcttaaaatattaaaccaactcatagctcataacttttcaaggtagcaagtgtttgctaatcttaaaatgtgttactattctttttttgttttttttttgtttttttgtttttttgttttgagatggagtctccctctgtcacccaggctggagtgcagtggtgtgatcttggatcactgcaacctccacctcctgggttcaagtgattctcctgcctcagcctccccaagtagctgggattacaggcgtgccactacgcccagctaatttgcttgtatttttagtagagatgaggtttcaccatgttggccagactggtctcgaacccttgacctcaggtgatccacccgccttggactcccaaagtgctgggattacaggtgtgagccaccatgcccggccactattcttaagtgaccttctgcacatctctgtagttttatgcctggtgatggcgtttaatttaggagtatctggcatgccactccagtctgacagctaggggcatgttagcaaagggggcatttttcaggtgagtgggtgagcatagccgtgctgaccatctttcctatccagagggaaggcctagcagggactcacgccatcttgacttgcctgccccaggctccctctcactgctcccctggcctcttcctcttctccagacaatggggccttatgctcgctgtgtttgtcagaactctcttgtggttgtggctgcaagtaagagaaactcaactcgagcttattcagaaagaggggatggattgacccagataacagaaaagtgctaggctagatctggccttagccacagctggatccagccttctggcatttgtgctccgttcctcagccctgccccactgggagtgatgccttctgttcacagtgtgatctgcttcatactcaaaactccctatccagaggaagaggaatcttttctctcccaccatctgcacagcagtattcaggaatcccctgccaggctctgttggcctcatgtgccctgtcctaatccaccactgtgcccagccagggtgtggccatacatgcccatcctgtgcatagggcaggagcagacccacctgcaccacatgcggtggccgccatgaccacragaccaggataggagtgctgatcaggccagaccccaagggctgttgctcagaccatacctggcctgtagagtagaagaactaaatgtctcacacaggcaaagactactcttcaattcctttaattgcaggtgtatgttggagtccatgaaatacaaagttattgagaagcataactaaatttatagtagctcctcattatatattttcatgttgataggattctgcccccatgggaattaattttcttcatcaaaagygatctccatactcacaaacactgaatagctttgggcttttaaaamcaatgttttggctttaaaagaaccacaggaggctgggcgcggtggcttacgcctgtaatcccagcactttgggaggccgaggcgggcggatcatgaggtcagaagattgagaccatcctagctaacatggtgaaaccctgtctctactaaaaatacaaaaaaatcagcctggcgtggtggcaggcacctgtagtcccagctattcaggaggctgaggcaggrgaatggtgtgaacccaggaggcagagcttgcaagtgagctgagatcatgccactgcactccagcctgggcgacagagcaagactccatctcaaaaaaaaaaaaaaaaaaaaaaagaaccatggcaaaagtgtcctttagccgggtgcggtggctcacacctgtaatcccagcactttgggaggccgaggcgggtggatcacgaggtcaggagattgagaccatcctggctgatacagtgaaaccccgtctctactaaacatacaaaaaattagccaggcgtggtggcaggcgcctgttgtcccagctactcaggaggctgaggcaggagaatggcgtgaacccgggaggcggagcttgcagtgagccaagattgcgccattgcattccagcctgggcaatagagcaaaactccgtctcaaaaaaaaaaaaaaaagtgtcctttagtctactgttggttcttccaaagagccatcctttcgctgatgctttaggaactcccaacctgggtcctgtcaaggataagctctcatcttattcccacaaaattcctagagttactcatcattttcctttcatattcagctcattaaagcagtttgtaggtctctgtagtccatattagtaagtgttaaaaatgtatcaatttgattttttttttttttttgagacagagtcttgctctgtagcccaggctggagtgcagtgttgcaatcatggctcactgcaacctctgcctccygggtttaagggattctcctgcctcagcctcctgagtagctgggattataggcgtgcaccaccacgcctggctaatttttgyatttttagtagaaacggggtttcaccacgttggtcaggctggtcwtgaactcctgacctcatgagccaccgctcccggccatcgatttgattattataaaatcaggttatattggtttgaccagttaaaaacatcacaggttatttaatctttttatttatttatttatttattgagacagagtctggctctgtcacccaggctggtgtacagtggtgcaatctcagctcactgcagcttcgacctcctacgtccacgcaattatcgtgcctcagcctcctgtgtagctgggattccaggtgtgcgccaccacacccagctaatttttgtatttttagtagagaccaggcttcaccacgttggccaggctggtctcgaactcctggcctcaagtgatccacccgccttggcctcccaaagtgctgggattacaggtgtgagccactgtggccagctaatcacttttttaaatcacaatttgtgttacgttcatgagtaatgggtgccagaaataatgttgtgtgttaaacataaatgtagatgggtaaccatgtatacaaatgyatatctcctcaacccagagagtgaaatttccccaccccagtgaccctgcctcgctgtatggttcattcttctccaggaattgaaacatggtggcagcctgccagcttggcgttaccattaattcttattctcttcccctgccgatgtcatggggacaccagccaaatgaactctgatgtgtctcacgtaatgcatgtggacttctggtgcatgtaaacagagggtggttattcttgattgcacatttgtgatttttagtgakgctctaagggagaagcaagaggacttgaataacagatttattctcgggcactgstacatgaaagagatgagtaatgccaaacaaataacacaattctgattcacgccattggyaatggaggagacttctgggtaaacaaaccaaagtaacagctagaatgcagatctgatcacagcagtgtgttttgattcagtctaaagatgacaaagaaaagtttctgctggtcctatctgtagcaacaagggcctgcccgcctgaccacactgcagtggaacagccacattgtgattttgcgggcctgaagcctttcgtctggtgaccctttaagaggaacttgagccaagatcttatcagtgatggagatggagacacctcaggattttccagtatcgtttttcactttttgttcttggacatagttaataacgctgccaggtctttcaaatgctgaggcatttcctcatagctccaagtagctgctgcgggtcagattctgcttgaaccgagggttcaattacaacatccgtatgctttccagcccactctctgacctttgttctttttttcagtactttttcaggctcttaatgtttccatccactaatctcaggagactctgtaaatattctgagtatacatagcccaattacttttgaaaagctaatttaatagaaacttcttgatatgaattgaataaattttttaacttaaaaatcatttacttacaacttaagacagttaaacttgagagtatttgaaagctagtaaacttcagagctttcttcagtaggcacgaactttaccatttttctgacactcagcacggtcagcaatgacacattcattggaggactcatcaatatccctaaaaatagtagcagtactcgtgcacagcctgatttcttttgaacttggctcaatttcttggaagcattgatcatgggatcccgctttgattccttttctgtagactagtgccagtttgcccagtttcattacatttttggaaagagctaaaactatggtatcgttttattgcagtcctcacatcaatcataatttggagcagtcttggtgaaagatgaggaattcagactgggatcctgggcaaggcaggtccagggggcaagagggatggaatgcagtgagtacttattttatatcataagtacagccacctcagcctcatgactttttagccacggcttcattccaaagtgaccacagtcataaggcccaaaactatcttctctctctttctctctctctctctctctctctctctctctctctctccctccctctctctgtcatagggacctccctaatcctccaggttgtacagccaggaagggtaaggtattgtcaaaaacaagtgaggtacccccttgatagctcagtgggccagagggcctctggatgctggctgatcatggcaaaaactaaatacagaatccatacagtggattctctgtgctttttctcttcacccctccttacccttgaccaaatttctgactgtgttattttcttattgcagtcctccctgctagatatacaactttgactttcatcagaagaaagtgctcccattgcattattagctaaaccatgttgcagtggcaacgctccttcttccagcttgcctcggtgtttctgtagttagcatcaggtgtccttggttctgtttaccagcctgtccagggatcacttccctggtgggatctctctggtgaccctcatctcagagctcagcggtgcctttggggctacttgccagacaactccatgtgacagagggccaggtccaagtgctcgatcaccccagccaccatttcagagttctcggattatagatccctcaacgagtcccagtgagacaccgaacatgccatagaagctatgtttttctatttcagcacacagtaaaacactacctcttagatgtcgatgagtacatgctgcttttatgttgacgcagaggacctgtgttgactcttcatcggcaaggtgtcttttttttaagtttcaattgacacataccacctctggcccaagtggaccacacagttatgcatgccctttggtgcaagatacatcacgtctccaagaactcgggtgtttttctgatcatggagaattagattccacatatagcttgtatttaggatctgcagattaggttttataaattatgttyggcaaatgataatccacaaagtagattctaagttaaaatactataaagtactataatttatgtttaaatgtctttcaacctgagagttactctcccttagaagtccccaaaaatgctgaaaccacaccaggttgatatctgacctttcacttttggaaaatgtgtatattgttgaacctctaatctagattcggacaccatcaccaaccagcttctctctttcagttgccatctgcactttactgtttagtttttgttgtctttagggaaagttgtaaaatacccacattcttctcaagttcttcaagtcttttggtttttagtaaacccttttgtgacmttgtctttgagaacagaggtcaacaaacatttccttaatggactagatagtagatatatcaggacttgcagaccacatggtctctgtcctaactactcaactctgccgttatagcacaaaaccagccgtactcaatatataaatgaatgaccctgtggctgtgttccactaaaacttcataaaaataagcagctggccagatttgctgtgtgggtcttagtttgccaacccctgatctagaagaaaagagttttgtgtaatgtttgggtaataaaataaacataccaaaccatctcaggaatccctaaccttttcctcattgggaactattttcccagtatccccaagtactggtgggaatgagataaaaasggccaggcatgccattccctaaagcagatagccaaccctctttctttccctgtggaaatcccctctgcctacagggaggagaagcaactggtttggaagctgccagccagtccgtttatttagaaaattctaagccsagttccagatcactttgcgtcaactctaaaatacagccgcaaatgaaataaatgttgtttataatcctaccaagtctagtaggtgtgtatgtgcttgaggttraacttttgtgtaagctccagacttactttaggtttatagaaaattacatcgcaattgatacaatggttgtgttgggtgatggagatagaaagagggagaagaagtgaaagtgaaattttggtcaaaattggataccaccctaataagccgggagataaggggtgctgcagaactgttttctgtgatacagtgcatctacattgataatttgtgttttatgtacttttaaaatgaggctttattggcttgatttctgtgagaaaaatcactaatgggctgatcgtactgctctacttcaacatgcaagagaattgctcagacgcttgtcagatgcctgaaccacatacttatttgagaatgtgccatcataggaagctttcattcaccaaggtcaccgagagggcagcccagggaagcacgttgaacttcacatggttctggccactcgtgtcagtagcaaagcaaggaaataaggagctgacttgcccaaaaattacaagttcagagaaaacggacttgttttgtttggaaaaggcagataacggagcagtaactaaagaatcctctttttttattattattgttgttgctcaatttataaacctaaacagaaaatgtgtgttgccttatttcctcttcttttctacagataactttcttttaaaacattctaaatattaagcaacattrtaagtacagatttttttttttttttttttttttgagttggagtctcactccgatcatccagmctggagtgcaatggcgcgatcttggctcactgcaacctctgcctcctgggttcaagcagttctcctgcctcggcctcctgagtagctgggattmcaggcacccaccaccacatttggttaatttttgtatttttagtagagatggggtttccccatgttggccaggctagtctcgaactcctgactcacctcagcctcccaaagtgctgagaktacaggcgtgagccaccacrcccggctagtacagaattttttatggccccttttaaagactgcaaacctttttataccaaaaaaaattatttttcctgtatttattttacacattagtaaatgaatgaaattttggctctaggtttagaaagcaatttcattttaagctcattttactgtgtcattggactttttattaattttattcttgaactacttagctgaaaatcgaattctgtcattatatgtaatcatataatgcttctcataatgttacactttaattagatgcagttgaataataacctaaaaaatcttcatagtctataaaattcacacttatatttataagacaatattatctcacccattgatacataatgttatgttaaaagtacacaatatggccaggtgtggtggctcacgcctggaatcccagtactttgggaggctgaggcggcagatcacttgagcccaggagttcgacatcagcatgagcaacatgttgaaaccccgtctctaccaaaaatacaaaaattagccaggcatggtggcgcacatctgtaatcccagcaacttgggaggctgaggcaggaggatcacttgaacccaggggacagaggttgcagtgaacagaggttgcagtgagcggagattgtgcctcctctgcactccagcctggatgacagagtgatactctgtctcaaaaaataaaaagagtacacaatattatctcacccattgatacataatgttatgttaaaagcacactgcattctagagaaggtagagtaacagggtcttactttaccctcccacttgaaacaagtaaaaaactggacaaagtatatgaaaaatacatcactcagggcattrgacaccaggcagcaaaaaacagtggcccctgagaaattggaaacaaagtgagtcctataattgtccttatctagaaaaagtttcctggctactgtgtagagagaaggaacccaggagaaagagctcaactgtctccctgagttgaagacagagctggggatacatcaagggaaaccaaggcagctagtttgcagaggtggaggaccggagaggagagaactgcatagagagagctttgcggatgtacagagtcctccttgagcatgcaagtgcrtactgatcaaagtgtggttgtgagaaaactacccatcaccagagaaaggatcacccgaaagaatgagggaacagtgcctgcctcccacacagtagccaagaagaggtgcctgttgccaacagctagagtgaaaacctctgaatgcaggggcactggttagaatactaagaaggktcttgccagacatccaatccaaaattagcaggcatgcaaagatctaggaaaataccacctaaaatgagaaaagtcaatcaaaactaacccattatacagatgatagaattcatagacacggacattaaagtagttgttgtgactgtagtttgcatgtttaagaaactagaagaaggatttaacatgttaaatagagacaaagaagatataacaaagatataaatcaaactgaagagatgaaaactgcagtgcctgaaatgataaaaaaaaaaaactgttaattaatagcagattagacattgcaaaagaaaagcctagttaacttaaagacatgcagtagaaactatctgaaatgaaacagaaaaaggctgaaaagaagcaagagagcaacattgagctttgggatcattttaagtagccaaaaatatgtaaaactagagtcccacaggagtggaaaaaaggaactgaaaaatatttgaagaaataatgggcaaaacgttttcaaatttgatagaaactataaactcatacattcaaaaaaatgagaacattttaaaaagagaggataaatgacacattatgtagagaggaacaaagataaattggctgatgatttcttgttggaaacaacacaaactagaaggyggtrggtcaatatttttaaagcagtgaaagaaaattcacagcctagagttttttacctggttaaaatatctttccaaaacaaagctgaaataaagactattttagacacgtaaaagctgaaaaaattcatcactagctaacctgaagtacaaaaagtgttacagaaattcctgctggcagaaagaaaatgataccagttgsaaacctgaatctacccaaaggaatgaagaacaccaaaaatagtaaccgcatggatagaaagacttgttcttactgtttatcttaaaagctattactgtatacagtaattactgcataaagcaaaaataataaaaatgtagtatagcgttaaaaacatttagaagctaaatatatggcaacaataacacaaagtctaagaggagagaaatagaagcatgcttttgtaaaattcttaggctatatgtgaagtagtataactatatgtggtgtggtagtataattatatgtgaaggtagactgtgcaaagtgaaatgtgtatgtagtcatgtgctgtataataacgttttggtcaaaaacaaaccgtgtatacaacagcagttccatcagattataatactgtattttttactgtaccctttctattgtatgtttgcatgtataaatacttaccattctgttacagccacctactgtattcagaacaataacatgctatgcaggcttgtagccctggtgcagtaggctgtaccatacagccaaggtgtgtaggaggctataccatctaggtttgcaagtacactgtatgatgttcacacagtgacaaaatcacccagtgatgygtttctcagaatgtacccgtctttaagcaacacagkactgtgctgtaaatgcaaggtaaccatttcagtaattcaacaacgttatagttaaagagttgtaaccttgttatagttaacaaagttaatatatagttatctacaaagtagataaaatgaaatcattaaaaataatccagaggaagcagaaaagggaaaaaggaacaaagaacagataggacaataagaaaaagaatagcaaaatagtagatttaaactcaactatatcgataatcacactagatataaatgtcctaaatacactaattaaaatgcaaagaatgtcagattggctaaaaatgcaagagccgactattactgtcaacaagaaaccctttttaaatmtaaagacataagtaggttaaaggtaaaaggatggaaaagcgctaatactaatcaaaagaaaattgaattggtatatcaatatcaaagtagaactagagcaaagagtagtaccaaggatataaaagaggcttgtttcattatgacaaaggggccgtttcacgaacaggacatagcagttctaagtgtttaagcatataataacagagcatcaacataaatgaagaaaaaaaaagataaaattatagggaaaaatagaaaatccacaaatatagtcagaatttkttaaacccctctcagaacaagtagagtaaaaatcaataaggatttagaagacttaaacaatgctacaattcagcttgactccacccaacaacagcagattacgcattcttttcaaacgtacacagaacatttgccaaaatagaccatattctgagtcacaaaatgtcttaataaatttgtaagggctcaaatcatacaaaatatgttctctaaccacagtgggattaaattagaaatcaacactgaaagacatctggaaacactccaaatatttggaaataagctacagagtgggagaaaatatttgcaagttatctatttgatataaggatttgtatatggaatactaaaactcaaaactcaatgagaaaataacgcttttaaaagatgactgaaagatttgaacacatatttcacccaakaaaatacatgaaaatatgcttaccatcacaggcattagggaaatggaaatttaaaccacagtgaataccgctrcatagctattagaatgtctacaattaaaaagattgrccagctaagcacagtagctcatgcctgtaatcccaacactttgacaggcagaggcaggaggatggcttgagcccagcctggacaacatagggaggagactctgtgtctacaataaaagaaaaagaaaattagccagttgtggtggcctgtagtctagctgctcacttggraggatgaggtgggaggattgcttgagcccaggttgaggctgtagtaagctgtgattgcaccactgcactccagcctgcaagacagagcaagaccctgtcccaaagaaaaaaaagattgggctgggcacggtggctcacagctgtaattgcatcactttgggaggctgaggcaggtggatcacttgaggtcaggagttcaagaccagcctgggcaacatggggaaaccccaactctactaaaaatacaaaaaattaattgggcatggtggcacacgcctgtaatcccagctactcgggaggctgaggcccgagaattgcttgaacccaggaaacagaggttgcagtgagccaagattgtaccactgcactccagcctgggtgacagagtgatactctgtctaaaaaaaaaaaaaaaaaagactgaccataccaaatgttggcaaggatgtggaacaactggaaccctcatacactgctggtaggaatatataacagtaccacccccttggaaatcaatttggggtcgtttcttaaaaagttaaagtgcacctgccatatagtcaagacattctctttctaaatatttacccaagagaaatgcagtatatgtccatgtaaagatccgtgcatgaatgttcgtagcagcttttttgtaataatatacagtaagctttacactttgacatgtgcagtttattgtatgtaatttgcctcaataaaagttttaaataatacaattttatccaaaataaagttgtgaaaagtagaaaaatgaggaaaaagtttcaaaggttagaggggtcagtccaggagacctaacatctaactaatgggaattccaataagacagaagaaaccagaagggaagaaattatcagagaaataatcctcagccttccacccaaaattttctctcctagaactgaaggactcccaaatcaaaagggtcagcaaaataaatgtatagactcacaccaacacacttcatcataatagtaaaaagaacagtagagtcaaaaagaggatactaaaagctttcagagggggaaaaaacaaaacatgcaaataatctggaacccgaatggcatcagacttttcaacrgtaatactgggctgggtgcagtggctcacgcctgtaatcccagcactttgggaggccaaggcaggtgaatcacctgaggtcaggaattcaagaccagcctggtcaacctgatgaaaccccatctctattaatagtacaaaaattagcttatttcttaaaagccagcaagggggatggttttttccttgggctggtggcacgcayctgtaatcctagctactcgggaagctgaggcatgagaattgcttgaacttgggaggtagaggttgcagtgagccaagatcgtgccactatactctagcctgggcggcagagtgaaactgtgtcttaaaagaaaaaaataaataaaagttatcaaaaaacaaaaacaaaaccrtaatactggaggctagattacaatagagcaatatcttcaaaattcaaggaaaatggccaggcgcggtggctcacgcttgtaatcccagcactttggaaggccgaggcgggcagagcacgaggtcaggagatccagaccacggtgaaaccctgtctctactaaaaatacaaaaaattagccgggcgtggtggcaggcgcctgtagccccagctactccggagaggctgaggcaggagaatggcatgaacccaggaggtggagcttgcagtgagccaagatcgcgccactgcactccagcctgggcgacagagcaagactctgtctcaaaaaaaaaaaaaaaaaaaaaatcaaggaaaataatatacccagctaaaccatcatgaagtgtgataagaataatgacgaagccagacattttagaaaaatctacccctagcgccctttttctcaagaagccactaggggagtatttcactcaaatgagcaagcagaggaaggaggattgcttgagcccagcctgggcaatgtacagagaccccatgtctacaaagaaataaaagaagaaaattagccaggtgtggtggcctgtagtcctagctactcactcaggaggatgaggtaggagaattgcaagtaaatgagcaagtaaaccacagaagaatattaattttctcttttttctgctgcataacaaatgagcacacatttagtggcttaaaacagctcacatgtattatcttccatttctctgggtcagcttagctgggttctctgcttcagactgcgaaaattgtctcatctgaggcctgggttcctcatcaaagctcatttggcagaattccattccttgaagttgtgggactgagggcccagctttttgctggctgtcagctggaggccacacccaggtcccagaggccatgtgggtttttgccatgagaccttctccttcgtccattcacagcatggcagcttatttcttgaaagccagcaggggggatgggttttctctggaatctgttagatgragtgacctcccttcactgtcactcgtgccatattctgctggtgagaagcaagtcacaggcctcacctgcactcagggagggactcactgggagtcgccgccacagtgtggctccaggaatggaaactaccacactgcagaggtgcagggaatccccaggattatggtcaagaaagagcccactaagtgttttgttcagtaggcctgcaggatgaagggtgccaggaggatggctccatgaaagactgagcctatacgtgaacrtactgaaagctgacttacagttcagccagtgtggtggtatgtgattgacagcgccctagcaagatgagcaacaaagatacaagactccagcagaaacaagctgcagaagaacaggagtgtaatcaataaatcagatggccttgctgtgaacggttacatagctctgataaatcctgatctaaccaaaagtcatgacagctygatatttgggagctggagggggtggggagtaggggtagtaggatatgaaggagctaagtccccattgttgatattagaaatccagtgggtaacatctgaacggcaagaccaggacagcagcgaaaggcaaaaagacaccactgagtgttgacagtggctgcctttcaggagtgggaatgccactgggggcagggcagtggggggcagggaacaggtttttctgtttgttttttgtttgtttgtttgttttgttttgagatggagtttcactcttgttgcccaggctggagtgcaatggcatgatctcggctcacagctggagtgcgatggcgtgatctcggctcaccgcaacctccgccccccggattcaagcaattctcctgcttcagcctctcaagtagctaggattacaggcatgcaccaccacgcccagctaattttgtatttttagtagagacggagtttcaccatgttggtcacgctggtctcaaactcccgacctcatgtgatctgcccacctcggcctcccaaagtgctgggattacaggtgtgagccacttcgcctggccatgggaacagtcatgttgcatagtaagccctaaagagcagtgtgatctcttaagccagcacgtgatttactttggtaaaaattaaattaaaaaaaaagaaattaggccaggcgtggtggctcacacctgtaatcccaggactttggagagccgaggtaggcggttcacctaaggtcaggagttcaagaccagcctggccaacgtggtgaaaccccgtctctacttaaaatacaaaaaaaatagctgggcgtggtagtgcacatccataaatcccagccactcgggaggctgaggcaggagaattgcttgaacctgggaggtggagatttcagtgagccgagattgcgccattgcactccagcctggatgacrgagtgagactctggcccaaaaaagaaaaaaataatcctattggtctcatagtgtttctctgtatttttaatatactgtgtatgtgcttatgagaaaccgaaagagaagtgatttgtgaacgatttgaggacttttggtccacgtttttttctcccacttatacttgtggcataatccagaggaagaagggcagctgcggagtcccagcagtgttgcgggtatcagggcagccagtgagaggatggaggagaaacccaggagagggcagaggaggagggacagctgtgcccacctggtcctttcattgttgtctgcctctgcccttgcagttagaaaaagagtgttctgtgtatagaagcctttgcaagtagcatagttaggagtctttcggtccaggaattgaaggtgctaaagcaggaggaaaacatacatagaagaaaggaaatgtccacataagtaagtgtattagtctgctagggctgccgtaacaaaagaccatagactgggtggcttcaacaacagaagtttattttattttctcacagttctggaggcrggaagtccaagatcagggtgctggcagggctggtttctgctgaggcctctcttcttggcttgcagacagctgtcttccctgtatgtcgtcttctctgtacacaaacatccctgtgacctcttcctcttcttttaaggacactcagtcctattggattagggccccatgcttatgacctttttgggttgttttttgtgtttgttttgagatggggtcttgctctgtcacccaggatggagtgcagtggcacgatcatggctccctacagcctcgacttcctgtctccaaatgtagtcgtattgggggattaggatgtcaatataggggttttgaggggatgcagttcagtccattatatacagtaagccacttctagacccagtctgaagtcctgagcattcagctggtatctggagtggatcacctaagaaacattacagaacaatataggcctctggtatttaaaatagtttaattacgtcacagggtagtcctgaattctttcctacttcagccagtcttggccagccgagtttcagggtagtgatgagcactgatgaggtgactcccccttctccaaactcttcctttgccactgtcccaagaaaaccataaaggggaagtttaaatgatggatgtaattttcctgacttgggctgggcgcagtggctcacacctgtaattccagcactttgggaggctgcggtgcgcagatcacctgaggtcaggagttccagaccaggctgggcaacatggtgaaacgctgcctctactaaaaatgcaaaaaaaataaaaaataaaataaaaaatagccaggcatggtggcacacgccagtaatcccagctacttgggaggctgaggcaggagaattacttgaacctgggaggcagaggttgcagtgagctgagatcttgccactgcaccccagcctgggtgacagagactgtctcaaaaataataatgatttccctgtcttatgtttttctactacacagcttattatctctgggcaggagctttcccagggtcggaggggcaagggtctagttgtgagggagagaggtgaaagcaaaagggaaatgctaaatgacatggcacagcaagcaaggtctaggcagctgcgcctttgataacaagctgcttgaagagaaagaccagatcggctragtgaaagcactgtccatcctccccaccccttccttcctgcttcctcctcttcccatctcctccagcttctccttaaagggactaccgaatgatgatttccttgccagtaggaccttgacataaaacccarcccacaacatcacagttgattttcaagggatgagcttctcagaaaccagaatttaattacttaattttgagtttccaaacaataaaatatattattaaattgatttgttttccacacgtagtggagattttcatggtgtgctacctgtcggtcaaacggctgatgaatgagtatgtcgcaaaaactctaggtgggaatatgacacatgaggaatggaatttgtgcttcagctcttcccagcatcttcttgggctgcacaagagttggtagtctttcatctcctaaggactgaagggccatttagaatcacacctgttttgagtttatagtcacgcttctgaaactttctctcttacagccttatctgacctcaatcaagctacccctgttcatttaaatactttaggtcttggctattggtttagcttaacatttgattgccataaataagaactacagaaagcgtgacttgtaaaattgtagacccagaaaaattagggaacaatctcataatactaatgaaaccttttttcccataaaataaatacataattagatatagaagattttttttttggtttaagctatcttttcctatttctatcttaaataatttacaactctcctttaatccaggcaattatcaattctataataaaataacaacaatgggtactgtgtattaaactctaaactagggtccttcatctcatttgaattttgaaatgactccataatatattgttatactcatgctgtagttatagataaagaaygagggctgacctttgacaatcacaatmaaaaaaaacaaaacaaaagaagtgaaggctgagcgaagtaactcacccagcaagatgcaattcgtatagggtagagtcccctgtctcccgataatgctttgccccacacctgaaagtcttgatctggttcccattacccctcagactttgggtccccagtagaacctttgcacttgcagttctccttcctaatgggctcagggaaactcacatgactgcctggaggctgtttctgcacctgtagatgggaatgggcaagtctctcccgactcacttgtctcatagtgttgttgaaaggctcaggtgtgatcattacagtgaaataaggaaaggcagggaagaatctccatcattctccaaatacgaagaatgaaatgcaattttttttttttctttttgagacgaagtctcactcttgtcacccaggctggagtgcagtggtgccatctcggctcactgcaacctctgcctcccaggttcaagcgattctcctgcctcaacctcccgagtagctgagattacaggcacctgccaccatgcccagctaatttgtgtatttttagtagagatggagtttcaccatgttggccaggatggtcttgatttcttgacctcgtgatctgcccacctcggcctctcaaagtgctgggattacaggcgtgagccacagcgcccggccacaaataagtttatacccttgtagtcatggcctttcttttatctttctggtaatgaataaaaatgaagcatataagtgacagagaaaccagctacttgatcaatagtggcattgtttcacaattgtctgtattggattttgccaacccactagagagttaccaaagcacatttctgacataactatgattgatttttttttaatttttgactaaatatgttactttgactaaattggttacttcattgcataatggtgaccatttacacttttcagataggtacaaaaaatctgtgtattctagctggccatgaaagagtagcaagcctgttatttttaagaaaaaagctcgagtagttactgtatttgtatcattttggaaatctctcatttttctaatcagcaaaatggggataatgtaaataacaataaccctgacctcacagggttcttgggattaaatgagatatggtgcatacaacgtgcttagcatggcgcctggagtatggtcagaacttaacaaacacaagttataaatgaggtcccgaaatacaagaaattcacttcctcagaaaccttccttgagcctggctacatctatagctacattttctacatgttaaatgcctccctcagaagtgtcactgttggagttgccagggcaccaatttattactttgaaaatagataaataaaagaatcaagacaaaagaaaaaggtgctaccaaagaagacattctgtcttacactggatcacacragatgtggatatttggcccggaactgctcacatgggtcagcaagcctgagaatgaccgtggagagaaatggctggggctgcaggactcagccaagcctggcacgcgtgtcttccgggcaccggagcaggacgttgtctgaaaacatgaagaatgaaatggaagtaatgtaatacctggggtcggggctgggggaagctttctaagtacaggcagggtctttctatgttgcccagggtggtcttgaactcctggccccaagcgatcctcccacctcggcttcccaaagtgtggggattgcgagtgtgggccactgtgcctggcctaattactgattttaaatattaatctttctaaaagtcaaactccagaactgtgcatgtagaactatycaatttctgtatataactatagaaatatatattagacgggccgggcgtggtggctcatgcctgtaatcccagcactttgggaggcygaggcgggcagatcacgaggtcaggagatcgagaccatcctggctaacacacggtgaaaccccgtctctactaaaaatacaaaaaattagccaggcgtggtggcgggtgcctgtagtcccagctactcgggaggctgaggcaggagaatcgcttgaacccgggaggtggagcttgcagtgagccgagatcgcgccactgcactccagcctgggtgacagagtgagactccatctcaaagaaaaaaaaaawawatatatatatatatatatgtatatatttatatatgtatatacacacacacacacattagataagcacattgtttatataggaatcaaaaattacctgtgagtaatttttatttatgtaatttaataattacataaaaattatttgcagaggttacctctggaagcagtattagaagtggaggacttttttcttctatgttgaaaatattttaagtaaatttttaaaaacgaatagaaatttaatcaggaacaggctttctaccattaaaaaactttatagtcttctttacaaaagaagagaaataattgtacttgttcagtcattcaaggccactgaaataattggcatagcttgagctctgtagtactgtcacaatatgcaaacacagtgtggtaatttttatagtaattgaacatgacttacgtcttagaaagtcataagttaggaatttattctgttcgttcttttgaagtgaaaagtaaagaaagcaaaacattttttggccgggcgcgttgtctcacgcctgtaatcccagcactttgggaagccgaggcgggtggatcacctgaggtcaggagtttgagaccagcctggccaacatggcaaaaccccatctctactaaaaattcaaaaattacctggccatggtggtgggtgcctgtaatcccagctactcgggaggctraagcaggagaatcacttgaggccaggaggcagaggttgcagtgagcagagattgtgctactacacttcagcctgggcgacagagcgagactctgtctcaaaaaaaaaacaatgactttgacctgaatgtcccaagggtctgctttgtgtagtctgcccctctacaagcagggaccaggtcttggtcacctggtgtccttgtagtaagctcttagcagggactgggtcctggtcacctgggtgtcctkgtagtaagctcttagcagggactgggtcctggtcacctgggtgtccttgtagtaagctcttagcaaaggttgctgagtcraatgaacttcaccgtttcggtcctttsgtacagtaacaggcactcaagagagtccacgctgtagggttgatcagccaccatgagagagaagtatactctaagagcacacaccatcaaccccagagcatccctgccraccaggaatgtagttacagcggtgcaggttcccagctaccccaragaaatcccaggagagtccatctctactaagtcaagcaaatagaaattgcaactgtagcagcacaatctattttcattatatagtgtgtgtctctctctcccctcatctctctctctctctcctttcccctcggtcacttgacattgatactgggmcatttatcctcgtgcatcatcttagagttacatttgtataattatcaacatggccatttgatataaacaattccgtccctcacatccaaagaaaagggaagagacagaaagaaaaggcctaatttctgagcaatttttgttgtttgtttcccattttgtaattgtcctccatctttactcatctgtttttttaaatattaattatttttttgagacagggtctggctctgttgctcaggctggagtacagtggtgcacatggcttactgtagcctcgacctcctgggctcaagagatcctcccacctcagccccctaagtaactgggaccacaattgtgtaccaccacacctggctaatttttgtttgttttttgtagagatggggctttgccatattgcccaggctggtcttgaactcctgggctcaatccatcctcctacctgagcctctcaaagtgtcaggattacaggcgtgaaccaccatgcctgaccaaaaatactttctgagggtctaatattgccaggcaccgtgttaacaattcagaaaatactcctgcttaataaataaagacttgaatttttttagttacttcattgaaaagaaaatctttttatttaaattgtatcgtcagccaggcgcaattgctcacccctataatcccagcactttgggaggccgaggcagacgaatcatttgagtcaggagttcaagactagtctggccaccgtggtgaaaccttgtctctaccaaaaatacaaaaattagccaggcatggcggcgggcacctgtaatcccagctatttgggaggctgagacaggagarttgcttgaacccacgaggcggaggctgcagtgagctgagatcacgctgctgcagtccagcctgggcgacagagccagaggccatctcaaaaataaataaataaataaataaataaataaataaataaatawtaaaattgtgatgtagttaactggtataatcttttcagttatttttaaatttttgaaacaacacgctgtatatcagccatccatcagagaaggaaagaaatatgtagaaggactgtcttctgcttcagatcatgaactgtaggaacaaaatagatatgtgtaaaaatgctgctccttttctgaaccaaaataaaattagatttttgttgttgtggttgttgttggaaaaggtagtagatttcaggcaaaatcagaaaataaattatttcagaaacacaacaaaactaagtacaacgatattttggttaagaaaattatggttagaaattatgattctatcactttatgaaacagaatctttaataatttttcagcttataccaaggatattcttttatttcttaatgactagttttaaatatatgactrttctctctgtacagatttttaattaatgctcataaaggctattgatagaactcattctttctccaaaatggagttaacccgaaatgggtagagattcagaagcttcattgtagttaaaattagggtcatgaagggcaaaagcccaggtatttcagcctttgtagaagaatccattaatgcagcattacaagtaagtgtaatttagtggctccttagttattttaagcaagaggcctccttaaagggcacacagataaagtcaacatagatctccactgaccccaggcgtgcggccagaggtcaactcccaacggctgtctgggctcctttttccctgcagtgctgtatgtctgggggggtgacaatcctttgataacagttttttttattgggagaaaatttgtgggaatgcataaggtcttgctaacataattccacattatgcttgctcaacaggagaagttttagtttaaatgtagacttattggagatggctgtatatctgcaggtcagggagtctcgcgtctgcagattctttgtggtttctcgtctgtcgtcgcttatcccaaataagtagctgcacttcttggaagagatgattgcgtcacttgaaggggtcatgggagtctactgattgaactcatttttctcccatctgaaagaaagaaaagttgaaaacaagaggaaagacatttcacactttctggcatttaatatttcggctagtttttgtttgtttgtttcttttttgagacagattctctctctgttgcccaggctggagtgcattggtgcactctcggctcactgcaacctctgcctcccgagttcaaacgattctccttcctcggcctcccaagtagctaaaacgacgggtgctcattaccacacccagctaatttttttttttttttttttgtatttgtagaagagacagagtttcgccatgttggccaggctgacttcaagtgatccgcccgcctcggcctcccaaaatgctgggattacaggcatgagccactgcgcccggcctggccaggtttagatcctggttttgtgaaagaatcagaatgactagaagattcatgttccgatccactgcagctaacaaatacagctccaggaaccgcacaaatcctgcatcgcctttcatcagcagatagttaaaggcggagaattgggttttcttgtttgtaaagatagtgcgtgtaaacaagcatgcagtaaattatgttatctgcagtagagtcttccattggtagctttggtcagacgagctgaaatacactgccttcagggttcttcttggtttgtcaccgtgagtagagatttgaatttacactgcctcatctgtactgaattctgcccttgctgtgaatcatgtcacagtctcagaagcagcagcagccatagagtccagtgacatccttaccagtaagatacctttgacctagagagttcatttcaggggtggggcagcatcagtgtggctaaatgtgaatattcatttctttttcttaaactataaaatgcttgttcttttccaaatccatagctaggcacagattatagaggcatcttaaaaagccttctatagctgggtgcagtggctcacgcctgtaatcccagcactttgggaggctgaggcgggtggatcacttgaggtcaggagtttgagaccagcctagccaacatggtcaaaccctgtctctaccaaaaatacaaaaaattagccgggcatggtggcaggtgcctataatcccagctactcgggaggccgaagcaggagaatcgcttgaacccgggaggtggagattgcagtgagccgagatcgtgccactgcactccagcctgggtgagagtgagactctgtctcaaaaacaaaaacctcctataaatgccataagatgccggcaaatgccatctcaaaatgcagttaggcaggaaaattacctggtatgagttgtaacctaggcaactggaaaaaaatatgtgtccaccagttacccttgtgtttgatgtttcaagtagtagaacagtataagtgtggttttctttctggggtctcccccattgtatgcactcactgtagtaaccagaggaaaatgttaccttcctgctgggaaccttaacttccgaggctgtgatacccatcttcatacctaaagttttaacatatagcaagtccccacctacaagcaggtcttatgtcaaaagtgtagttgcagtttattgcctggaacccggaatggattttcccataggcgtgttatgaacggcagctgtattccaggcagctgtggaagcctttttagcccatttatatacctgaagtgcagtcatgtgcaattagcaagacaagaaccagccatcatccatcacaatgttttatgtgttcccccagcctccccactcccactctcagttggcccagctaggcagggaagggggtgttaatgaggcctgcaggtgcacagatttactccccacctgctgcatctgcaggggttaaaccggcttttccctccccttcgctctcaccattccttctctccctctccccacccccagtctccctttccctgtgctgaaggggctgggcagtgaagtgaggaagggtggctggagctgttgggggctgaggccacattgtgcagttcacatcagaaccccctggggacttgctccagttgcagattcaaatgcagcaggtctggggtgggctctgaaattccgaatatctaacaggctcccaggtaatgcccatgcacaggcccacaggccccatttgagtaacaggagtctctaaacaccatgcagggaggagaggctggtgaagagggaaacctcgagtcacgactgaaaggcagtggagggtgagagctgagttctattctctaggccttagggaggtcccttttacactgagaactttttgccacatgggaagaagcaggcaaaccctggatgccatcaggtgctggcacatcgcagcctcatctcatgcaaggtgttcttggccagggcctgtggaggttctacatgatatggcattaaccctcgggagagcaggcacagtagaacctgaatgtctcctccaagcgactgggtgcagcatcgcyccatgygactgggtgcagcatcgccccatgcgactgggtgcagcatygccccatgcgactgggtgcmgcatcgttccatgcgactgggtgcagcatcgttccatgcgactgggtgcagcatcgccccatgcgactgggtgcagcatcgttccatgcgactgggtgcagcatcgttccatgcgactgggtgcagcatcgccccatgcgactgggtgcagcatcgttccatgcgactgggtgcagcatcgttccatgcgactgggtacagcatcgttctatgtgactgggtgcagcatcgccccatgtgactgggtgcagcatcgttccatgcgactgggtgcagcatcgttccatgcgactgggtgcagcattgccccatgtgactgggtgcagcatcgttccatgcgactgggtgcagcattgctccatgtgactgggtgcatattgctccatgggcatggtttgtatgaaacactcactattaaagcacagtaggaaatgctgaaatggaaaaggaatgggtcatccgggagccccaggatctagaccctggagcagtgtttcagggcctgaggatccgtcaagggggccagcatcagaagccccagcacacagggggcttctgatgcaggaggagagtgtgcggtttgaagatctttcatcccaacacagcaaggcggtgaagaaccagttttcatcctgtctccaccactaactagccatgtgtccttgagctcataccctcatgcctaagtgtcctctgtcctcatccgtaaagtaaggctaaaatgagtacctacctcattagggtgctgggaagctcaatgagattatttctgtaaaacccttagactgtccattaagtgtcacaaaagcagtcgtaggggtggctgtggcggtatggtagtggtgaaatgagtaatttgagattataggcctaaagtcaaatttctggttttgcaactttttactagtgtgacctgggcaagtgacttagcctctccaaacctcagtttcttcccttgtaaaatggaaataataaaagttcctacctgctatattattgagaggataaaatgaggaaagcacgtagcacagtgcccatcacaaagcaagctctcagtagatatcagttactgttattgagggagaccggggtgacgactggcatctgaacaggagttttccagctgtgctccaggagctataggttttacaaaaatgtgtcttgggggtgagaaggaggccattattcaccctgcccacacctgctgcccccttcaacctgatgggcttgtctttgttggcgttcagcatgaagattttattgagaagaaaaggtttggagtttggaagatcactgttttgtagttcgggtgtgttatggggccacagggaaggtaaatggtctcaattttcaggaagttgacatttgccttttctacttcatttccttaaacaaaaattgaaatatcagatgacaaatttaaagagatatatcccatataaaacctaaagttctatgaggctgtattgaacgatagagttaatttgcatcatcagatgttgtggccgctttgtagcatttgctaatctgtaacgcttggttttctcccccagatgagcaccatgccaggactgcccacccggccctgcttttatgacatagatcttgataccgaaacagaacaagttaaaggcttgttctaagtggacaaggctctcacaggaccckatgcaggtaggctgatgtgcttcaactttttctctctttgtttttttccagttcatatcctttttttgtcattttttttttctgataccacagaagtgatctgataaatcmtttccttcctttgttactcaaattcctaccaaatgattttccgtgactggagttcactcctgggtgtggctgtgagttacatgctcagatgctcagtacacaacccttagtgtcctgcgctcgagtccagtgaaagccaagttatgtcatccctgaatatagatgtgtttagagcatctctgaccataacagaactctgtaaactcattgttcttttccaggattaaaaccagcgtctgttataattttaaaagagtaacttcctaccttcctgccaygtatctcttggtacagagctagaatcatgtgaaagaggaatcttggtgtatccgtttcctggggctgccatgacaaagtatcgcaaactgggtggcttaaaacagtggaaagtttgaaacagttctggaggctagaagtccaaagtcaaggtgtcagccaggccatacgccacctcgagactctgggtggaatccttgctggcctcttcctagcatccrgtggtggctgtcactccctggcgttcccaccttgcagctgcgtcactcccgtctcagcctctgtggtcccaccacgttctccctgtgtctgtgtcttcacatgatgttcacctcttataaggaccccagtcctattggattagggcccaccctaagaacctccttttaacttgattactctgcaaagaccctccttccaaataagatcactctcagccaagcactttgggaggccgaggtgggtggatcacgaagtcaggagttcaagaccagcctggccaagatggtgaaaccccgtctctactaaaaatacgaaaattagctgggcgtgttggtgggcacctgtaatcccagctactcgggaggctgaggcagagaattrcttgaacccgggaggcggaggttgcagtgagctgagattgcgccactgcactccagcctgggcgacagagcaagactctccttctaaaaaaaaaaaaatcactctcacaggtgctcagggttaggacttaagcatatcttttaggggacacagttcaacccagaacactcaactgtgtggcacaacaggtgtgttcggctctcttgtccctggacagacacatagccatgggacagaccatttaactagagggccccatgggttccaggaagggcagggcagcagaaagtaggccacttgatgacttcgggtttgcacagtctcaggttgggctttgactctgagctgtcttaggcagcccagacctggggactctcggtcttawtcatgtccacgccacagcactgcagccatacctgctggcttctatcctgactccccatcgtgaagaaaaatgaccacattcctaaacctcttccctgggagacaactcctaatcagaagcttgaaaggctcagggctgcttctcctaccccagggatcaaacatgtcctcaccatattctaaagacacattctttccccgcaagcaccccgcctccttctccccactgactcctgttcctgagcccagaacctctccctcttgccagcatattctcggcctttgcagatgagcttttgtggcctaaagaccttcttcttcaaccatctctgagttacggctccaagccaggcacccaggattctcatttcatttgtttcactaccaggagtccacttgaggacttgttgttgttgttgttgtttgagacagagtctcgcgctatcacctaggctggagttcagtggcgtgatctctgctcactgcaacctccgcctcccgggttcaagcaattctcttgcctcaccctcccaagtagctgggattacaggtgtgtgccaccacgccccgctgatttttgtattttatttatgtatttatttatttgcgacagagtcttactctgttgccaaggctggagtgcagcggcactgtgtgggctcactacaacctctgtctcctgggttcaagcaattctcctgcctcagcctcccaagcagttgggattacaggcgtccaccaccatgcccagctagtttttttatttttagtagagacagggtttcaccatgttggccaggctggtctcgaactcctgacctcaggtgatccacccgcctcagcctcccaaagtgctgagattacaggcgggagccaccacgcccagcctaatttttgtattttaatagagatggggttttaccgtgttggccaggctggtctcaaactcctgacctcaagtgagccacctcgtctggccaagtttttttgttgaggctttgttgctaaaacactaaagacctaggctatggtgagaaagataagggaaccataaatgaaattacattaaaacaaagtgtgaaattgtttgttttgagttgtggatgttgtttgggggtgtttgtatgtgttttttgctgaggagcgggagctgtgttaagtttgagccataactgcatctttgatctttgttatttcagaaaaaataaaactctagaaaatgaagtaagggagactagtttaacaaagaaacccataaactcaagtgttgataaaatgttgtttcatcttttggtgtgagcttgtgtgttgccaatgtcttccattccccagtaaggctgtggggaaataattgctatttccccaattgctagttggcctagcaattctctttttatgtcaggaacccattatgttacatttctgccatttgtcatttttctccagaataagtgtgtttgattctcccatctctcttggacagtatttttccagcttttggtgagttttcacatgctctccaagtaggtcatataagtccaattataccttaatcactgtagttaggactcaggtcctactcagggatacatccttagcattattaatgcatacccttaaatcctttattacctactccctaacaagaattcctccagatcttatatacggggcctgcagggcaggacacaggcctatggtaattacttccaatgtatcgggcattgtgctaagcactttgcatgggtggtcacagcacctctggagccaagtgttgtcccataagggccacaaggcttyaagaggacggagcctaccccttggtcactgaggggtggccctggtctrcaaggctacagaactgccttgccaccctgtggcactgcctctcatttcatagctggcacatgtcattttgccacccccatcacatgtcatgctggcatcaacccagggaggtgggtagtatttttgttgaagagctgcaagaactctgcccagagaagtcgacaacctgctcaagttgtgcagctaataactacaaaagccaagactcaactcagatctgttgactctcagtattaccccaacctttatgccccaaaccaaaggatgcccttttcatttcagtcacgggtaaaatgaactttggcccattccgaaagatgataccagctatttgaacagacaggtacttgaggataatgaggtaattttttctaataagtaaagataattgtttgggtattaaaagctatgattttgtcataattctttttagtccaagtataatagagccagctctttcctaattctctaatggaatggcatttctaccccttacccaccccccaatccaaggcctctttcttctttgtgaattgctaaatacagttctgggctagtgggcagtggttcaaaacccatcgtttgaccctgcttgaacaatcaaaaacagatccagtgtcctaagataaaascactatacaaagcaaacattccctctcagtggctcctcggtaatgacccagcaagtattgtctgtttcccgtgcctctcactatagccatcagggaccacttctactaataatcagaggtctgcggctattcaaaatgcataaaataaaaatgttaaagcttaggtgacagcttggacaaacgtgggcatctgaaaggaaatgtctggcttgctgacgttgctccttcagggatcacaccgtagatggtgtgcatacccaggtgcggagcagcacactcattattcccccaggaaagtgttgaaggcgcgttccactcaggaagaagattgtgcttggttgatgacaactttctgtccttcccttcctcacctttctagcctgtctcacctcctaggaaaccgtgtgaaaccaaaggtgaacattatatgccaaaaaacatcagaattggagctctccttgctccctcttcccaagacttctctgtagtgccttcactgtggttagaataagggcatgactcattcttttggatgtcactaaatagaactaattaaaatagattttttgtcccagtgaaattgatccggctgttgagtcttttgtttaaagattattggaatgaaggatttgatacttttccccccattcttttttctcacttggaaactttatcatatttctgagctttggcaagattcattcaaatgaacacacaataaagtctggcaaatttcctgaagaattcagggactcccttacttctttattgtactgtgcaaagttacgttgagtacggaatcagattcactccagtcctgctacaaatgtttgttatttacaaaagaattgctttttcttgaattacatacacagaaataagttcaggaaagaaattagtttctttcctaaactggctttagggcatctacagacaaatggttaaagaaaatgtggtatgtatagagagtggaatactacttagccattaaaaaagaatgaaataatgtcatttacagcagcatggatggaagtggaagttattatgtgaaataagctgggcacggaaagactaatgctgcatgttctcactctcatgtggaagctaaaaagcttaccctcatagacagaataaatggtagataccagaggctgggaaggatgggtggctgggaggaggttatgaagaaaggttggttatgggtacaaacatacagttagacgaagaaataagctctaatgtttgatagcaaactaggatgactatactcagcaacaatattttgtatacttcaaagtaacaggaagagagtggggtgtacttgaaatgataccaacatacagtagtaatgataaatactcaagataatggacaccccaggtaccctgacttgatcactacacattccaggcacataataaacactcatatataccccataagaatataaaatattaggccaggtgtggtggctcatgcttctaatctcagcagtttgggagtccgagtgggtggatcacttgagcccaggaattcgagaccagcctgggaaacatggcaaaaccctgtccctactaaaaatagaaaaattagccaggcgtcrtggcacgcacctgtaatctcagctactcaggaggctgaggcaggcaaatckcttgaacccaggaggtggaggctgcagtgagctgagatcatgccactgcactctagcctgggtgacagagcaagactcggtctcaaaaatatatataatgtatcaatacaagggaaaaatgggcagaaattttcaatgatatttaataaccataaattaatcttgagttgggttgctgcctgccagcccttctgtgaacatgatttgttcagtcccaagtcacaaaccacagggttacaaagtaccctgggagggtgcctgagctctgtggttttagtcttgaaactttatcttttcacaaagcaattcaaaaattgctcatcaccattgtgttccgagaaaaggggcgccaaggcatcaccctgagccatccgaggagtgctgtgtgccttcttcctttctgcttccaagtaggatggaagctccagctttatacttaaataatcctcatcaacatctaaaagatagtgataattaaatctctcctatctaactaaaatggaatgttttaaagcttaggtaacaattctgaaattcttaattccccccaaaacaaactttttctgagcacattttgattkcttattcccatgccagaatagactgttttgtatatggtatcttccaagatattttcccactgagttaacttctgaaattgcttcttccaacgcataagcaataaacaacagattcgtttttacattctcaccttagctattgcatctctgattgttttcatctataatgagactttctatactttggccagtccttctgtttttcttaaaatgtgggaccacaggccaggcacggtagctcgcatctgtaatcccagcaatttgggaggccgaggcaggcggatcacctgaggtcaggagttcaagrccagcctggccaacatggtgaaaccccatctctactaaaaatacaaaaattagtcgggcatggtggcgggtacctgtaatcccagctacttgggaagctgaaccctgagaattgcttggacccaggaggcgaaggttgcagtgagctgatatcgcatcgctgcactccagtgtgggcaacagagcaagactccatctcaaaaaaaaaaaaaaaaagtgggaccacatactctaagcacctttagacaaaaccacaggatacaaatgtaatgtggctaatcagctggtcttccaccacccacctctggagcatggaaggccttgtccagccttgccttgccaagccaagggtcatctctagtccactgagcccaccctctaccctagcacccctcctgtcccaagagtcattgaccctcaggtcaagggataccagagccactacagtgaggctggccgtgtctctgaaatattttctttttttttttttgcccttctctcttcctcggcgctgcctatggaggtggcagccatctcctcctcggcrtcttggccgccctcagaccccttgtgaagcccaagatcgtcaaaaagagaaccaagaagttcatccggcaccagycagaccattatgtcaaaattaagcgtaactggtggaaacccagaggcattgacaacagggttcgtagaagattcagggtccagatcttgatgcccaacactggttatgggagcaacaaaaaaacaaagcacatgctgcccagtggcttccggaagttcctggtccacaacgtcaaggagctggaagtgctgctgatgtgcaacaatcgtacttgtgccgagatcgctcacratgtttcctccaagaaccgcaaagccatcgtggaaagagctgcccaactggccatcacagtcaccaaccccartgccaggctgtgcagcgaagaaaatgagtagacagctcgtgtgcacattttctgtttaaataaatgtaaaaacagccatctggcatcttcctttaaaaaaaaagaaaagaaagaaatattttctttcttttctttttttttttttttttgagacgcagtctcgctctgtcacccaggctgaagtgcagtggcacgatctcggctcactgcaagctccgcctcccgggttcacgccattctcctgcctcaacctccagagtagctgggactacaggcacctgccaccacgcccagctaatttttttgtatttttttaatagacacggggtttcaccgtgttagacaggatggtcttgatctcctgacctcgtgatccacccgtgagccaccgcgcctggcctgaaatattttatttttgttcatctttgttgtgcttataatactcctgttttctgtttattcccctgacttgaaccagatgttaggggagtatttgaagctcctcgttccctctcttcatcaatatcttctgtctagaaactaaccaagcaccytatctggctccagacctctcagtgatctgtgggaggccaactcgcaggatttcagcagagtttgcactttctaggcctaaaagataagtccttccatgtgtaagttcagattaaaggcaacatattgcatttacattttagagaggtgaacacattattttctgggacttaagtgttgttttgtttcttttttttttttttaatgtagtttatttctctttctaagagattacaggattcaagaatggcaaygaatcttaatagcctttgggagaaagcagcaaagctttaatactaagttccaggaccatgaacttccatgttgtcctaaatgcatttttcaaacattgctttctgtgcctactctataaaacctaaaaatccaaggtgacagtattccttatctaaaatcctaaacaaggctgggcgtggtggttcatacctgtaatcccagcactttgggaggacaaggcaggcggatcacttgagcccaggagttcaagaccagcctggccaacgtggtgaaacctcgtctttactaaaaatacaaaaattagccgggcatggtggtgcacacttgtaatcccagctactccggaggctgtggcgggaggattgcttgaacccgggagacggaggttgcagtgagccgagatctcgccactacactccagcctgggcgacaaagtgagactctgtctcaaaaaattaaaaaaaaawttttttaaatcctaaatattctcattccacaggatcctgcaaactgtagatcccaaacttggaagttctgggaattctgccagtatccccaagtaaatctccttgggaagtttagaatgctgcatggcgtagctgtgcctgctcttatagagtggtgcagactctgcttctccacgtctgctaagtaaaatattccaaacacagatcagccttatctagcgaaccatcactctgctcttgaattttcttttggcctcaaactctagagctataacatgttaacggtttaacaccagaggagaaagctattcttaaactactcaaacatggtttttttttctatttttcagactcctgaaacagactactctttgcctttttgctgcagytggagaagaaactgaatttgaaaaatgtctgttatgcaatgctggagacntggtgaaataggccaaagatttcttcttcgttcaagatgaattctgttcacagtggagtatggtgttcggcaaaaggacctccascaagactgaaagaaactaatttatttctgtttctgtggagtttccattatttctactgcttacactttagaatgtttattttatggggactaagggattargagtgtgaactaaaaggtracattttccactctcaagttttctactttgtctttgaactgaaaataaacatggatctagaaaaccaaccagcaagttttcagtgccagataaaactctgcgctctagaggtaactcctcatgggaggcagctaggagtgttacctgacaccagtttcctagaaaactgtgacaagcaaagcaataacacacgtcgagaaatatctgatcaagcgggaaatcttctgactgtcggggatctctagtaagatctcttggaatgaagtgcactgtgtatccaaaactattttccagcgccagtgaagttgctcttacctaaaacaaatgggtttatgctagtttccaccaaggaatgagtctcgatggccattaaactttctaaggcccacagggctaggaaaagtcgctcttaaaggtcaggtgtttggaaaatgtttttccttttgcccaacccttaattagtagtagagaatgttctgtggcctattcccctctctgggagttcctgacccttctttgttttccagtttttcctacaataatataaaattacgtaaaagttaaaacaaaaccaaggattcaggaagaaacaagcagtgattgtcctctaggcagcgtaaggaaaatagtcaccataaatatcttagatgycccccaggcacatcctgcaggatcttttctgcatcctcttgtcctacaccctccagtgaccctgctcagccattgctcagcccataatgcacctttatgcacaatttgtcccaaaacactgtttagtaactcaaaagcctcccactcaaaagctgtctgtcccaagaataatttcacttggcaattctgaagtgtccttccccatccctgccctttatttgggagtacacctctccaaatatacagttaactgatgttttactgtttatttggagaggtgtactcccaaataaagggcataccctctccctttacagtaaatttgtaaacccttataatcttccaatagatttatacattgaaaaccctatatattccactcagaaagctgtctttttttttttttttttttttttttttttttttttttttttaagataggggctcactctgttgcctaggtggagtgcagtggtacaatcatggcccactacagccttgacctcccaggctcaggtgaagcccccacctcagcctcctgagaagctgggactataggcacgcaccaccccacccagctaatttttgtattttggtagggacagggtttcaccatgttacccaggctggtctcaaagtccgggactcaagcgatccgcccgcctcagcctcccatagtgctgcgattagaggcgtgagccaccgtgcctggccgtgaattgatttttaagcagttgtcttctgctactcatgtttttattcttttcctctgcattgaaaggttaagtttctatttttgaaaacattttttaaataaatattttaggagtctccattcaaaaagctttagcctagggactcctttccttacctacttttaccagacaactcctcaactcaaaatgtaagtaaacatcctgcacaccagtgtgggagagttttccactgctcactttggaaggactatcatccaggtgctgctggaaaccgcaaactgtttcccatcatgtaggctcattcgaagtcctctgggtgtcataactcgggctctgatggagttgtttttgctcattcactaccctactgatggtagagtgtatttgactccagctgagtgatatgcagtctccactaagaagaaacgttaattaatgggctcatcaactcctgatgacttgaggcattcatagagaaaaagaagtattattatggggagtactgggaggagccagttatcaaccatcttttctgaggccacagcatgagaaaagaaaaatcacataacctttggcatggtgggtttcagttagaaatcttcccaagaagagtggatattgatttctttctgcctttaattgaaatgtaaaaaacgaataggccagagatggtgagtggctccaattacccactgtggcacagaaatgtgtgatcatgccccctctctgcttgaggactggcagtagtgacacctgccaaggtgaagtcccagaccagaagaatcctctgtgaaagctgcctgaagaacacactataggaattaactggagaagagatgcataggaacttcggaaagcatcagcaaggcaatgagccaacccattcattcgtatttttttttttttttgtctttttttttttttttttccgagaccgagtcttgctctgtcgcccaggctggaatgcagtggtatgatctcggctcactgcaacctccacctcccaggttcaaatgattctcctgcctcagcctccgaagtagctgggattataggcatgcaccaccacacccagctaatgtttgcatttttagtagagactaggtttcgccatgttggccaggctggtctcaaactcctggcctcaagccatccacctgccttggcctcccaaagtgctgggattacaggcgtgagccaccactcccagcctcattaatattctttttattcctctattgtcaaggttattttgtttaactagagtgtgtatgtttaatacacttaaagctataaggagtatttttcacaatagatatttaaagagaatcctagttccctcccatctgagagtagccacggtttcgtttgtttaactacaatgtgcccagcctgtttttaatcataatttacacatgcccacaaataagattgtggcatgtgtaaattatgataatttaccgtatatattcccagaaaatccacatactacatatttgtagattgctttttcataaatgtgttcgcacaagggaataaaaattcagtaacaagtgcattctttttttttttttttttttttgaggagtctcgctctgtcgccaggctggagtgcaatggtgggatctcggctcactgtaacctccacctcccgagttcaagcaattctctgcctcagcctcctgagtagctgggattacaggtgcctgccaccatgcccggctaatttttatatttttagtagagacgggttttcaccatcttggccaggctggtcttgaactcctgatctcgtgatccacccacctcagcctcccaaagtgctgggattacaggcatgagccaccacacctggccaacaagtgcattcttacagcatttgttacaaacctataatccatatcctctgaaaaagtcaagcattatgacaaaaccactggtcaatcaacagatcttcatgtagcaccgtaaactctaatgcagccagagacagacccaaaactctaacagcgacttcagaacagcagaatggactagaattcaggggtctgaatttgagggaaaaaatgtaacatctttatggctataatgtagcatttccttccctatgagtgtcagcaacaaaacacagcactatcgacagtgctgtgtcttttttgtttgttttgagataggggtctcattctgttgcccagactggagcgcagtggcacaatcacagctcactgcagcctccacctcccaggctcaagcaatcctcccacctcagcttccccagtagctgggaccacaggcacaccaccacacacagctaattttttattttttgtagatacaaagtcttgccacgttgtccaggctggtttcgaactcctgggctcaagtgatcatcccacttcagcctcccaaagtgttgggattacaagcatgagccaccgtgtgtggcttttttttcttccctagccactagacctccagggaaacagtagctatgtctttgtcgtagatattttaatattacatgacagtttctacaaatacagtagcatttatgcttctcactgcatcaaaattatagtagttattagatctcccactgtctttgtatccatgtaaataaagaggcacctacattgctataaccaaatgtggtaccttttctatactttaataattgcatttcaggctgggcacggtggctcatgcctgtaatcaaggcgggtggatcacttgaggttaggggttcgagaccagcctggccaacatggtgaaatccaatctttactaaaaatacaaaaattagccgggcgtggtggcacacacctgtagttccaactactcgggaggttgaggcaggagaatcgcttgagccagggaggcggaggtggcagtgagccaagatcatgccattgcactccagctgtgcaacaagagcaaaactccatctcaaagaaaaaaacaagcattttactatcattggtttgttttataatcataagtgttttcatttaagcatttaaaaaatattattctaagaagggggtccatgggcttcaccactttgtccatgggcatccaaggcacataaaaggttagaatcccctggactagatgagatgctaacagcctaggtcctggttctgtggcagcattacctggtctccgatgttgctacctctacatctgcgcctcagtctgtccctacaggtcccctgatccagggtgcctagtgtgcctataatagagtcttggtatgtatgtaatggtaacacaggcagcggctgtcaccaaagtttctccagcctgattcagaggatacacaagaagctctggacgctggagtgcctaagccttggttagcaactccacccccgagccagcccctgagctcccaccccaccctgatctaaggccaggcttctgcacrtggttttagatgctgcccagcaatggagttctcacctgacctggttcctccccgtagctcacacagggccacagcttgcatattggtggtcagatgccattgctcacggtagatgggacagagctgaatagccagtgtccattcctgaaaggctagagtccaactacttggcaactgtgggtggaatgctgcctacgagagcaccatgtcctaaacatgcatgtacataaccatggagtcagtggattgtccagggaactgcaattgataagtgctgggccttcctaaaggtcttggtaaaacagttggtttctaggacaaaaggcatatcatgaaccacaaaggatggggaaaatacttcacgaattggagtaggaccatatagttaagccttcaatatgagtaagaaagaatgaatttcttttattattattatctttttttttttgagatggagtctctgtcacccaggctggagtgcagtggcgcgatcttgggtcactgcaacctctgcctcccaggttcaagtgattctcctgcctcagcctcccgagtagctgggattacaggcatgtgccaccacacccggctaattttcatatttttagtagagacggggttttaccatgttggtcaggctggtctcgaactcctgacttccggtgatctgccttcctcggcctcccagagtgctgggattacaggcatgagccactgcacctggccaaagaatgaaattcttaactgcaccaccctcctgtgatctcagccttgtcaatgtaggtcatcaccttaggtattttttattgttcttttttggggggtgttgggggaccaggtctcactttgtcactcaggctggagtgcagtggcataatcttgactcactgcaacctccgccatccagactcaagtgatcctcccacttcagccccctgagtagctgggactacaggcaggcaccatcacacctggctagttttttatattttttgtagagacagggttttgccatgctgccgaggctggtctcgaaatcctcagcccaagcaatcctccacctctgcctcccaaagtgctgggattacaggcatgagccaccacacccagccaccctaggtattttaatccttattcttttgtgctacttaagctctgggatagcaacctccccaggtccaaagtgtggccacctaacttaggtgctttcctgtgtccgaggctgtaggtgccctgtttcaactacaatggacagttttcatgaggcagcacccgtaactggccacatccagcgtattcaagttaagcaaaaccacaggaggcaggtgcccatagaaatcctctctgggcaattaatagcaggtccccaggcatttagggtagcttttactcataggttttagaattgcaactttaaaaaaaaaaaaaaagtcccaggagctggacatggtggcacgtgcctgtagtcccagctactctggagctgaagcaggaggatcgcttgtggccaggagttcaaggctgcagtgaactgtgattgtgccattgcactccagcctgggtaacagagcaagaccctgtgtcttaaaacaaatcaaaaacaaacaaaccaacaa

SEQ ID NO: 95021 - DNA, 37451 bp, Homo sapiens
  misc_feature (1)...(37451): n = A,T,C or G
aacctccgcctctcgggttcgagcaattctcctgcctcagcctctcgagtagctgggattacaggcatgtgccaccacgcccggctaattttgtatttttagtagagatggggtttctctacgttgttcaggctggtaatccgcctgccttggcctcccaaagtgctgagattacaggcacgagccaccatgcctagcccaaagttctttattaaaccacaaatagcagatgattgagtgccaggccctcaagatgccatctgctccctggtaccacaactgaagaagccccaaacccagaacagactcagcttccaaggctcacaccctaaactctccactgcacaggaagtatcaaagcttattccacccccattatctacaaggtatcaagtaaaaactccttaaaatgcccttagaatttcatgaagctcaaaccctgcttttactgagatgtttccaaacctgagacagttcttaccactaattcctcctcttcctcttcctcctacaaaaggaaaacaaaattaatgtcagcagcaattttatgacatatttattcctgatcatactgatgtaattactgacgatagacactgacactattaacgatgttattttgttttctgtgttttatgatgtttttacattttagaggccttgctaatcctggagctaatcctgctcttccagggctaatttttagacagcaaacttgcctgcgagcatacctttcatatgcaacgtaactatccaaagtgcttgtagcaaactgcctcctttatcttttgtttaagagacagagtcttgctctgtcatagctcactgcagccacaaactcctgggctcaagtgatcctcctgcctcagccttctgagtagctaggactataagcacacgccacatgcctggctaatttaaaaattttctttgtggtagagacaaggtctcattatgttgcccaggctgctctcaaactcctgggctcaatcaatcctcctaccttggcctcccaaagtggtgggattataggcattagccactcagcctggccctgcctcctttatctaagttttgtacactaagctcctgtttccccttctctaaatcaccccagggacaaatataggacaactaggaaccagccctataagctagagcccaacgaaattattcaaactatccaatcctaaatttgagcaagtgtacctacgctgcccaccaattccttcccatagaaaccaaggtgctgagccatgcttccttcccctcataccttctgcctcctgacgagctcagacacttccccatatagctctgcatttttttgtgtggcatatccctctctttcaggaaatttaagtaataataaactcttctttcaaaggcggttgtctccaggtctgtcaccttaccatacttggttaaaacgaatcccaggtatatttcaagacagagacaccatctcactttcattaacaagaacctaagtgtgcttaatactctccagtttataaagcaccttcatatctcttatgatttaattaatcacaacagtcccttaaggaggtaatcccagtttagagataataaacagtaattagacattttctgatacagattcaagctgccagatgttcacatggggcctacataatctaaagtatttgtcccagtattgctacaaatagcaaaatttagtccttacatcccaaaccaagttaggaggaaaacccatttttttctagactgtgaacttgaattaggaatatgaaaactgctaaacctaaaaacccttgtttggtcagagcttaactaaggatggttagtcactgctttttggcttgctgaactcccagaacccctagtagactaagtatatcaaataaaagtgcacaactccactcatgagcttggaaatacagaacagaccccacctattcacttctgattcaaatgcacaacctcaaacttagtttccttcttcttcaaggatagtagtgtaaaaaactgcccatgggagcaacagtttaggcctaaatttgggatatagtaaaatctgacctcagaaataaggtgtttgcctgcctgtgcatgcagatacccacatttgggggcaaggaaagaaaaggtatctagggaaataaaaagaactagctcaggaatcatgttttcagaactccaatacagggccaggtgagaggactgcttgagaccagcctgggcaacatgacaagaccccatctctaaaaaaattaaaaacaggctgggcatagtggttcacacctgtaatcccagcactttgggaggctgaggtggccagatcacctgaggtcaggagttctcaatcagcccggccaccatggtgaaaccccgtctctactaaaaatacaaaaattacctgggcatggtggcacgcgcctgaaatcccagctactcaggaggctgaggcaggagaatcacctgaaaccaggaggcagaggttgcaggagccaagatcctacccctgcactccagcctgggcgacagagagactccgtctcaaaaataaataaattagccgggcatggtggcgcacgtctgtggtcatggctactcagaaggccgaggtgggaggatcccttgagcccaggggtttgaggctgcagtgagctatgactgtaccactgcaccccagtctgggtgacaagagtgagaccccgtctccaaaaaaagtcctaatacatgtttcatcctctaccatgccattcagtgaagccaccaaagctcatacaagctgggagtgaggggtaggaaaggttcaatttggaatccaggctatttattctcacaattggcaaaggtttcttctaaatatgaagatgctatttaggatgtaaattctagtttttcattaacaaggtttcttaatgctgctcttttaaaaaacatactgaaagccgggtgcagtggctcatgtctgtaatcccagcactttgggaggccaaggcaggaggatcacgaggtcaagagattgagaccatcctggccaacatggtgaaaccccatctctactaaaattacaaaaattagctgggcgtgatggcacacgcctgtagtcccagctactcgggagactgaggcaggagcattgcctgaacccaggaggcagaggttgcagtgagatcgcgccactgtactccagccaggcaagagcgagactccgtcacaaaaaaaaaaaaaaaaaaactgaaaaagttttcccaaaaaaactaaaattacattctgcccgagttagaaaacagaaattaggaccgtagatacaagacccttatatcatttccctattagcaatgctacaacactggtaattctgtgtcactgataattttgtgtcaaaaataacatggcaggttttgaaaaaataaatccaaatatgtttgaatatggattgctacatgtaaaatttccagtcactgagaaaaaccaagatcacaccagataaaaagatttaatcctcaataattttgcgttcctcagccgggcgcggtggctcaggcctgtaatcccagcactttgggaggccgaggagggcggatcaggaggtcagatccagaccatcctggctaacacggtgaaaccctgtctctactaaaaatacaaaaattaggtggcgtgcgcctgtaatttcagctactcaggaggctgaggcaaaagagaatcgcttgaacccgggagcggaggttgcagtgagccggatcacgccactgcactccagcctgggagacagagcaagattccgtctcaaaaaaaaaaaattatgggttcctcatagaataccatagtttattttattttatttatttatttatttattttgagacggagtctcgctctgtcgcccaggctggagtgcagtggcgcgaccttggctcactgcaagcttcgcctctcgggttgacgccattctgcctcagcctctcgagtagctgggactacaggcgcccgccgccacgcccggctaattttttgtattttcagtagagaaggggtttcaccatgttagccaggatggtttggatctcctgacctcctgatccacccgcctcggcctcccgatccacccgcctcggcctcccgatccacccgcctcggcctcccaaagtgctgggattacaggcatgagccaccgcgcccggccagaataccctagtttaaaactgactgcttaattacttgctttttctcatctattgcagcggtggatcttgctgacctttctgaggcaggctccatttctttctttagtttttttttttttttttttttttgagacagggtctcactcgggttgcctcggctggagtgcagtgacacgatcacggctcactgcagcctggacttcctgggctcaaactcccgagcagttgagaccacaggcgttcaccaccatgcccggctaatttttatattttttgtagagacggggtttcgccacgttgcccaggctggtccaactcctggactcatgctacctgtctgcctcggccgtcctcctaaagtgttgggattacaggcgtgagccactgcgcccggcctcaggttctatttctttttagaaataataagactagaaaaattaagggataaataagtctccaattattctgaacccacagcccagaatggctgcccccaagtgaccagagaacagacggacaggaaatgagattagaaacaactagtagctgtgtcgcaaaattgataagagtcctggttctagaaccgcgctgcttggccgcaattcctggctgcaccaatttggtagctgcatgaccttagaaaagatatttaacctctatgcttgtttcctcatctgtaaaaatggcactaatagtacccaacacttacttcataggaatagtgtgtagatgaaatgaattagggccgggcgcggtggctcacgcctgtaatcccaggactttgggaggccggggtgggcggatcactaggtcaggagttcgagatcagcctggccaacagagtgaaacccccgtcgctactaaaaacacaaaaattagccaggcgtggtggcggacacctgtagtcccagctacctgggaggctgaggcaggagaatcgcttgaacccaggaggcggaggttgcagcgagccgagaccacgccactgcactccagcctgggcgacagagcgagattccatctcaaaaaaaaaaaaaaattaattagtgcatataaagcacttggaatagcaagcagtcaataattatagcagcactctttctctgggaaagagctccctcttccatcacagaatcacatcgtacattctttcattgtccccaaagacacacaccttcctcaaagaaaaggaacacaaggccaggtcttccgaacctccatagaagatgtggtagggattcctaacctgagctggggcaaggcggtctgtttgctccccaaatctgtgaaacgcgggcttcagaacatctgactgactgcaaacataggtcatatttttacaagactttagtccacaaaacattttcgctctcaaaccttcactacattcacagaatgcagaagccgaggcccagagaaaaactagtcatctatctgtccaaagtcaccggacgaattctggggaaaggtcgagggaactagagctcccgactatgcaaaccctagagggtaaactgggggctaagagggccccgtgcgtgttttggcgggctaggtcctgggcttcagggcagagaagagggccgagtggatcgccttgccttacctcctcaggatctccggattcggtaagcatcttttgctcgtcctccagtcccatgtctggctacggttctagattcaacacgagcagcaacagcggcacctaacccagttcaggatcaagaaggacttgtaagggtcactcagcggaaatccggcgatctggccggaagtgcggcacactcatcgtggtcgcgaacacatgctcagattggcatgtactaccagccgcaggcagaggttaggggtagctgatgtttgcacccgaggaggctttgctaagaaacatccccttagtcataccacacccaagtataattgatctaggagtttatctaaaatagtagctcctaagagacttggaaagtgtgctaatttcttcgaaatttctttagaataattcacattcttccccatatcgcttatggagccgtcctaactgctgaccttttcaagatggcggtccgcgggcgacactctcgggctcgcgcacctccccaagatggcggcgcccgaggcctggcgcgcccggagttgctggttctgtgaggtagcggcggcaacgaccatggaggccacgtcccgggaggcggcgccagcgaagagctcggcctcgggccccaacgctccccccgccctgttcgagctgtgcgggcgggcggtgagcgcccatatgggggttctggagagcggggtgtggggtaagtcgcggggtgaggggctacctctggctaagagcaaggggcggcccagcggccggggggcgcggggggcgaggccgggaggcccggggcaaggcccagcctggggcgctgaaagccagctcgtaggatcggagaatgaattttgtgactgacagggctggacagagtaaagacggagacctaaatgggcaggctgacccgcaccgcggcctggctcgggggcgcggggggcgaggccaggaggcccggtctggagcgaagcaggctgggcccgggcgactgaggctggattgcggctgtgggccgcgcgaactgacactcggctgggccgggcaggagagtctcggatgtcgaaccggtgggcagcgatggcccggctgccctngggcaggggccgaggttaggaggcccggcctaaggcaaggccaggccaggcccggggccaccgaacctgactgatggccccggggctccagcatctgcctgacacgccacgggggtcgagattccggaggccaagccgatgggcggaggggaggacagcagattggagagcgagggaatggggcagggggagaggccgaacgaaagggtcgggrcgccgcggcctgtctgacggcccagggctgacgggagcgaaccgacaaccggggtctcgggtgccaaactgactaagcgaccgagcgaccgtgcgacccgcaggacagggagcgccggaggccactcggatcggctcgagcggcgaggagggaccggagagcgagtggaggggggcccggagcggcttaaacaagcgagggaggctcgaatgacggacaggcgggaagggccaaggaggccccaagcggggcgacggcccggggatcccggactgccgggctgccgtggcagggggcgcggcgccgccaagaggccttgggctgaatgggagtgaacgggggccccaggcctgaaggcggccgggaccaaagggccgggcctggatggagggcggcctggggcgccgggatgaacggccggggagggcgaaccggccagttgggctgggaggcggggctgtgggttggggaccgctggccgcggcctggccgctgacgagggaaacttgggtccgacgtggggcaagtgaaagaggggaaagtgaggctctgccaagcaggcctagccgcgctggggacaggggaggcctcgggcctgagaggctgctggctctgtgagggtggggtcgggaggccggggttggagttgggcgaagaggtggcaggcccggccgaggcctgctggggaggggggcaggagagcaggccccgggcctggaagcggcgcgggggaggttccaccaggaggccttgcgggtggccgtggcgtctttgcaggaggaaggccctggtcaggacaggagtgaggactttgaggactcgaggttgcagggcgcggagtttgagttatgccatgaggagggggtgtggggaaaaggccctggagtttggggggactgaagctccgggataagctggagggtggtcggggaggcccttggctgtgggagtggagcccagtaccatgaggcctgagtgtcctgcatagtggtggtggaagaggcttttagaagtcggccggtgtgcggaggggacagtggaggccccaggccagccagcggctgagaagacaaggggcaggccgacccatggggaacaggaggaaaggctccgtagagctgagcagggagctcagaaaagtcctagggcatggggaagaaggcagagagggtctggcttttccgcctggagcttctgggatgctaagactggctaaaaaggaagatgactgggtgcggaggcccaggttgggaagcagcagcattaaaggtgcaggctagaaagaagcaaggaaaatcccggcttaagaagaatggagaaaggaagagaggagtttgtgggtaactggggatgagaattcctgtggctgcaagaagagatggctaactagaggggagcaggttggagggaaaaggggtaaggctctggaggaacttcttcccktgtggcctcttccccctaaaacaattgacagtttactgaatctccctttccccttctccctcccctaccactgctgtacataccaccatcccattactggctgagcccccagccaagttgagaggagacaggggaggaagagctcctgtgggcctagaccagaaaaagctgaatcaagtgaggccttttaggagaatagccaaggaagaggcctgctaagcattgctattttagaggaaggtctgtgtgggctaacagccaggaaaggcttcctggaggtagtggactagcatcgctttgtgtaaggagttggggcagcgggtgtatagaggcagcaggaaagggtacaatgaggaaactttaaaataaggtatattataccttgaataccaggatatggagtttggactttatcatgaatgcagcagagagacctccaagggttttgaagagggtagtgtcatcaccaagagcaggatgaagagggactggatggagactgaagtgaaggagagcagttaggctgttgtaatagaccagatgaaaggtgatgtggactacattcgtgtaaaagcatagggaattaacactttcattcagcccgtacatcgaggacctactatgtacaaataattatactagattcttggatgtcaagattcagttattctgtaagtaaagataaaaagagaccctggagcggaagttttggtatactccaagatcttagacttgttctttttctttgagatggggtctcactctgtcacccaggctgcagtgcagtggcatgatatcagctcactgccacctctgtcttctgggctcaagcaattctcccatctcagcctctcgagtagctgggaccacaggcgtgccccacaacacccagctaatttttttttgtatttttggtagagatggggttttgccatgttgcccaggctagtctcaaactcctggacttaagcaatgccccctacctctgacctccaaagattacaggaattacaggtgtgagtttgacttgttcttgattggacagagatgccattgacaggataaaaataaccaccaacatttagcgagcttattatggctgggcattgttttaaacagattataagcatgatcttcacaacaatgtcatgagttaattactgttatctccwttttattttattttattttattttatttgtgagacagagtcttgctctgtcgcccaggctgaagtgcagtggcgccatctcggctcactgcagtctctacctcctgagttcaagtgattcttgtgcctcagcctcccaagtagctgggattacaggcgtgcatcattacacctggctaatttttgtatttttagtagagatggggtttcaccatgttggtcaggctggtctcaaactcctgacctcaagtgatctgcccgccttggcctcccaaagtgctggtattacaggtgtgaaccattgcatcccacctattttttattttttgaggcagggtcttgctctgtcatccaggctggagtgcagtggtctaagcacagctcacttcagcctcaacctcctgggctccagccatcctcccaccttagcctcccaagtagctgtgaccacaggtgcacaccatcacactctgctaatttttgttttgttttgagatagggttctcactgtgtcacctgggctcaagtacagtggtgtgatcatagctcactgtagcctcgaactcctgggcttaagcgatcctcttagcctcccaaagtgctgggattacaggtgtgaaccactgtgcccagcctccatttttttccagttgaagaaactaaggcttaaagaggcttaaataatttgtccaaggattcacatttaactaagtagttaggattgcactcagatttgtcctactctagaggccaaaccctttagacactatactataacagctcttagaactagagaagttggcaagagcaggttttgtttttaagatatattgactttagagacacgaattgtttctattcttcataggaaagtactagttcagaatatagcagtagcccaaaggatggtagtggttaatctggaaaaatggaaaaggaattcaggaaagacttaataaagggcatgtgatacttgaaagatgagtagttgatatactgaaagtggcaacgacattcctattagaacagcatgacaaaggacattcctattggaaagaacagcatgacaaaggtacaggggcagaaagcggcataatatgttaggtaaatgaaaaagtagttaagtgtggctgaaatgtaggaggcaaagcagggagctgatactagcagggcagattatgaaagaccttttatcacacatattcagtaggtccttttcaatgccaaatggttcattttgcttgggcagaagtgaactgaccagctcctaaataagcatgtcaagctcatttagcatgtcagcttgttttgtgggatgatctcacccttgcccctgaaattccagcttccaactgagtggctgaagataagtggactagagtttggaacagatctagattagcttctagaggttccatttgtcaaatgagaagtctacccttccattttcctttccagtagaataaataatgcttggaaacctcttgggtgggagggggaggggaggaaaagtaaacttttgttttgatttttgtagccctcccaggcccaatacttcaaagcatcctacctctgctcaatatatattacttggagaggattgaggaaactgccctcaagaaaggtgagtatctttctgtctctttctcagtcaatgattatgagcaaggcaccataatgttcttccggtaaatattacccctgatacctgctagaacttcgtgcttttcaaaaagtaccttcacacctatttttcttcctcattcctcagtgtcctatgaaacacaaagccaagtatatgatctttattatactgataaaagtgagacacaggcacaccacaattaatagcaaagccagaacaacaacccatatcttgtgaatcttagtttctctattttaccaagcttcctcccctcattagacacatctgttaacaggtaacatttaaccctaatgtgtcaagcattgtcctaggcactttacccacagaaactcatttaccctaatcctttcaacaaccctatgaaatagctgttattaacattttacagatgaggagactgaaccacagagaaattaagtaacttgcgcaaagtcacatagctggagtgtagtttgctgatattcacacccaggcaatctgtctttagagccagtgcccttaatcactctgccatattgctcctgtgaacccagaagacaacatgaaaggttgatgtactttactcatggtggccagtaagcagccaagtgtgatatttctccttacaggcctctcaactcaggccatctggcgccgactctgggatgaactgatgaagacaaggccttccagtttggaagtaagttaaggtatcaggtagaatgctagcctgattttgcatggtaaaagcaggaatagcacacaaacacaagctgggtactgataaagtgcagaggcaatgatggaatggatttgggaggagggctctgatggcttgtcacaaggttttggtccatttggcatttgtcactgaattgcttgctcactgtatttgcaggggacacaaaacagggaaagttagtgatcacaatggatggcagagccaggattcctagagttcttgatggtgttggtgcagtggtcaaatctaacaaaatgaaatttaatagaatacaccaatacttcaatgagttttaaaagttccaattgcatggtatcgggatgagggataaaggagtatgattagtaacagcttgtataaaaaagattaagggagtttagtcaacaatgtgttgaagccacttataacgactataccttgagctgtgtgaactaatgtaaatatagtataggctgaaggacaaggtggacaacagtcctgcctagctctgcaatggtcaggctacccgtggagattggagaaagtcaaagccacattatgtgagtcacattgggacaactggagatgtttttcctgaaaaagagaagacttgggaaacatgacccatcttgaaatatatgaatggctgtcacatgaaggagggattaatagacttgttctggatggaagctaatggaagatacatttttgctaacctgaagtttacgtaaagcttaaaccctgagcttatgaaacaagctaattctagaggtaataaacttcccatcactaagttcaaatggagtctgtgtaactccttgacactagggtgttctgcaggggattcagcattgtaaaaggggttgcacaagatgacttttagagctccttttagacctgagattctattattcactgatacagatataaatcactggagctctcatttaagcagtttcttttgctgccccataactaggtgatggggtagatttaattcaataaacatttactgaaacttaaccaggtaccagatcttacactagatattggaagaatagatgcagcctctaatcttaaagacctaacagttttgttttgttttgttttgttttgttttgtttgagacggagttttgcccttgttgtccacgccggagtgcaatggcgcaatcttggctcactgcaacctctgcctcccgggttcaagcaattctcctgcctcagcctcccaagtagctgggattacaggcatgcgccaccacacccagctaatttttttgtatttttaatagagacagggtttctccatgttggtcaggctggtctcgaactcctgacctcagttgatccacccacctcggcctccaaaagtgctgggattacaggcgtgagccacctcgcccggcaaggacctaccagtttaatagggaaatctacaaatagatcacatatgataggataagtggtgtaatagaggatagtaagaaggttgagagagaagagaataagaaagtctttcctaggaagtagtatttgaactgggccttctatggtgaatgaggccaaataacaggtggaaaaaaagctaatgtcaggaattggagatttaatttctggggatgcactgggttcagtaacattgaaccccatctccttcggcttattcacttccaaatctggactgcaacccttggcgttcagaatgaggacaacagrccttatgaggaagagaagcagactcaagaatattagaaaacagtaactgctttttgctatctttaaggaaacatcagattcactttgttccagtatttcacaagcactagagttgaccagcaagtgataaagattatatttttctcttggagaaagctttctgtcttcttggctcaaagcatttcagagcatttagaggccccaggcttggtggcccaacagtcagttaggcagaggtcctaacttggagcatgtccattccagagggtgtctttccgcttcccacttttgcatgacaatagccttcagctcataagtcacaaacagttattcagtgcctgctcagttccatgcattatgctaggttccagggatacaatggtgaacaagataaatatagaatgcttataaagcaatagtatttcaaactgtgtagtactggggtatataaagagatctgtaaggtcaggcacggtggctcacacctgtaatcttagcactttgggaggctgaggcaggtggatcacttgaacccaggagctcaaggccagcctgggcaacatggcaagactttgtctctactaaaaatacaaagaactggctgggcatggtggcacatgcctgtagtcccagatactcgggagaccaaggtaggaggatcacctgagcctgggaagtcgaggctgcagtgagccaagatcgcaccactgtactccagcctgggcaacaggagagagaccctgtctcaaaaaactaacaaataaaaaaagatctgtataatagaatagatactctggagaaaaagcaatgaataaattaagatttacccaataaattattctctagcaattggttagctatttggaaaaagttaagttagagcctcactttacagtatactctaatgacttttgtataaacaataaattgtggccgggcacagtggctcacacctataatgccagcactttgagaggccaacgcgggtggatcacgaaatcaggagttcaagaccagcctggccaacatggtgaaaccctgtctctactgaaaatacaaaaattagctgggcgtggtggcacgtgcctttagttccagctactcaagaggctgaggcaggagaattgcttgaacccaggaggcagaggttgcagtgagccaagatcacatcactgcactccagcctgggcaacagagcaagactccgactcaaaaaaaaaaaaaaaaaaaagaattagttgtaaaaagtaaaggcacaagagtcgggtacagtgactgacatctataatcccagctactccagaggctgaagtgagaggaatagcttgagcctaggagttggaggctgtgatcatgccactacattccagcctgggggacagtgcaaaaccacgtctcttaaaaaaagaaagaaagggctgggcgcggtagctcacacctgtaatcccagcactttgggaggccaaggtgggtggattgcttgagcttacgagtttgagaccaacctgggcaacatggagaaaccccgtctctacaaaaaatagaaaaattatcctgttgtggtgttgtgcacctgtagtcccagctactcaggaggctgaggtgggagggagcccaggagacagaggttgcactgagccgagatcacaccatcgcactccagcctgggcaatagagccagaacttgtcttaaaacaaaaacaacaaaaaagtttcaacaccaaagaatagaaaaaaataatttaaaaaagaataaaaccaacaggcaggtgtggtggctcacacctgtaatcccagcactttgggaggctgaggtgggcagatacttgaggtcaggagttgagaccagcctggtgcatatggtgaaaccctgtctctactgaaaatcaggcatggtagtgcatgcctgtaatcccagctactctgggattactacttgggaggctgaggcagaattgcttgaacccaggaggcagaggttaaaatgagccgagatggcaccactgcactccagcctcggtgacatagtgagactctgactcagaaaacaacaacaacaacaacaaaacaaaataaaaatacaaaaattagccgggcgtggtggcacacacctgtaatccaagctccttgggaggctgaggcatgagaatcacttgaacccaagaggcagaggttgcagtaagactagatcgctccattgcactccagcctgggtgagagtgagactctgtctccaaaaataataaaaccaataaacaaaaaaaagtaaaagcacaaatcaggccgggtgtgatggctcatgcctacaatcccagaaaaacgttgggatgccaaggtggtcagattgcttgagcccaggagttcaagaacagcctgggcaacatgacgacaccttgtctctacaaaaaatacaaaagttagctgggggtgctggtgtgcgcctctagtcccagctattagggaggctgaggcaggaggatcaattgagcgtcaggggtcaaggctgcagtgagcaatgataatgacactgcactccagtgtcataacctgtcttaaaaaagagcacaaaacaactaaagaaataataaaagtgaccatcctaatctcaggatggagagagtactaatttttttttttttttgagacgaaatctcgctctgtcgccaggctggagtgcagtggtgcgatctcagctcactgcaacctctgcctcccgggttcaagtgattctcctgcctcagcctcccgagtagctgggactacaagtgcgtgccaccatgcccagctaatttttgcatttttagtagagatgaggtttcaccatgttggccaggatggtctccatctcttgacctcgtgatccacccgcctcggtctcccaaagtgctgggattataggcgtgagccaccgtgcccagccgagagtgctaattattaaatgcacagaaccaagaaagaaaatacagacatatttaaccacataaaatgctaacactatcttcaggactttgtattgattaaattaaaaaaatgaaaatgccaacaccataaccaaattttaaaaggtaaatacactgggaaagaacatttgcaacaatatttgcaaaacaaagggacacaaaataaaaagacaaatatcccagtaaaataaaatgagtaaggatttggacacatcatgaaatacacaaaaatccccagtaaagtgaaaaatgttgtctcatgataaaagtgagaaagtaaaatccctatttcacctcttagtttagtaaagtcttgttttgatttggttttcatcgcaaaggtaatgcctaggtttggccatggcgaaatttgcattttactatgctattggagggaacagaaattgttgtaactttcttggtaggcaatctggtaatatttgttcagactttaaaatatctaggctggctggatgtggtggctcttacctgtaattccagactttagaacaccaaggcaagaggatcacttgagcccatgaattcgagaccagtctgggcaacacagggaaaccccatctctacaataatttttttttttttttgagacagagtctctctctgtcacccaggctggagtgcagtggtatgatcttggcccaagtagctgagattacaggcgcccatcagctcggctactttttgtatttttagtagagacaaggtttcaccacattggccaggctggtctcgaactcctgacatcaagtgatccacccaccttggcctcccaaagtgctgggattataggtataagccactgtggccggcctgcaataatttttaaaaattagctgggcgtgttggcatgtacctcccagctaattggtaagctaaggtgggaggatcacttgagcccaggaggttgaggctgcagtgaactataatagcaccactgcactccagcctggctgacagagaccctctcctccccagaaaatttaggctgggcgtggtggctcccacctgtaatcccagcactttgagaggccgaggcaggtggatcacctgaggtcaggagttcaagaccagcctggccaatatggtgaaaccccgtctctactaaaaatacaaaaattagccgggcgtggtggcgcatgcctgtagtcccagctactcaagaggctgaggcaggagaatcacttgagcctgggaggtggaggttgcagtgagccaagattgcrccattgcactccagcctgggcgacagagcaagactccatctcaaaaaaaaaaaaaaaaaaaaaaaaaccagctggggcaacacagtgagaccttatctctacagaaaaaatttaaaaattagctgtgcatagtggcatgcgtctatagtccctactacttgggaggctaaggcaggaagattgcatgagccccaggattcaaggctacagtgagctatgatctcaccactgcactgcagccctgggtgatgggacaagaccctgtctcttaaaaaaataatttggctataagttctactccttagaatttatagtatataaaaattgagatactcatgaagatttatttccagatgtttattacagaagagtttaatataaaaaagctagtaacagggtcaggcactgtggctcatacctgtaatcccagcactttgggaggccaaggcggcggatcacttgaggtcaggagttcaagaccagcctggccaacatggcgaaaccccatctctaccaaaaatacaaaatttatttgggtgtggtggcacgtgcctgtaatcccagctacttgggagactgaggcaggagaatagcttgaacctgggagatggaggttgcagtgagccgagatcgtgccactgtactccagcctgggcaacagagcaggaatgtcttaaaaaaaaaaaaaaaaaaaaaaaaaaaactagaaacaggccgggcatggtggcttacgcctgtaatcccaacactttgggaggccaaggcaggtggatcacctgagctcaggagtttgagaccagcctggccaacatggcgaaaccctgtctactaaaaaataccaaaaaattagctggacatggtgttgtgtgcctgtagtctcagctacttggaaggctgaggcacaagaattgcttgaacccgggaggcagaggtttcagtgagctaatattgtaccactgcactccagcccagaccagggcgacagaggaaaaaaaaaaaaaaaagctagaaacaatggaaatattaaatacagcaagtattattacatatggtacacattttcaaaataaaatattctaaaaatatttgaatacatggtatgttttaaaagcccagcatttgaaactgttcagaattgtctcaatgttgtaaaaacaaatatatataggtactctcatatatgtaaatactccagagttagtttacacttttgagacggtctcactccagttgcccaggctgaagtgcagtggcacgatcttagctcactgcagcctcaacctcccaggctcaggcgatcctcccacctcagcctcccaagtagctggattacaggcatgcaccactatgcccagctacattttttctatttttagtagagatagggttttgtcacattgcccaggctgatcacaaactcatggactcaagcaatctgcccaccttggcatccccaagtactgcgattacatgcatgagtcaccatgcctcgtccatgatttttcatttgcttctctatccacacacagtatttctggtatcagcaaaataatgaacaaaatatagtttctgaatattgttggctctaacaagttagcacaagatgtttagccctccctagtttgtacaaatacttcctcttcccctaccagcccactgaggatgggccaaggattgtgttgttgggcaaacatcacttcacctcattgatcatgcctcatttcccttaccctcacagaaaacaaagtactaaatcactttgcatcgtgatagcatacgagtccataaaatgagtggtctggactagatctcaagcatctctcagcttcgaattttagcatagactccttttttttttggagacggagtcttgctctatcgcccaggctggagtgcagtggcgcgatctcagctcactgcaagctccgcctcccgggttcacgccattctcctgcctcagcctcctgagtagccaggactacaggcacccgccacctcgcccggcgaattttttgtattttagtagagacagggtttcaccgtgttagccaggatggcctcgatctcctgaccttgtgatcccccccgcctcggcctcccaaagtgctgggattacaggtgtgagccaccgcgcccggcccatagattcttaagagtggtgatggaataaaacttcatgatctcttgtctgctcgtacgttaatttgtgagaaagaagccactgagagctgtcataactttactcatttaactgtcacaaaaatgctgtgatgtcagtatagtgatcttccactttatagatgatgaaactaaggcagaaagaggtgaaatgacttgcctaaattacagttagtgaatggcagacccagattcaggttgaagcagtctgcttctggagtgcatgttcctgatcactgtgtcatgctgctcactgcagttgtgtctggggtgttccaaatattctgtctcccattgtcttcatcaaccattaacatgtctgaaaaagtccagtatttacctatctaacctatatttcccctgtgcctcttatagccagaaacagccacaatatcttgactcaccatctttgtccatattttaggcacagatattgtaataaccatctgactcactcacttataaagctgaagccttgctaaggttacctgcaagtgtttttcaagactgggtgtgggccagcaaatctgtaggaaaagtgctagtgtgaggtaggaccgaaggataccttctttgccttcactcaaagttgagcagagatttggttgccaggtattgtttttcctgytcttaatgtcctgctgctgatgagcaaggcctttctgtgttgctgctatgcagttatttcaagcaggaagtcattcctaactattaccacagtaagtggagtctggggaaatagctaaggcaacaggaatgacacttttgcttgaggacagcagaggcctagttccttctaagaacctcaaataggaactgagagtcactccagtatggaggaatgcatggaggcagggtaaggatcaaagaaatgttttagtcttggggaacctcaggcccccacagccttggctttagtctgaatgagcaccatgcttaacaggctctgcctccatttcatatcccagctaggctaatagcagtggcagcagtaacattttttatatcttacagtttacaaagtgctttaatttgtactacttcattttgatcttcacaacaatcctgtgaagcaggttatctacattttgcagatgagggaagaggttcagagaagtccagagtatagtgaaagagctgggacctgactttctactgcccctgagatgacttagggatcatcttaaattagaaactttggggtctggtacctgtctttgtcttggtgtgcccttctggatcagcagtaattcctaacctctgatatacatcagaaacatctgggatggttcaaacaataaagatgtcttgaccttacctcagatgtaacatagaatcaccaagtctgggtgtctggtatatgaattttggggaagaaaagctccacagggaattctgatgtgcaccaaaggctgagaatcacttgcattcagagttgtattaaacacatcagaatagtctgatgaatcgcttctcggccttttggctaagatcaagtgcagaatagtctgatgagatttcctatccgtcaaaataaataactgttgccttggaagaaacaaatcaagatttggtttctgctttctaagaatttctaatctggctgggataagacatgtacacaggcaaagggactcaacaccatgagacaacataccagcctcttagtcttgagtagtcagagtgtcagaggagtcccaacaagaatctcaaatgacatgtttctaagttctttcaggaagtctaattcagcaatggagacatttctggtagatgtaggaaaggacataggcaggttcaagtccgtggggtgaccagcttggctagagcaaagcattctcataagcaagatgtgggaaataaagcttctcaggcagagggtggaagggcagtagggagacattagggttttaaagcagtatgatgtaattagtgttttacaacactactttggggacagggaaagcaatcaggaagctagtggtcaggtgtgaggtgataaggggctggtggtggtaagaatcagaagttggaggccaggcgtggtggctcacgcctgtaatcccagcactttgggaggccgaggygggcggatcatgaggtcaggagatcgagaccatcctggctaacagggtgaaaccccatctctactaaaaatacaaaaaattagcctggcgtggtggcgggtgcctgtagtcccagctactcgggaggctgaggcaggtgaatggtgtgaacccgggcggcagagcttgcagtgtgccgagatcacgccactggactccagcctgggcgacagagtgagactccgtctaaaaaaaaatgaagttgggataaggggctaggtgcggtgactcacacctgtaatcctagcactttgggaggccaaggcggacggaacacttgaggtctagagttcaagaccagcctggtcaatatgatgaaacatacaaaaattagccaggtgtggtggcgggcgcctgtaatcccagcttctctggaggctgaggcacgagaatcacttgaacctgggaggcagaggttgcagtgagctgagatcacaccactgcactccagcctaggctacaaagtgagactctatcttaaaaagaaaaaaaaaattgggataaggttctagaaacaaacatggaagaacttacaggggtgagtgtttcagtggagacactataataaaagcatggtctctggaaccagatttccagggttcaaataatccaaccacttacctgtgtggccacctctttgtgcctcggttttacctgtaaaatagggctaataataatacatacctcagagatgtgaagattaaatgaatttgtagtgttgcctgactcagtaaatagtgtgctattggaagagagggaaatttggacagtttcatggatatatcatggctgtctggcatgttttctgcgtttcagagtgtgacatgttggcgagccaagtttatggaggcctttttttcccatgttctacgtgggaccattgatgtgtcttctgacaggcgtctttgtgatcagcggttctcacctcttctgcacagctcccgccatgtccgacagctcaccatctgtaacatgctgcagggtgcaaccgagctggtggctgagcccaaccgcagggttctggagaccctggccagctccctgcacactctcaagttccgccacctgctgttctctgatgtggctgctcagcagtcacttcggcagctgttgcatcagctcattcaccatggggctgtcagtcaagtgtcgctatactcctggcctgtgcctgagtcagcccttttcatccttattctcaccatgagtgctggcttctggcaaccagggcctggtggcccaccctgccgcctctgtggagaggcctcccgaggccgggccccatcccgagatgaagggtccctcttattgggctcacgtcggccccgccgggatgctgctgagcgatgtgctgcagccctgatggccagccggcgtaagagtgaagccaagcagatgcccagagctgcacctgccactcgggtaacacgccggagcacacaggagagcctgacagcaggcggaacagaccttaagagggagctgcaccccccagccacctcccatgaggctcctggcaccaagcggtcaccttctgctccagcagccacctcctctgcctcttcttctacatcctcatacaaacgggcaccagctagctcagccccacagcctaagcccctaaagcgtttcaagcgagctgcagggaagaagggtgctcgcacccgtcaggggcctggtgcagagtctgaagacctgtatgacttcgtttttattgtggctggcgagaaggaggatggcgaagagatggagattggggaagtggcttgtggagctttggatggatcagatcccagctgcctggggcttccagcactggaagcttcacaaagattccgcagcatctccaccttggagctattcacagttccactctccacagaggcagccctgacactatgccacctgctgagctcctgggtgtcactggagagcctcacactctcctacaatggtgagcaccctggagtggcagggattgggcttagattgcctagcagcaccagctgtgtgcctaattctagggaggtgggaggggcaaattggrggtatgatcaggaggttagagaggaaggcttgtatgcctcatagcaggggagactgtcattgctagaagagaggaacataaagtctatacacttgattagttgttgaaagcaggggttcctgaggggcagtgagacaagccagctggaatctgaagaatgaatacattttagatatggaaggcagtccaagggcaggtgggagcagtatagtatatgcatgctcaggcagggctagagtttracctcaccacctcaccagtcatatcagagtagctgtccagacaaggtgtgggacacaatttcttatcagaccaacaacctgcaaagcagtcctcagtcctcatttccctcctgcttgtgaccagctagcaaaacctcaactctggctaaatccagcaatccgcctaggttgctgagcactgctagagacaaatcatacaactatgcaaatcagtgttactatatgatcactaacctcgtatgaaccttcactgtgcttgcaacatcagctcccattcctaccacttccaaactctccttttcccttctcagggatgacctcacctacttcacagagaaaatagaagccatcacacatgagtttctttagcttgctaagcagcctataaactctccatctgcactcatccttctttaccagaatagaagagaccaccatcctttctaaggctaattctcccacctgtgctctagatgcatagagcttcacaacaaagtatataaaaattaccagtttgagaaacaagcattctaccttcttagggaagcttgtttctcaaactaatttttatatactgcttagtatgtgtctggcatattttaagtattcttgataatttgatctaacaatcctcacaaccctatgagggcaagtgacttcctcaggataacctagcaattatagagctaggattcaaaacccaggcaaccagactgcagattcatgctttcaaacaactatgctactctcctttccaccgtctctctcctatcagcattttaacaggtctccatcaaaaactgccaccaccacctccctctatgccatattaataaactgttatctcctgttcttcacaaccttagttatctgtactgtttccacttctcttactcacagccccttccagcctcttatacccctaccactgcactggcaaggacctatgtcatcagggtcctccttgttactagatccaatgtatacttttcagtaactcttcttggcaggatttactgctgttcattaaattttttttcactaccttaaaaaatgttttcttggccgggcgcagtggctcacgcccgtaatcccagcactttgggaggtcaaggtgggtggatcacgaggtcaggagttcaagaccagcctggccaagatggtgaaaccccatctctactaaaaatacaaaaattagccaggcgtgatggtgggcgcctgtaatcccagctactcagtgactggagatcgtgccactgcactactgcactttaacctgggcaacagagtgagactccatctcaaaaaaaaaaraaaagttttctcctcctctgtttattcagagttcctcagagctttcccactttatgcacgcttcttggacaatttcatccattcctgtggtttcaaaggccaactatgctaaagactccccattatgtgacattaccccagatctttctcttgaacttccagacccatttatccagctagtagacatgacaacttcataacccacaataccccacccaactcattacatccaacttgaatgcatttttatatttttagtaaggacagggtttccccatataggccgggctggtctcgaactcttggcctcaagtgatccaccaacctcggcctcctacagtgctgagattatagtcatgagccattaagcccagccctatctttacaatttgttaaatacatttatttctctatctccacatccttaattcaagctaccattacccactacctgaactaatttcagtagttcctccggactccttactcttgccatacaaatccattatctgcactgcagcccaagcatcctttgaaaaatgcagtcttgattctttaaaaaaatcagtcaaaaatgaccctgtcattcatttatgcaaacacccttcaatggcttaattttacttagtggtcattcatattcttactcctggttatctctatagttgtatcttttttttttttttttttgacagggagtctctgttgtcacccaggctggagtgcaatggtgcaatcttggcttactgcaacctccgcctctcgggtccaagcaattctactgactcagtagctgggattacaggcacatgccaccatgcccagctaatttttgtatttttagtagagacggggtttcactatgttggccaggctggtcttgggctcccgacctcaggtgatctgcctacctcagcctcccaaagtgctgggattatataggtgtgagccaccacacctggcctatagttgtatcttgaatgcttccccccttcacactctcacaccagccattatgaaatttttttgttctccttcaggcctctacatatgccaagttgcctctgccacaatcattcttcctaaattttagcctgtcccctttatgttctttaggacttagctggagtgcctttactgatgtaagctggactaggtactcatcctttgtaatttcatagtactttattcccccagttcccatcgcattatcaagctatgtaagaaaaaaaagcaatgtgctgctcactagtgtctagcaaaaaacttgatatttagtaggcactgggtagttgaatgaatgaacaggagcctgcatagtccaaggaattatttgcctgtggcattaagcaaccaaccttcctggatcctagtccatgctgtgggatttggttatcttttcctgccccattcccacccattgattcttttaagtatcccagttgggtcactgtcactctccatagtttttaggtgctccctattgcgtctaggttaaaccatccctttgcctttccataatgtggcctccagtgccctgccctctagagctgtttcctgagcctcatgtagccaaacaagcaagcgtctcattcatgccttgcactctcctagctgtgattttttttttttttttgagacagtcttgctttttcacctaagccggagtgcagtggcgtgatctcagctcactgcaacctccgtctcctgggttcaagtgattctcctgcctcagcctcccgagtagctgggactacaggcatgtgccacccagcccagctaatttctgtatttttagtagagacagggtttcaccatgttggccaggctggtctggaactcctggcctcaagtgatctgcccaccttggcctcccaaagtgctgggattacaggcgtgagccaccgctcccggctagctgggactcttgactatgtcttctccctctatccaaaacttccttccttcaaggccagtttcttcagaaaactactcagaacccagaaatccagagaactgctactgtctgtgcctgtcattcagctagtagccacatgctgcctcaccatattgkatcttctcaattttgtgactctgccctgactggtgcttcttgtgggcataacccaaaacagcagacctcagtttgctggttacctaaggaaaaagcaagacatggatgagtagttaagacaaatgggtttaaataagctgagccaaagcccaagagatttgctagtaaccaaaagtatttggagttgtatttgaatatattacccctgctgacactcccacatggttctgacttaatctctttcttgccataggcctgggctctaacatcttccgcctgctagacagcctgcgggccctgtcaggccaggctggatgtcgcctccgtgccctgcatctcagtgacctgttctcaccactgcccatcctggagctgacacgtgctatcgtgcgagcactgcccctgctacgggtcctctctattcgtgttgaccacccaagccagcgggacaaccctggtgtgccagggaatgcagggccccctagccacataataggcgatgaggagataccaggtgaagcactgtgtgtgtgtttgtgtgtgtgcacgcacgtgtatccccacacaaaggtgcagatgcattcgtatggggaaaggggaaggacctcttctatcactcattcctggcttatctggaacctatcccccctttagagcctaccactaagatactcttgagctagacagggcctaaaccaccataagaccagcagagagtgaccaaggcagcttggtctccagaaaaggaaaagaactgatctttagactggattagttcccctgctgtatgttcccttagttcttgtatgtctcctatcccaccactctgcatactttatttgcttgtgtctgggtagcctgtcttcctggtctaaaatttctacaagggcaaggactaaatctcatatttagtgctcaattcctagaatctagcacagtgctgacatatggtaggcactcaacgacaagtgaatgaataaataattttttagatgaatcccttaagaacaggatgggacctgctatgggagtgaggtagagatggccagctggaatcttctttccccaccatatccagaaaactgcctggagcagttggagatgggatttccacggggagcccagccagccccactgctgtgctccrttctgaaggcctcgggttctctgcagcagctgtccctggatagtgccacctttgcctctccccaggattttgggcttgttttgcaaacactcaaaggtaggacccagccagaatggtgaagggagaggagtaggtggggacctagcactgttctctaggaaagctaaggtccatggtccatggtctctgcctcctatccagagtacaacctagccctgaaaagactgagcttccatgacatgaatctcgctgactgtcagagcgaggtgctctttttgctacagaatctgactctgcaaggtaagttccttattcagaacctggacatttcctgggtcttcactatggttctgccataatctgagtgagcaaaccactgttcctttcttggccttgtgtcctcagctataaaatggatatagaacctgcatgattttccttctaaaagccccaacctcaattcctcctctactaaacatgagaaatcgctcttttagagtgcttcacccaaaagttgctcttacctttcagaggtggacaaaatggtggtggtggggcaaaataaatgtactgtgccaggctcccctcatagacttttctctgatccccacccccgcatagagggtggccagtgttagggaaagaaggaagtgaatggagaattgtccatgcagagaaccttcttatagggaacatttaggttcagtctttagtttggattctgatttagttccagccttgcttggagtctagacaaattccttcctctttttgggcctctataatgttaataccccttgctagggccaactggggcaggaggggcagcaccagtcctaatgcagccatcagaatttactataatttttcttgacagagattaccttctccttctgccgtctgtttgagaagcgcccagcccaatttctgcctgagatggttgctgctatgaagggcaactccacactgaagggcctccggctgccagggaaccgcctgggtgggggccagaccctggggagggagaggggaaaggagctaggcctttgacctaaaaactcactggataaaggcaaagacctctccactgggaacgtgggagttggaatacagatatttctgtgctggggcttcaggaaccagcagggctggttctgccagccatagttgggttgggatacccttgtcccctgttcttgggtggaggtgataggcgttctccccttctctccagggaatgctggcctgctggccttggcagatgttttctcagaggattcatcctcctctctctgtcagctggacatcaggtacatgaggggaggggcaagacaagggatggggctacagagatatagaccaggaattcactgcttcctggatatctaatccatctcaccctaccagttccaactgcatcaagccagatgggcttctggagttcgccaagcggctggagcgctggggccgtggagcctttggtcacctgcgcctcttccaaaactggctggaccaggatgcagtcacagccagggaagccatccggcggctccgggctacctgccatgtgkttagcgactcatgggactcatcccaggccttcgcagattatgttagcaccatgtgatggggcccgtacctcacagtctcatgctcggtaccatcagcttgcaggggctgaagcatgggctgcccagaaccccaaccaccagttctatctttctctttctgtcaccttttttctcttttttccttcttcccttgcactgaggtcctggaggycttgatgaggcccagcaaacaggcattctcacagctgggtttatagtctttgggccccttactcagtatcctgggaaccctgggccaggaggttacagtggtcatcataattgctgaagagatcccctcccctgcccctgggttcctgccttccctcctcaagcaggcacccaggctttagagaagtatagggggcttcttccctgctgggcttaccacactgctctcaggcctcaaaccctttcatacctttattcttttttttaaccaaaaaagtttttcttataaaataaattttgggcaaacatcatgcagcccttcttgatgattttctcccagagaacaaaattcaacagggccctgtggagcaaggagccccttttccctatctccttcctctaagagctacacccagaccagctggttatcagcggaggccccgctgctcctcatgagaacgctggtggaagacgaaggtgatrgcagtggaggcagcatcccaggcagcctggagtacctcatcccggagcccccacttatcagtgcagtggttccaccctgccaggtctgaagtgcagtcagaaccatcagggggtggccggatctgacggctgttgacacaacgtcggcagtgcaacctagggacagaaggcacagctgaagtcactacagatcccatctccctactgtgtgggtagcttagagataatggttagggcacttccccacctgtcatgtgtgtcactgaggctagcttcatccaggataaacagctccttcaactcgcccagagagaagtggcgctctacatcctgctcctcatccaccacacagctgctcagtgccttcttgtggctctgacgctggaagatcttctcctcaatggtccctgcctggggaagaggaggtggggaatgtcaaaagatacagcgcttagccatcctcataaaaagggagcaggaaaaccaaagggttgaaactacagctacccgagaagaggagatgaataaaaagtatgagtcccagaacattatctctactcagctgaggtccattttcccagtctgtctcctgagaacatgacatgaatagtctgcccacccaggctactttctatactaatgaagggtcccagggcctggctaaatcccgtcagggtgaactgaggtttgtctgctgcagcttcagatttctgcaccaagcccaactctaactcattcaataaatatcatttaggtatctattctattccagaccctgtgctgacattagcatacaaaaaagaatcatatatatcccctatcctttagctcctagacaaacatttaaacagttgatacaatgatagaaatctatacagggtaactgcgagtccataaggatggtagagtagaacagtattgaaaacttgaaactctatccttgagctcaatcttgaaaatgagtagatggtttgtaagaaaagacacaaagaaaggtattcccagcataggaacaaaggaatactactggcctattggaggactgtgagtagttcaggctaactggaggttggtgggagtatagtaagagctgagactgggaagtcagcagaggccacattaaagaaccttggggacaggcacggtggctcacgcctgtaatccctgcaattttggaggccgaggcaggcagatcacaaagtcaggagttcgagaccagcctgaccaacatggcaaaaccctgtctctactaaaaatacaaaaattagccaggggtagtggtgggcacctgtaatcccagctactcaggagaagcaggagaatcgcttgaacccgggaagcagaggttgcagtgagctgagatggtgccattgcactccagcctgggcagcaagagcaagactccatctcaaaaaacaaaaaacaaaccttggatgccatgctgaaggccttaatcttgtcttcgaagagacgaaaaataaaatctgaatttttggaaagctccttctggaagcagtatgtgaacaatgggttgggataagacagaagtaaacaattaggaagctgctgcaatatccaagtgacagatgaccatgacctcaggagggcttggagagcaaggttagattaaggaaatttcaagaaggtaaaaatcagtgaaaactggtgggaatctggttattaggagaaaagaatagtccagtaagattattcccagttttgggttgggtggataatggagccattaagaacaacattcagaaggggagccaggtgtggtggctcatgccgttaatcccagcacttgggaaggccaaggtggatcgcttgagtccagatgttcgagaccagcctaggcaacatagcaagaccccttctctacaaaaaataaagaaaaaaagttatccgggtgtggtggcacacacctgtagccccagctacttcagggggttgaggtgggaggttgaagctgcagtggtccatgatcgtgccactatactccagcttaggcaacagaaagaaagtgtctcaaaatcaatcagttaatcaatcagaaggaaggggaatgagtttagtcatgatacttctaaagtgctcattagaaatctaagtggaaatgtagattaagtggtagaaatagggatttagagctcaggtaagagatctgggctaaaattttatagttagagatttgtcagtataatgagtaatcagagaggtagaagaaccagagtggagtttccaaagacgagaaaaaaaattttttttttttttaagacgggatcctgttctgtcacccaggctagagtggcacaatcctagctcactatagcctcgaactcttagcctcaagtgatcctccagcacccagcctagaagagcattttttaagggattagtagtcaacagtgtgagatacacgaagaggaaaaattcatagtctcctgttttggcaattaggaattcagtagtatatttgaaggtaggttcagtggtataaggagtctgatgagtgagtagaaagaagatgagttaggtaggaaatttgagagaaatggtagatgcttgaaatggttgaaggaaatgagatatggcccacctcaaaaagagaacatgaatttgtggtagtaccaacatgtaaatgcaatgtagctggtgtagaagctgaaaacagctcaaataatccaattggaatgggtattgggaaaagagtagctgaaaggatgcacagtgaagactgggctaaataaacaaggaagtcaagccagatgagtgggagggtgggaaggggagaggctacaggaacattaggctgaagcagatacagcaggtatgtgaaagctaggaggacaagaagtgaaagtagaatgacagttattaaggttctgggttctaacaagttccacggtgtgatcttaggaataattagacgaagcggggttgagatgaggtcaaggaaacatgaaggccagagtgctggataaccacatggtcctcaacgtcagccagtatgattgctggatttgggaaagaaatgaaggctgagctaatgtccaaagtcatcaatgaattaggaatatagcagaggatagaggactgcagcaaggaagaaaagagtgtagtcaagtccaacgacataagctgcaagaaaggaactatgggacggatggtctgaaggtgataatttataacttggagaatgcaaataggacaggggatgagagaagactacaaggccagtgacacagcagaaatcatgtatgagggaagcaggtgtcctgtgaaaaggatgtactgaacaggtgtccagatggcacagtaagaatggtttgagggaatggggtggagagaaggggagggagaacagaagaataaaagactcacttctgggcccatagcttggctactgctagaggcagaaaggccaaagagaggcactaaggaacaagatggtcctgaagatctcgttccatgacccacccctactatgactactatcaccatccttacagacagcaggcggtagatatagcaagtcttcttttgaccatctcgccagacccgggccatggcttgttcatcattggctgggttccagtcagggtcaaacatgaccagccggttagccccaatgagattgaggccacagcccccagctttgctgctcagcatgaagacaaagtcagggctctggaaagagaagaaacaggagaaaaggaacctcttatagcctaaactgggatcctgctcagcccaaccagctcctccctcatgcctctatactactcagtaccaattgtgaaaaccaccagtttatctgctcaccagccagccaatcccaacacacacagtcagtttccagcccagccatcaccaaccagacaaatcctactatatccactaggggaattaaaaaaaaaaaaaatcaaggtaaccccttatagcttctctatcattccttaattctgatgatactgcattggtggtgtggggacggggatgtgcatttaccgatggactattgaagcgttctacaaccttggctcgcttcttaatggacatcgtgccatccaggcggacgtataagtacctgaagggggattcgagacccaagaaaataaagcttcaatgattagggggaaaaaaaattaaaaataaaaatttttttaaaaagacccaagaaagcagagtcccttggagagccactgaagggactgaaataaccatgcttgaggccctaagctcccaaaggcaggggcagggagctagaggccaagactctttcctaagggagtacctgaaggactaggggatcttctacttggagatagagctgaggccatcatagcaataagggaagatatctccagggaaagcccttatgtgcccagatcttggcccacatccacaaatcagaactagacagacagtaggggaggggtatatccccctttggcatcctggttaggatcttccctaccttcgggcacggcacagcttctcaaagagatccaaagtctgggtgtaattcgacaccagcactactttgtcactgctacggcttcgggtcaccgccagaatataatccaggaccagcatcttacctgggaagagcagcaaccagcagtcccctactggctgtcccaatggcccaggcttcttactcttgatatcctgccttgaaacaggacagccctagcacaaaaaaaaatctcccaccctcctcctagagaagcccaaatactggtaggaaaagggtcacctgacagctggggctccagggccttagagctgtaaccaggagggaagaggtccaaggcacccacaaagccatcctcctcttccacacacttatcatagattagagctggatctgggagaaaacaaaacaaaacccagatactttgctttctgaagtttccacttcagtgttcactagaactccctctagaagcctagcccaaaaggccttcctcaacatcagacttgcttgatcttcatcctaccaaattccaacaggatatagtcggtgccatctgggacgatggatggacaatctcactcactaatgtgttctcccaacaagaagggagctataacagagcaggcaaggtttctttgttatttttcctcctgcccaacattgtatatgagcgtgtgtacatgcaagcactcacaaacagtcgacacatcccaggtcatcaagcatgggctggacagaagatgagttcaattttccaaagcaaagggtctggtaaacagactccacaatgcagggttcatgccttgggtagggttggaatcacatgtggcctctatgaggatgactctggacgagttttagtgagggttgccaggccactacaggaacctaccctcccttgctcactctcacagaggacaccaggacacaagcccaactcacgattacaaagcttctttagcgaggtgatggaagaaagggaagacacactcatcttgccctcaagcaattcttctgccggtttggcttgtctcagaaacctcttgtataactcagtctgaaggggtgtcagcctaaaaaaggcagctgggtcagtggaaaaagctagaccaccctcctgccctctgagaacaccttgagagcccagccatgcttcaggagctaggctttgacccactccacatctttcagttgagttcagtacctacaacaaacgacctgctcaatcttcacaggcagatatttagaaaggatatcagaagtcctccgtatcaggcatctagagaaaacaggataaaaaggcaagaggctggtaaaattgccatgctaactactggaataaaagctaccacccaaaggaccaagactagccctcttttacagtattaaatgtcagagactcggccaggcgcagtggctcacgccagtaatcccagcactttgggaagctgaggcgggcggatcacctgtggtcaggagttcaagaccagcctggccaaaatggagaaaccccatctctactaaaaatacgaaaattagccaagtgtggtggcaggcacctgtaaacccagctactcgggaagctgag

SEQ ID NO: 95022 - DNA, 42794 bp, Homo sapiens
  misc_feature (1)...(42794): n = A,T,C or G
gagggaggtgggggggtcagccccccgcccggccagccgccccgtccgggagggaggtggggaggtcagccctccgcccggccagccgccccgtctgggaggtgaggggcgcctctgcccggccgcccctactgggaagtgaggagcccctctgcccggccagccgccccgtccgggagggaggtgggggggtcggcccccctgcccggccagccgccccgtccgggaggtgaggggcgcctctgcccggccgcccctactgggaagtgaggagcccctctgcccggccagccgccccgtccgggagggaggtgggggggtcagccccccctatcacagctcactgcagccttgacctcccaggctcagtctcccacctcagcctctcaagtagctggaaccataggcatgtgccaccattcccgactaattttgtgaattatttgtagagttgggggtctcactatgttgcccaggatggtttcaaactcctgagctaatctttctgcctcagcctcccgaagtgctgggattataggaattagccaccatgcccaacctgggatgaaaacattctatatattgagatgatgggttacattgagatgatgtggcattacagtaggtctttttttttttttttttttcaaacaggatcttgctctgtcatccaggctggagtgcagtggtgccatcacagctcactgtagccttgacctcctgggctcaagcaagcctcccacctcagcttcccaagtagctgggaccacgagcatgcaccaccatgcccagttaattttttgattgtttgtagannnnnnnnnnnnnnnnnnnnagaaatcggatggttgccgtgtctgtgtagaaagaagtagacatgggagacttttcattttgttctgcactaagaaaaattcctctgccttgggatcctgttgatctgtgaccttacccccaaccctgtgctctctgaaacatgtgctgtgtccactcagggttaaatggattaagggcggtgcaagatgtgctttgttaaacagatgcttgaaggcagcatgctcgttaagagtcatcaccaatccctaatctcaagtaatcagggacacaaacactgcggaaggccgcagggtcctctgcctaggaaaaccagagacctttgttcacttgtttatctgctgaccttccctccactattgtcccatgaccctgccaaatccccctctgtgagaaacacccaagaattatcaataaaaaaaaaaaaaaaaaaaaaaagaaagtcagacaattaacaacctaattccatctgcagtcttaattcttctttgctaggtaacctatcatcttccagattctggagattgaggcatgactttttttttttttgagacaggatctctctctgttgcccaggctggagtgcagtggtgtgatcttggctcactgcaggctcaacctccggggctcaagagatcctcctactgtacctcccaagcagctgggactacaggaacagcccacaccaccacacttggataacttttgttcattttttgtagagatgaggtctcactatgttgcccagggtggtcttgaattcctggactcatgcaattctcctgcctggcctcctaaagtgctgggattacaggtgtgagccacccagcctatgaatgtcttttagatgctgttattctgtctaccacattcacatatttaccatttttggtgatcctcattccttcctatagattgttgggtgtcatttatttttatttttatgtatttatttatttttttagatggagtctcactctgtcacccatgctggagtgcaatggggtggtctctgctcactgcaatctccacctcctgggttcaagtgattctaccacctcagcctcccaagtagctgggactacaggcgcgcgccaccatgcccggctaatttttgtatttttagtagagacggggtttcactatgttggccaggctggtcttgaactcctgaccttgtgatccacccgccttggcctctcaaagtgctgggattacgggtgtgatccaccacgcccggcctatttttattttttggcacagggtctcactctgtcacctaggctggagtacagtggtacaatcacagctcactgcagcttcaacctcctgggctcattgatcctccttacctcagcctcctgaatagctgggactacaggcacacaccaccacgcccagctaatttttttttttttttaagacaggatcttgctctgtcacccaggttggagtacaagagcatgatctcagctcactgcaacctccacttcctggggtcaagcaatcctcccacctcagcctccctagtaggtgggactacaggcacacccaccatgcctggctattttttgtattttttgtagagacggggtttcaccatgttacccaggctgctcctgggttcaagcgatctgcccacctctgcctcccaaagtgctggaatcatagggatgagccaccaagcctagtctgttattttctttagtgtgaagaattttccttagtatttcaagtttggtggggatgaatctactgtttttgttgattttaaattgtattttgttgtcattttttttttttttaattaaaggctgggcacagtggctgacccctataatcccagcactttgggaggctaaggtgggaggattgcttaagcccaggagtttgagaccaccctgggtaacatactgagaccttgtctctacaaacaatcaaaaaattaactgggcatggtggtgcatgctcgtggtcccagctacttgggaagctgaggtgggaggcttgcttgagcccaggaggtcaaggctacagtgagctgtgatggcaccactgcactccagcctggatgacagagcaagatcctgtttgaaaaaaaaaaaaaaaaaaagacctactgtaatgccacatcatctcaatgtaacccatcatctcaatatatagaatgttttcatcccaggttgggcatggtggctaattcctataatcccagcacttcgggaggctgaggcagaaagattagctcaggagtttgaaaccatcctgggcaacatagtgagacccccaactctacaaataattcacaaaattagtcgggaatggtggcacatgcctatggttccagctacttgagaggctgaggtgggagactgagcctgggaggtcaaggctgcagtgagctgtgatagtgccactgaactccaggctggacaacacagtgagactctgtctcaaaaattttttcttatgccctttgcagaatttttctctgaagaacagcttttgttctggcaggcagctaatttggctagatttttaattccaaatcaatcatctccagcagagggcagaagccaaaatcttcacccagttctaccttctagctgctgcttttttttttttttctttttttgctgggtttcttgttacccctacacatgtatacgtaagcagtcaaccaaggaattgggaggacttgtcttacccaaatgttggggctcaccccctctgcaatactctcctttttaggatttctcctgtaactttttggttgctctgcctgcctcaaactctgttccctgacctgcctcaaactctgtttcctgacacctcaaggtagtaaagctgtgtcttcccaccagagttcccacacaggtagtaactctgtgtcacccaagagttccttgcagattggggaatgccctaagtaagaggccacagcttttctaatctcaccagttgcagttgttctttaagggtaggtagacttccttctggagcctgcttaaatttggccactgtccagtgccctggaataattggtttttcaaaatatttttttccctagagtttgtaattgttatttgtgggagggttaatctgactacatttatttgctattactggaaactagaaccagaaatatttatttattatttttgaaatggagtctcgctctgtcgttccggctggagtgcagtggtgcgatctcggctcactgcaacctcccctcctgagttcaagcgactctcctgcctcagcctcatgagtagctgggattacaggcgcctgccaccacgcccgtctaatttttgtgcttttagtagagacggggtttcaccatgttggccaggctgttctcgaactcctgacctaaagtgatccgctggccacagcctcccaaccgattaatacttaattaaaacgatatttctctccagaattctttttttttttttttgggacggagtctcgctctatcgcccaggctggagtgcagtggcacgatcttagctcactgcaagctccgcctcccgggttcacgccattctcctgcctcagcctcccgagtagctgggactacaggcgcccgccaacgctcccggctaattttttgtatttttagtagagacggggtttcacgtgttagccaggatggtctcgatctcctgaccttgtgatccgcccgtctcggcctcccaaagtgctgggattacaggcgtaagccaccgcgcccggcccagaattctttgttttgagatagggtcttgctctgtcgtccaggttggagtgcagtggcgcgatcttggctcactgcagcttgaccttccaggctcaagcgatgcttccaagctcagcgtctgcaatagctaggactacagctgtgcaccaccatgcctggctaatttttttgtagatatggggtttctccgtgttgcccaggctgatctggaagtcctgggctcaagcaatcctcctgcctcggcctcccaaagtgctggaattacaggtgtgagccaccatgcctgacctcagaattcttgataaccctgtgaggatggcttaagctatactcaggtgtgtgaccttgtacaagttactagcctatctaggcctgtttcctcacttacaaaatggggacaaaaataaacctacctcatagtcatgagcattacatgaactgttatatcttagaagctcagaaatgcctggtggtaaatgctataaatacacccttatcattattagtgagtacctaggttgtgcatgccactgttgggtgctttacgcacattaatttacttgtcagaatagccatgggggggaggtactattataatgccactttagatatgaagaaactgacgttttgagagattggatgattaaatctctgactccaaacacaacgcttcctccaacgcggtttggccttggagaggaaggcagcttctttcaagacacccctgagcgagaaagtcgcgtcatccgggggctcccattgcccgagcccgccacgtggcagtctgggccgaatgcctctccccactttctgggtgggcgaggcctgactccaaccccggccctccgctctagacctggtaccactgtagattcaatccaaactcccagaaatgtgccgcctttcataatccccagctgtccactacaggtggtaactcccctgctgctcaatgtggcgtaaatcttcccttccatagctgcgggaccacagctcaccgacctgggacaaacacccgagacgggccgaattccagctcgcaggtagtaattccgcccctcccctccccgctccgtcgcgtccagtccagctcttctagccctgccccgctcctctagcccaaccgctccccactgttggccccgcccctccccgccccgtccagctcttctcgccccgccccgctcttctcgcccaactgctcctcgctgttggccccgcccctcccccgccacccccgcccccgccccgcccctctcttctcgcccaaccgcccacctctgttggccccgccctcccatctaagtcacgcctcctagtaggtcaatttagcttctccagctccagagcccagactcctcattgggcgcagcactattcccgcctcttccttgggtcgcgagcgccgaactcatcgaacgcagccaatgggtgatacgacggcagcgcggcgggaggttcgattgacccggtcttggcgggtcggtgagtcttggcggctgttaacgcgcgctttgggaacaggaaggttgagagagaggtgctggggtctgcgtctatctctgtcgctcttttcagcccctcctggtattcccctcctaacctgggttttttacacgcccgcgtggcttcctgctcgacctccctgagtctgatcctggtttccacctccagccctgggaaatttcctttctccagactcgccctccccacccgggcctcggactttcaccccagcttctctctcytggccagtgattacccacccccaatcccaccccgccccgccgcgcaactacctcctcccttcacccggactgggaccatcatccccactccactccgcccagtctgggactccacctgcctcctccccaatcccacactaatctctgcttggtctcttcctctttggcctaatctctcgtctcggcttattggggacggccactctcacagtttggttccaaacaccagttcctggatggattcccgccatccatgccccctctttaattagccggtcctctcartaatgtagcagccccctctacagattagaccctggtcctacactcttagccgctgcctgcttttgacctttggctcatgggtacttgacgttttaaactcctaggcccaggatggtaagtgtgggcctaggggagactgggaatagccctgggtcagggtctagtaggcctaggctgcaggatccttgcaggcactgtttctgttctccctttacagaggaggagcttggctcccagccagctggccaagagaaaacctgaaggcaggtcctgtgrtgatgaagactggcaacctggcctagtggtgagcactcaaggggacagggaaggtgggtagagctgtttggacagaaaagaagccaggatttggtttctagggttacatagccaattccagatgcctcttttgtatgttcaataaacttttagtgagtacttactatgtgccaggcattgaacaagattagtaaaatctttatcctcmgggtagtcactagaagctaatatagcctcagttttcctggtgggaaaagataagcaaaagagccagttggattggaccttttgactctgcttggaaaaaagggctacacaacagcaattagcagctggctcttttgctctttgtcccctgcccagtgtcacagaacagtagagtgttctgggcctaccttggagtcctgggctcacttgggcctagatctgacaggttgtgtccttccagtccttgctcatactcaagtacagtatattctactttaggttgggccctgggctctgcttcctgttttggaggcttgttggggctggctgtgggcaggacctatgtaaaccaaaataaataggacagtgcagcatggacttcagagaataagagcagttcaagaagtgggggcttggccactggaactttgaaggaagggatcagctacgcaaggactagaaggcactttttggcaggagcagtgtgtgaataaggtgtggggtaggggtgctggtgtttgtttcaggtgtgtcttacaggatcactgaggcttcaaatatcctggcaagctggtacaagtgtgttcttgcctaatggcttgatggggcttgctcaatagttgtaccgtggtgtgcaaggggcttctctacctgtgaaggaggcacattggctgacccttgccatgtacatgggtctcagacttgaacttggggcagcattctctgcatctgggtctgctgtcagttgctggttgcttctgaagatgcttttagtgccagtgtcctcacagccatgggtggcctgagtggggagtggcctcagtggcctgggaattgaaggcagctgtattcttgcctcttggaaactcagcgaaatgtttggttgctccatcattccatggagcttttggagtgaagctttgggccaccaggactccatgctgttggtagacttgctcttcagaggcccattttatttacctcttccattgccccgctcagtttaggcaggttatttaatctcattaagctctagttttctcacctcttaaataaggataataactctacataatagagttgctatgaagatgatacactatgacatgtgtgaagaatttagcacagtgcctggcacttaataagcacttcaagtgttagttgccattatggtgatttctgtggtcttctagacttcacctttcccaattctctctcctagactcctaggaaacggaaatccagcagtgagacccagatccaggagtgtttcctgtctccttttcggaaacctttgagtcagctaaccaatcaaccaccttgtctggacagcagtcagcatgtaagccagaactgcaacctgcatgtgtatgtctgtgcccagtcactcagcctaggtagactcctgtccctgtacactccctcagtgctttctagagtggccagaagacacacatctgtaggggctttggacctgcccacagctgctggggcctgcttagagaggtgtgcctgacttgtgcctggtttatagtagctacatgggcaccagatatcagatggttcagattcctgaggaaaggagggtaaaggaactaggatcctcatgtcagctcagactctgactctgtatatgactttaaggtgtaccagagtcatgtatttcctctagtaaagtcaaacttaatcaccaccatggcaggttctgtgcattgcctcatgtaattctcacgttttaagatgagaaaacagtctcagaagggttaagtaatttgctcagagtgggtggagcagatctgtctatctccaaagcttttccactaagctttatgaggaatgttttgaaggaaaagtaggaatacataatggagattagtcatttgtgcattcagcaaacatttaaaaacggttttgtggcygggtcgggtggttcacgcctgtaatcacagcactttggaaggctgagatgggtggatcaactgaggttaggagtttgagaccagcctggccaacatggtgaaaccccgtctctactaaaaatacaaaaattaactgggcatggtgtcatacccctgtagtcccagctactcaagtgaggcatgagaatcacttgaacccgggaggccgaggttgcagtgagtcaagatcacgccactgcactccagcctgggcaagagtgagactcggtctcaaaaaaaaaaaacaaaaaacaaaaaacaaaacaaaacaactaaatgaaaacagttttgggccaggcgcagtggctcacgcctgtaatcccaacactttgggaggccgaggtggatggatcacctgaggtcaggagttcaagaccagcctggccaacatggtgaaatcccgtctctattaaaaatacagagaaaattagccaggcatggtggtgcatgcctgtaatcccagctacttgggaggctgaggcaggagaatcacttgaacccgggaggcagcggttgcagtgagccgagatcatgccattgcactccagcctgggcgacaagagtgaaaatccgtccccaaaacaacaacaaaaaaacaacagttttgtgtaatacttgataaatatagatatattacataagttataaaacacaaacacccgtgaacccatcatccaggactagaacattgtcaaacccataatcccttttcccatccccagaggtaatcactatcttgaattttatccatcatcttttgcttttatgatagttttagcatacatataaaaatcactaatacagccttggcaacagagtgagaccacctcaaaaaaaaaatcactaatacattgtttaattggttctttgaactttaaaaaatggtgttgggtgggcatgttggttcatgcctgtaatcccagcattctgggaggccaaggtaggcggatagcttgagctcaggagtttgagaccaacccaggcaacatggtgaaaccccatctctaccaaaaatacaaaaaaaattagctgggcatggtggcgtgtgcctgttgtcccagctacttgggaggctgacatgggaggatcacttgagcttaggaggtggaggttgcagtgagctgagattggcaccattgcactccagcctgggtgacagagcgagaccccgtctcaaaagaaagaaaatggtgttaaaatggtgtgtaatcctctgggactgtttcattcaggatttgttcaaagttgtcctgtgtaactacatggcataagtgcagttgtgggagtgcacaacaggagacctatgggtctggagattggggaagacctgcctctgagagatgtgctgttaagtcctgaaagatatgaggggttagacaggtgaagggagtggaaaacattctaatagaaggaacagcttattggaaagactggcagcaatagaggcaggtactgaaaagagagtgtggggagttgggggatggtggtgagagatgagagttggagagctgtgcagtggctaagagtggaaggcctttcagaagccatgctaggagagtctggactaaggtcactgaagagctttagaagtgttttaagtgggggtaggaggtaacagcagtatagaatatttgttggatggggagagactggaggtagggaaactagtgagaaagctattgcaggtggccaagcaagagaggattatggcctggacatgggttttaggggaatggggaatgggaagaagtgggtggattttgagagatacttaaaaattacaagtggaaaaacttgggattgattacatgtggggagagggaaaattgaggatgaagttgggattttaggctttggcaaggtagatggatggtggtgtcatttgctgagatagggaacacagaagaagaatggcatttggtgggagggagatggcaggcactgtaatcaggaggcccatgaagttcaatgtattatacaagagctattctcttttaatagcaaagttacaggaatagaacagaagatagacaacattaaaaatgtacttgcaggccaggtgtggtggctcacacctgtaatcccagcactttgggaggctgaggcaggaggatcacttgagcccaggagtttgagaccaacttgaacaacatagtgagaccctatttctaaaaaacaataaataaattggctggatgtggttgcacgtgactgtagtcccagctactctggaggctgaggtgggaggatcgtttgagctgaggaggtcaagggtgcagtgacccgtgatactgtcagtgcactccaccctgggtgacagagaccctgtctcaaaaggaaaaaaaatacttgcgtataggaaaattcagaaaagtatagttaatgggtagaatctgctgtatgataagaatgctactaacactgtttagttgctgtcaataagaaattgtattttaaaaaatccattgtccagaagatatgaacaggtttgtttatgrttgttataaaaytgaagtgctgaaacttgttcactgaaacattttgacttgtattaatgctttacatccctacatttatattaagaattcacacaaaaggccgggcacgttggctcacgcctataatcccaacactttgggaggcctaggcgggcggatcacaaggtcaggagatcggagattgagaccatcctggctaacatggtgaaactccatctctagtaaaaagtacaaaaaattagctgggtgtggtggcgggcgcctgtagtcctagctactcgagaggctgaggaatggcatgaacccgggaggtggagcttgcagtgagccaagattgtgccactgcgctccagcctggtgacagagcgagactctgtctaaaaaaaaaaaagaattcacmcaaaaaatgaaaatggaaaaactgcaaactgcaataccggatttctgtcccctatttttctactcacagtgatatacttaggkactctttttttttttttttttttttgagacagagtcttgtgttctcacccaggctggagtgctgcagtggtgctgtcttggctcacctgcttacttatctccattctccttcagctggagcttggtgagctaacactgcacttagagagcgatggtgatctttaattccttttgaaatcagaagaaaaaaaatacatagtaatccagcctgattatattattatagttatctttataccaatgcagtcttttttgtttttgttttttcttttttttgatagggagtcttgctctgtcgctcagaatggagtgcggtggcgtgatcttggcgcactgcaacctctgcctcccaggttcaggcgattctcctgcctcagcttcctgagtagctgggattacaggcacccgccaccatacctggcacatttttgtgtttttagtagagacatggttttaccatgtaggccaggctggtcttgaactcttgaccttgagtgatctgcctgcctcagcctcccaaaatgctggtattacaggtgtgagctgctgcatctggcctctttttttttcttttttttttctttttttaatggaggaaggggtcccaaaggcaaaagtgcctggggcccacaagagtcatagtgtggccttggagatgaggacttcagccttagacatgatgattttgaagtccctgcaggagatctaggtctggagtcagttgtaaatgtggatgtggagtaaggtataactagaaatacacctgggactcattagcatagataaattttatacctggtaagtggattggtgaatgggtagtcagaagatctgagggctaaaccctgagccctggggagcactgacttttttttttttttttttttcctgagacagggtcttgctgtgtcacccaggctggaatgcactggtgcgatcacggctcactgcagcctcaatcttaggctcgggtattgctgccacctcagcctctggagtagctaggaccacaggcgtgtgccaccaaacctggctaatttttaaatgatatgtagagaccaggtctcactgtgttgcccaggcaggtttcaaactcctgggttctagcaatcctcctgtcttggcctcccagagtgctgggattacagacgtgagtcactgcagccggttgggagcattgagctctgggggtgggttgagggttaaaaggcagagggaaaagagctcattaggggactgaagatgagatcccagaaaggtggagagtagtgtcatggaaatcaaaggcagaaaatatttgaggagtggtcagcttcgtcaagtaagatacatgtccattggaattagggtcatgtaggccattcgtgatcttggccagagtggaaggggcagaagacaggaagagtgggaggaaagaaggggagctatataacttactagaagtttgcctgtggagaggagagataagcaatcaaatgaatatttgtttttaagataggagataattaagtccattttaaatgctggtaagagctagtagagagggagaggttgagatacaagagtgatcagtcataacagagtgattctctgcagaaatgggaagctttagccttggtggggaggagggatgctgtctctcatctatcagaaggaaagattggtatgaattatcagtaactaaatgaacagagaataagagcatgctccctcccctgccccctgctatagagactggtgagtcaccaaaccagatccctgaaggttggccattccttttttttttttttttttttttttgagacatrgtcttgctctgtgacccaggctggagtgcagtggcgcgatctcggctcactgcagcctctgcctcccaggttcaagtgattcttgtgcctcagcctcccaagtagctggaattataggtgcccgcccccacacccagctcagttttttgtacttttagcagagacggggtttcaccatgttggcaaggcagatctcgaacacctgacctcaggtgacctgcccgccttggcctcccaaagtgctgggattacaggcgtgcactgtgcccagcaggccattccattttgcaggctgagccctcagacatttttggccaggggtctccacattcttccttaccagttatgcaagcctgtagttctccctgcagaacctatggttcctgtgttctattgaaagtctttttaaatttagggcataaattcttggctactcagagcctcaaatctagccttctatactgataattttgaaaatatttctgttttagaattgatgccaaattaaaaagaaaattagggtccatctccttttcctctcatttgacttaagagtagcttttttttttcctttgaggcaggtcttgctgtcacccaggctggagtgcagtggtgtagttgtagctcactgcagccttgaactcctaggccaagtgatcttcctgcctcagccttctgagtagctgggaccatgtgccacagtgcctgggtaatttttaaattttgtgtacggggtgtgtgggggggtctcactacgttgcctagggtggtctcaaaatcctgggcttaagcggtcctcccacctcagcctcccaaagcactggggttataggcatgagccactgcactggccaagggtcctttttgttagcatttttcataatgattatcattgctattcatagttacagtcatgctaattaaaaatagtaaaggctgggcataatggctcatgcctataatcccagcactttgggaggccaaggtgagaaagatcccttgagccaggacttagagaaagatcccttgagccaggacttagagactgcagtgaggtatgatcaccactactgtactccagcctgggcgacaaaatgagaccctgtcttttaaaaaaaaaaaaagtcaataaaagattttattcagatgcaaagaaatttgcaaataaacaaaagcatttgagttttttgccaactttgcctttatgttatgttatttagtgtgatgttgtcatgttatttagtgtgataaggaagttcatttctacatacttgttttctgtcttctaatatcacaaaaaaaattcattactttttttaaatttaaagtacatttgaggccaggtgtgatggctcatgcctataatcccagcactttgggaggccaaggtggacggatcacttgagggcaggagttcaagaccagcctggccaacatggtgaaaccctgtttctactaaaaatatcaaaattagctaggtgtggtggcgtgtgcctgtagtcccagctacttgggaggctgaggcaggagaattgcttgaacctgggaggtggaggttgcagtgagctgagattgtgccattgcactccagcctgggcaacagagcaagactccatctcaaaaaaaaaaaaaaaaaaaaccccaaaaaacaaataaagtacatttgaatttctagacattgatgatgtgtgaagaaatgagtcagaaaacaaaggtaaaaatatcacggcaggcttgctttttttcctattagactatgttttttgctagaagggacattttttcattactgctttttccactaatatattcccattaaaactaccttcagggtctctgctctttatttctctgctctcttggcttccacctctggttttgttgaggttcacaggctatcacagttccgcaaagggctcaggtgtgtgtggaccagaacttccatgggagctgtcagagttagctcagtgttaatttttctgccttctctgcccctgccccagccccatagcccatggaataatgctggttcaaggcagaagtgcttgtacagaggcttcttgcctttaggtggaggagtcaccagtgctacctctctaggacccacatatgtctacctgctgtcacccttgtcccacttgctttttcttagtgttgggcttagcttctctctcatgtccctttctcatgttccttctcttgtgctttacatggcaggaagctgctgggtctgggctgatctgcatggctgtactcagagtgggtgagaggccacgttgcctactgagtacaagtaaggaccctagaaccaggaaagtcctgcatttgtaatggctttgtgacttgagaaagtgacttaatcactctgagcctcagtttgctcatttgtaaaatggaaacaccagtaatatatggacctcatacagctgttaggattaaatggtaacatgaatgcaagaggcttagctctgtgtctagcatacattggtagccatcattatttttatttatatttttaaatatatatttttaaaatagagatggggtcttgctatattgcccaggctggtctcgaactcccagacctaagtgatcctcctgccttggcctcccaaagtgttaggattacaggtgtgagccaccatgcccggcctggtgttgttaatattattttattaatacgatggctcccatttctccatcactactctttgatgagctgtttagttcccaaggaggctgatgtgagtattagatatattagacataactgatgtagccaaaaaaaaaaaaaaaagaattgtgaggtgtgcttgggaaggtgtaaccctatatgacagtggttaaacccagacattagaattatccattattactcaggttggctaagtctgtggtatttgctttccaaggtgctataccctagggaagagctaggtatgctcactggcatggtttttaatgagtgaatggtttcctgggttctaagcctcgtggttgactgaggctgggcccttctgctatccctggatatttgtagaaccttacataaagcctcgaagatggatgctgttgtacaaaacctaatgtgaagcatatcatgatattgtcccataacatctccagtcagtcctgaatccttgtttctcctttctttttaggaagcatttattcgaagcattttgtcaaagcctttcaaagtccccattccaaattatcaaggtaaaatggaggtttttctgtttttgaaatcagtcatatgtacgtgtgcctgaataaattaaaaacctgcttttgtaaatacaagcttagctgggaattgaaggtgccagtccagcggtggctgtgtttggggtgaccctcctgaggcctgcatgaaaactgtgttagcctcagtaagggctgccaagactaactgcccctcatcttcttggtagaggtgtcccggtgctcagaaagctcctggtgggccaagatggctgatggacctgggcttcattcaatccaagtgcattcagtagcatcccttttatgaggctgactgtgtgggaggcctggattctataaggtttttccctgtcttatgtagggtacagcattatgctaaaactggggcttggaggaatagggaggccagctttctctctctctctttttttttttttaatttaatagagataggatttcactatgttggccaggctgatctcgaactcctgggctcaagcgatcctcccacctcgacctctcaaaaagtgttgggactacaggcttgagatactacgcttggctgtggccagctctcaggagctctcagaaagctccatgaaagtgccctttagaatttcaggccttcccaggattgtcttgagttgaaatgaaccagatctggcacctcagaagtttgtaattgaatgggagaaataaaacgggaaaagctctgattcaaagcagaaaaattctgggggctgggcatcgtggctcacgcctgtaataccagcactttgggaggccaaggcgggcagatcaccagaggtcaggagttcaagaccagcctggacaacatggtgaaaccctgtctctactaaaaaaaatacaaaaattagctgggtgtggtggtgggagcctataatcccagcttcttgggaggctgaggcaggagaattgcttgaacctgggaggcagaggttgcagtgagccgagattgtgccactgcactccagcctgggcaacaaagtgagactccatctcaaaaaaaaaaaaaagctgaatgggataatggtcatatagagatgcccaaactgagtttggaggcattctcagagagagagggtcatatgggagctcgggaaaggttatgtgaaggacaagtatttgagctggkcttgctggagctcctaaacatagattcaggtgacggaatgattattggtttgtaggtcctctgggctctygagcattgggcctgaaaagggctggggtccgccgggccctccatgaccccctggaaaaagatgccttggttctgtatgagcctcccccgctgagcgctcatgaccagctgaagcttgacaagtatgtgcactggtatttcataagcagttttggttctctgtatatgcacgcatacttgggagggcagagggtattttggtgtgatttctttttaggattgacatatgttttcagagagtagatgattggggaaggagactgcctggggaagagcctgtggtcatgtccantgagtgggcattcctcatcccctcctgccttcccaggatgctcactcaggaggaggagtgattgaggtgatgacacagggaacccatccckctctgagctaactttctaactcctnaagtaggaacttgctatggttttacgatttatcagccaagaaggtcttcttttaggcagctgcctctgttgcctccggatcagcaggacacagcttcctgagggtgctcccttgcccatgtctgagcacgctgttttctttgctgtgttttctcagggagaaactccctgtccatgtggttgttgaccctattctcagtraggttttgcggcctcatcagagagaggtaaatgagggtgaggggaacgaggtatgggctatgggctgagcctgggagactaccatccctgggacagcagcagcgtaggtgccaaagtggactgaaggctgttattctctagggagtgaaattcctgtgggagtgtgtcaccagtcggcgcatccctggcagccatggctgcatcatggctgatgagatgggcctaggaaagacgctgcagtgcatcacattgatgtggacacttttacgccagagtccagagtgcaagccagaaattgacaaggcagtggtggtgtcgccttccagcctggtgaagaactggtacaatgaggttgggaaatggctcggagggaggatccaacctctggccatcgatggaggatctaaggatgaaatagaccaaaagctgggtacggagccctaacaaagatggctgcactctcctgcacagcctgctgctttcttacgtgtatgctcatttatggccagggtggagggcaatgcaggggtagaagaaaagagaatttccattgaaaatagttgaagtggagtcagttgtttccaggctaaattaaagaactgtctaattgttttttttgtttttttttttttcaaaagattctgaattgttccctttacaccttttctgttgtagaaggattcatgaaccagcgtggagccagggtgtcttctcccatcctcatcatttcctatgagaccttccgccttcatgttggagtcctccagaaaggaagtgttggtctggtcatatgtgacgaggtacttgactctcagcagtctgggtggtaggagaaaatctgtcaaaatctcttcactgagtattgccttccaagggctgtgctagtcactggggaatgctgaagacaggatgctgccttggagacaagtgacagggagagcctgtgataccaaaatacaagatactgtctgccaaaagagggctgaaacaatgcttagaaccctgaggagagtgagatactgggggctgattggctttgttgcctccggatagtattcctagactaaagaaggaccttgaagggtgggtggcaatgtttagaggatataaatcagaaagtgtctgagacaagtctcaatttagagatttattttgccaaggttgaggatgctctggggaaaaagagacacaagccaaagtaggatctgtagcctgtactttttccaaagaggtttttgaggacttcaatatttaaaggggggctggccacgatgattcacgcctgtaatcccagcactttttgagaggctgaggtgagtggatcacttgagcccaggagtttgggaccagcctgggcaatatggtgaaaccccacctctacttaaaaaagataaaaatagtcaggtttggtggtgcacctgtagtcccagctactcaggaggctgaggtgggagaatcagctgagcccgggaagtaagctgagattgcgccactgcactccatcctgggtgatggggtgtgaaaccctgtctcaaaacacacatatgaccgggcgcggtggctcacacctgtaatcccagcactttgggaggctgaggcgggcggatcatgcggtcaggagtttgagaccagccaagatggtgaaaccgtgtctctactaaaactacaaaaattagccgagcgtggtggtgggtgcctgtaatcccagctactcaggaggctgaggcaggagaatctcttgaacccgggaggtggaggttgcaatgagcctagataatgccactgcactctagcctgggtgacagagcaagactctgtctcaaaaaaacaaaataaaaaccaaaaaacacacatatacacagacacacatgaccctttctcaaaaaacaacaccacacaaatatgcataaaggggcaagagcaggcaggagggaaagaggagccatcagttatgcattcagctcaataaatctgattttacatacagttaagtaaataaagagtagaggaagaagtcaaatacacatttgtctgggagggaggatttctagtcttgtctttgtcccctgcttgtaaagatgagctgtttttttacattgtcagggtgagggaggccacctggggagaggcatggcgttctatctgcagctatctgtttaggaacaaaaggaaagacatttttttgcttgactagttcccaagcttagcttttccctttggcatagtttggggtcctgagattttgttttcctttcacagggaacaggttctagagttagagacctttatttgtatcctggctctgccactgaccagcagtgtgaccttcaacaagttactttatcagctgaacctctgtttctacatcagtaaaatggggtgataatatctgcctcataggattattgtgaggattaaatgaaattattaagaaaaagctcttatcgcagtgcctggtatgtcataaggccttggcaaacgtaagctcttggtggttattccaggctgggggtacttgcaagaacaaaagcagagataagaaagtccatacaccttgtagtagtagtttgtgttgacttcttgtttcttgtttctggaactaagggaatatggccgtagttacttcctggccttttccagtatgtgtgaatggcaatagagaggctagtacttargaagcagtgagggtggctgggagcttcctactatagagaatttcccaggacttcccagtgggcttggcgaccctgaggctatagtcattgtttgcaacttcttgggagagttaacctcctttgtataccccagaggttctagtggagaggtggctgaaagacttggccctatctgtcaaccagttgtcaggctaggctcagctctgggtactgtagattagcccagttgtctgaggaacttcagagaggggacagagggaaaaagcttgcttttgggtaccatgctttctagttgtgagctattttctggtcagtcattggcgggtcttcaaactcccaacttcctggtaggagtagggaacttaccaggttgaggtgaggtatgcatgttactgccctgtggttcaaggccctgacatctgcttcatcactgtggagggggactatgccaggagccaggtccaaagcattgtgggagaggaaggcaggctgtagctgttgagcctttgaggattagggagcatctaaatttttttctactttttgtttttttttgagacaagggtcttgttctgttgtccagatggagtgcagtgacgtgatcttggctcaccgcaacctctgcctcccatatttaagtaattctcctgcctcagccacccgagtagctgatattacaggcgtgcaccaccactctggctaatttttgtatttttagtagagatggggtttcaccatgttggccaggctagtctcgaactcctggccccaaataatctgcggccttggcctcccaaagtgctgggattacaggtttgagccaccgtgcccagcctttttctactccttagtgtttttttcttccccactctgtcctgttttatgagctgactctgtgcagggcacaagggatgaggctgcctcttatcacactgcagccccttggctgtttacctttctacttgtttaccttttattttgtcaactgtcagagatctgaggaaccaaaagtcctgaaaagatggtcaccttactccagggaaggagagggtttgtcctgttcagaccctggaaagggaaggtgccatttcaggctttcatgttctcagctcccacagcatcttcctcccagtaacgcttttctctggaacacagtttttcataataacttctatgtacaaaatctttgatcctcaatcaaaagacacgggatcagctctggctttgccacttacaagcgtgactttccacagatgagactgctctgagattgtttcttcatctgtagagtggatggcacatgggctacttgaaagggatatgatacagatcaagagaggatatatgggagcactttgtacaagtgtataaatagcagagggattgacgtcatcgtcatctcaatcttaaagattaggagacaaactcagggaagtgcgtagtgacttgcccaggttctcctagcragtacatagtaagctggaatgtgaatgcaggtgtgagattccaagtcgtggctctttttcctatccctctctgccttggatgcttggtgcaggaagaagcttgccttgggtatggaagggttgtccctgtgctcctcattgagacccatgtggatccttagtgactggtccaatagggagctggggttggctttctcttttgcagagacaggatagtgtggcagcccatttcattcgctgggttatttattaagtgccttttatgtgtcaagccctggagatctcacaatgctgtccctcagggagcttcagtttagaagatctaattgttggtgcccatttcccctggacctgttgggtaatttcctctgactttcaagtctcatttccctcttcagttcagaagtctaaggctttttttagggctagtacttggagcctctaataattttttwtttcttaattaaatttctaggccaaatgcggtggcttacacctgtaatcccaggactttgaaaggctgagatgggcggatcacttgaggtcaggatttcaagactagcctggccaacatggtgaaaccctgtttctactaaaaatacaaaagttagcccggcatagtaacacatgcctgtaataccagcaactcaggaagctgaggcacaagaattgcttgaactggggaggcaggcacatgccaccacacccagctaatttttgtatttttagtagagacagggtttcaccatgttggccaggctggacgcaaactcctgacctcaggtgatccacttgccttaacctcccaaagtgctaggattacaggcatgagccaccatgccccgttggtttatttaatctttaatagcaacattggtcattatttcattctttcattcaactaatattcactgagctttgtcctatacactgaaattatacaggcgaatctgacatagtctctgccttaagaaatcctagtctctgcctagttgagaagataaagtacagtagagtgtgattagtactctagtatatatattatggatgagggcagagtggtacagtgtccagactcagagtcatacagacctgagttcaaatcccagctctgctactttctaccggcatgattttggataactgtttacctctctgaatcttagtttcttcatctctaaaatggataatacaatttccattcgtgtggattacagaacagaatacaggtaaagtgtttagttagtaccatgcctaccacattaaacgggttcactaaatagtagcagccattaygtatatagtgccacaggagcacagagttgagagagacaagcagcctggagtcactgaggaaggctttgcataggaggtgacatctgaggaacttgcctgtggaaaagagctctaggcagaggggtggcatgggcaaagagacataaggaaagccagcattaggagtgacaaggtcaggattcctggaccgtgacaagcttggagagtgtcagagaagttcactggggcctcattgagaagggctttgaatgctaagctagtgagcttaaagagcttggacttgatgctatagatggaagagtcagtgaagggtctgcatttaattgcgttgtcaaagcctgacccaagggagcaagactgattgctgattcttggttgagtggttgagttttgtgtgccttccccagtatggggctggatgtagaaaaggtatgggcctaatcttgcccatgtagttcttggagaaagagggaaggttgtcctttatgattttcttgaaaaaggcttaaaagaagtagtagaggtgtggagagaatgggaggacaggacagggagaatagagattggggaagagatgtgaagggaagcagagggaagctctttagctctactagctgtgaggattctggtgggacatggagcctggtccaagtccctttaacactgatggcccagacaaggcctggagtctaatacagaaggcgtctggctcagaaggttctgagttgggtaggctgatgtggaggggaggactccctgaaagcatgggtttgtcatatgtccacatgatctctgaagagtataggtgggctgccaaggctctggaggtggggcagggaaagggatggaaaggaacagagggaatctttgctttatgggtatagcactggtctggaaacaggaagtctgtcttttgagcctaatattctccatagttaagtgggtgaaccctctctcatgctgccccctgcctagttcccaaggccctagaacctgtaatgtttttgttttttgttgagacagtttctcactatgtcactatagtggtggcatatgcctgtagtcccagctactcaggagactgaggtgggaggattgcagtgcactcacggctcactgaagcctcgacctcctggactcaagcgatcttcccatctcagcctcccaagtagctggggctatgggtgtaagctactatgcccagctaatttttgtatgttttgtagagatggggtttcaccacactggccaggctggtctggaactcctgggctcaagtgatccacctgtctcggcctcccaaagtgctgggattacaggcatgagccacggcgcccggcctggaatgtttttgactcctcttttcctgtctacatgagactttgctaccgtatagggaatgccacattgcgctctgaataaggattctcttgcagggacacaggctcaagaactctgagaatcagacttaccaagccctggacagcttgaacaccagccggcgggtgctcatctccrgaactcccatccagaatgatctgcttgagtatttcagcttggtacattttgttaattccggcatcctaggtaagaatctagccttgtttgccacatcagagaggagccctgccttgtctttggsagtataactccagctgaggagagaaagaagagaatgctagttatatgtgggtcactaggcattcttgtaggaaggcttctcttgtcagggagtagcaaagccattgggaggccttggatctgctgagcaactcagcaaagcccatgttggccatttttccattgcagaggtggcaggggctatacagggaatggtgtcatgatgagctgagggtggaattattatttttgttcctcagatcctagctcccttagaagagttttggcctcagagcaagctctgtcttgggcagacgtgtgtgttttaaaaatcattttaaccatttttaaatgtaacaattcagtggtattaagtacattcactttgtgcaaccatcaccatcatccatcttcagattttttttttctatttgctaaacttaaaatctacccaataactcctctaccctcccctcccagtgctttgagaggctggggtgggaagatcacttgaggccagttcaagaccagcctgggcaacatagtgagaccttgtctctacaaaataagaaaattagctgggtgtggtggtgtgtgctggtggtcctagctattcaggaggctgtgatcatgccactgcactctagcctgggcaacagagcaaggccctgtctctaaaatagtaataataatcaaaactcctcattcctccctcccctaatccctggcaaccacacatatatttgtgaaagggtgtgttagtgtcaccccaacttgccagtgctcaagagtaggcagagaacctgctgagtggcaagattatgaccaagtgaacacatttgtgtaaccaccatcagatgaattactaacactctctcagcagccccttttctaatcactatcctctccttttgtcccggcagcaaactccttcctgacactataggttggttttgcctatttttgaatttatgttaatgaaatcatatagtatgtattcctttacatctggtttcttttgttcaacatgtttataaagtttatccacattatgtgtagcagtagtttgttcattttcataattgcatactattgcatgttatgagtacactacaatttattctactggtttggttttgtttgttgagacagagtctctgttgcccaggctggagtacagcgttgcagtcatagctcactgtaccctcaacttcctgggctcaagcaatcctcccactttggcctcctgagtagctgggactacaggcatatgccaccactattggctaacttttaaattttttatagagatggggtctcatatgttgctcaggctggtcttgaattcctgggttcaaatgattctcttgtatcagcctcccaaactgctggaattatgggcatgagcccctatgcctggcttccatctttttctgtttggatatctggttcaccctacatcatatattgaaaaaacygttctttcccccattgctttgcagtgctaccttcttcataaatcaaatgttcatatatgtgttgctctatttatggactctattctgttcctctggtccgtttgtctccttgtgtcagtacttctctgctttatttactgtggcctaataagtcttgatatccattagtgtgaatattccaactatagtcttttttttttttttttgacacagggtctcgctttgtcacccaggctggaatgcagtggtgagatcatggctcactgcagccttaacttcygggctctagtgatcctcctgcctcagcctcctgagtagctgggacaacaggcacacaccatcatgcctggctaatttttgtattttgggtagaggtggggttttgccatgttgcccaggctggtcttgaactcttgagctcaagcaatctgctcagcctccaactatattcttactccttaacattgtcctagatattcttggccctttgcattcccatgtaaattttagaatcaacttgtcaatttatacacctactgcctgccatacccaccaaaaaactctaactggattttaattgggctgtattgaaacagataaattctgaaagatctttcatttttataatacggaaccttccaatatattaatatgatctgtctctcaacttgtttaggtcatctttaatttctctcaatgtggccaggtgtggtggctcacaactgtaatcccagcactttgggagaccaaggcgggagggtaccttgagcccaggagttcaagaccagcctgggcaacatggcaaaatcccatctctacaaaaaaaatacaaaagttagctgagtgtggtggcatgtgcctgtagtcccagctacttgggaggttgaggctgtggtgagccatgattgccccattgcattccagcctgggcgacagggagagaacctgtctcaaaaaaaaaaaaattggccgggcacggtggctcatgcctgtaatcccagcactttgggaggctgaggcgggcagatcgcgagatcaggagttcgagaccagcgtggccaacatggtgaaaccccgtctctactagaaatacaaaaattacctgggcacggagaaggggtgcctgtaatcccaactactcgggaggctgaggcaggagaattgcctgaacctgggaggcagaggttgcagtgagccgagattgcactccagcctgggtgacagagcaagactccattgcaggaaaaaaaaaaaatccactctggccatgtttgtctttttagtggactattcaatccatttacatttactctaagtaattatatatttggattttaacctatcatctcacttttggcctttcaagtcttcactgctttgatacctctctgatctgttaaacagaaattggcctatattttgtttagccttgttcttggtaggaaggctggtttgtgagaaggtagtctgccatcactagctgtgggaaaatcattccttttccacattcttctgttttccttctctcctgtgtttagggactgcccatgaattcaagaagcattttgaattgccaattttgaagggtcgagacgctgctgctagtgaggcagacaggcagctaggagaggagcggctgcgggagctcaccagcattgtgaataggtaatgaccttaagcgaagtcattagaattgcctcccaaaccatccatggccaatcctttgggggctttgcctctctagagccctcaaaggctgggattctaggaagggagtgggttctgtgtcctaactatggccactgaataaacaagggagtcttggaggtgaagtgcctgctttctttctggcttgggctctgtggtctggttttggtctgtttatcagcctgctgaggaagcttttctctgatgctgctggacttcttgagcaaagtataccttggagcattactagtatttcagaagcttcctgtcagttggtctcagacccgaaacattaggcttctcttcccaggccccatagtcattctgtgacaggtaggagaagatctgaaaggtggttgtggctcccaggctaaggggactgactttttcatgggagttacataacccagagggtaggcacattctggactcctttgtccagaggtggtatgcacacttgataggttacattctaaagagtcctcctgcccttcccaacaactgcctggctacctggctacctctccctaccaattttagatggcaggacgggcatggtggctcacgcctataatcccaccactttgggaagctgaggcgagtggatcacttgaggtaaggagttcgagaccagcctggccaacatggggaaactcccatctctactaaatatacagaaattagctgggtgtggttggggtgcacctgtagtcccggttactctggagggagaggctggagaatcgcttgaactcgagaggcagaggttggagtgagctgagctgcgccactgcaccccagcctgggtgacagagcaagactccgtctcaaaaaaaaaaaattagatggcaggaagaagaattggtgttttcttaagatctgcttcttaggtgcctgatacctatccttcatagtcttcccaggaggtctatgcttaatttcatttagcctggggccatgtagcagcgggcatttggacaaatgcaagcagaaactcccctaaggacttagtaatttacaacttgcttttcctgttagagctcctgtatcaatgggaagcctcagtcttctcttgaagactaggcaacctattgaaggggaagagaaagtgctgcctgtctaagctagcatgtttggaaggtctctgttcccacaattgagaccctgatacagatgtgtttgacataggtctgatgactttttttttttttttttttttttttttttttttttgagatggagtcttgctcttgttgcccaagctggaatgcaatggggcgatctcggctcactgcaacctccacctcctgggttcaagtgattctcctgcctcagcttcccgagtagctgggtttacaggtgcctgccaccacacttggctaattttcgtatttttagtagagatggggtttctccattttggccaggctggtcttgaactcctgaccacaggtgatccgcccgcctcagcttcccaaagtgctgggattactggcgtgagccactgcgcctggccgagtctctgacatttaatactgtaaaagagggctagtcttggtcctttgggtggtagcttttattccagtagttagcatggcaattttaccagcctcttgcctttttatcctgttttctctagatgcctgatacggaggacttctgatatcctttctaaatatctgcctgtgaagattgagcaggtcgtttgttgtaggtactgaactcaactgaaagatgtggagtgggtcaaagcctagctcctgaagcatggctgggctctcaaggtgttctcagagggcaggagggtggtctagctttttccactgacccagctgccttttttaggctgacaccccttcagactgagttatacaagaggtttctgagacaagccaaaccggcagaagaattgcttgagggcaagatgagtgtgtcttccctttcttccatcacctcgctaaagaagctttgtaatcgtgagttgggcttgtgtcctggtgtcctctgtgagagtgagcaagggagggtaggttcctgtagtggcctggcaaccctcactaaaactcgtccagagtcatcctcatagaggccacatgtgattccaaccctacccaaggcatgaaccctgcattgtggagtctgtttaccagaccctttgctttggaaaattgaactcatcttctgtccagcccatgcttgatgacctgggatgtgtcgactgtttgtgagtgcttgcatgtacacacgctcatatacaatgttgggcaggaggaaaaataacaaagaaaccttgcctgctctgttatagctcccttcttgttgggagaacacattagtgagtgagattgtccatccatcgtcccagatggcaccgactatatcctgttggaatttggtaggatgaagatcaagcaagtctgatgttgaggaaggccttttgggctaggcttctagagggagttctagtgaacactgaagtggaaacttcagaaagcaaagtatctgggttttgttttgttttctcccagatccagctctaatctatgataagtgtgtggaagaggaggatggctttgtgggtgccttggacctcttccctcctggttacagctctaaggccctggagccccagctgtcaggtgacccttttcctaccagtatttgggcttctctaggaggagggtgggagatttttttttgtgctagggctgtcctgtttcaaggcaggatatcaagagtaagaagcctgggccaytgggacagccagtaggggactgctggttgctgctcttcccaggtaagatgctggtcctggattatattctggcggtgacccgaagccgtagcagtgacaaagtagtgctggtgtcgaattacacccagactttggatctctttgagaagctgtgccgtgcccgaaggtagggaagatcctaaccaggatgccaaagggggatatacccctcccctactgtctgtctagttctgatttgtggatgtgggccaagatctgggcacataagggctttccctggagatatcttcccttattgctatgatggcctcagctctatctccaagtagaagatcccctagtccttcaggtactcccttaggaaagagtcttggcctctagctccctgcccctgcctttgggagcttagggcctcaagcatggttatttcagtcccttcagtggctctccaagggactctgctttcttgggtctttttaaaaaaatttttatttttaattttttttccccctaatcattgaagctttattttcttgggtctcgaatcccccttcaggtacttatacgtccgcctggatggcacgatgtccattaagaagcgagccaaggttgtagaacgcttcaatagtccatcggtaaatgcacatccccgtccccacaccaccaatgcagtatcatcagaattaaggaatgatagagaagctataaggggttaccttgattttttttttttttaattcccctagtggatatagtaggatttgtctggttggtgatggctgggctggaaactgactgtgtgtgttgggattggctggctggtgagcagataaactggtggttttcacaattggtactgagtagtatagaggcatgagggaggagctggttgggctgagcaggatcccagtttaggctataagaggttccttttctcctgtttcttctctttccagagccctgactttgtcttcatgctgagcagcaaagctgggggctgtggcctcaatctcattggggctaaccggctggtcatgtttgaccctgactggaacccagccaatgatgaacaagccatggcccgggtctggcgagatggtcaaaagaagacttgctatatctaccgcctgctgtctgtaaggatggtgatagtagtcatagtaggggtgggtcatggaacgagatcttcaggaccatcttgttccttagtgcctctctttggcctttctgcctctagcagtagccaagctatgggcccagaagtgagtcttttattcttctgttctccctccccttctctccaccccattccctcaaaccattcttactgtgccatctggacacctgttcagtacatccttttcacaggacacctgcttccctcatacatgatttctgctgtgtcactggccttgtagtcttctctcatcccctgtcctatttgcattctccaagttataaattatcaccttcagaccatccgtcccatagttcctttcttgcagcttatgtcgttggacttgactacactcttttcttccttgctgcagtcctctatcctctgctatattcctaattcattgatgactttggacattagctcagccttcatttctttcccaaatccagcaatcatactggctgacgttgaggaccatgtggttatccagcactctggccttcatgtttccttgacctcatctcaaccccgcttcgtctaattattcctaagatcacaccgtggaacttgttagaacccagaaccttaataactgtcattctactttcacttcttgtcctcctagctttcacatacctgctgtatctgcttcagcctaatgttcctgtagcctctccccttcccaccctcccactcatctggcttgacttccttgtttatttagcccagtcttcactgtgcatcctttcagctactcttttcccaatacccattccaattggattatttgagctgttttcagcttctacaccagctacattgcatttacatgttggtactaccacaaattcatgttctctttttgaggtgggccatatctcatttccttcaaccatttcaagcatctaccatttctctcaaatttcctacctaactcatcttctttctactcactcatcagactccttataccactgaacctaccttcaaatatactactgaattcctaattgccaaaacaggagactatgaatttttcctcttcgtgtatctcacactgttgactactaatcccttaaaaaatgctcttctaggctgggtgctggaggatcacttgaggctaagagttcgaggctatagtgagctaggattgtgccactctagcctgggtgacagaacaggatcccgtcttaaaaaaaaaaaaaattttttttctcgtctttggaaactccactctggttcttctacctctctgattactcattatactgacaaatctctaactataaaattttagcccagatctcttacctgagctctaaatccctatttctaccacttaatctacatttccacttagatttctaatgagcactttagaagtatcatgactaaactcattccccttccttctgattgattaactgattgattttgagacactttctttctgttgcctaagctggagtatagtggcacgatcatggaccactgcagcttcaacctcccacctcaaccccctgaagtagctggggctacaggtgtgtgccaccacacccggataactttttttctttattttttgtagagaaggggtcttgctatgttgcctaggctggtctcgaacatctggactcaagcgatccaccttggccttcccaagtgctgggattaacggcatgagccaccacacctggctccccttctgaatgttgttcttaatggctccattatccacccaacccaaaactgggaataatcttactggactattcttttctcctaataaccagattcccaccagttttcactgatttttaccttcttgaaatttccttaatctaaccttgctctccaagccctcctgaggtcatggtcatctgtcacttggatattgcagcagcttcctaattgtttacttctgtcttatcccaacccattgttcacatactgcttccagaaggagctttccaaaaattcagattttatttttcgtctcttcgaagacaagattaaggccttcagcatggcatccaaggtttgttttttgttttttgagatggagtcttgctcttgctgcccaggctggagtgcaatggcaccatctcagctcactgcaacctctgcttcccgggttcaagcgattctcctgcttctcctgagtagctgggattacaggtgcccaccactacccctggctaatttttgtatttttagtagagacagggttttgccatgttggtcaggctggtctcgaactcctgactttgtgatctgcctgcctcggcctccaaaattgcagggattacaggcgtgagccaccgtgcctgtccccaaggttctttaatgtggcctctgctgacttcccagtctcagctcttactatactcccaccaacctccagttagcctgaactactcacagtcctccaataggccagtagtattcctttgttcctatgctgggaatacctttctttgtgtcttttcttacaaaccatctactcattttcaagattgagctcaaggatagagtttcaagttttcaatactgttctactctaccatccttatggactcgcagttaccctgtatagatttctatcattgtatcaactgtttaaatgtttgtctaggagctaaaggataggggatatatatgattcttttttgtatgctaatgtcagcacagggtctggaatagaatagatacctaaatgatatttattgaatgagttagagttgggcttggtgcagaaatctgaagctgcagcagacaaacctcagttcaccctgacgggatttagccaggccctgggacccttcattagtatagaaagtagcctgggtgggcagactattcatgtcatgttctcaggagacagactgggaaaatggacctcagctgagtagagataatgttctgggactcatactttttattcatctcctcttctcgggtagctgtagtttcaaccctttggttttcctgctccctttttatgaggatggctaagcgctgtatcttttgacattccccacctcctcttccccaggcagggaccattgaggagaagatcttccagcgtcagagccacaagaaggcactgagcagctgtgtggtggatgaggagcaggatgtagagcgccacttctctctgggcgagttgaaggagctgtttatcctggatgaagctagcctcagtgacacacatgacaggtggggaagtgccctaaccattatctctaagctacccacacagtagggagatgggatctgtagtgacttcagctgtgccttctgtccctaggttgcactgccgacgttgtgtcaacagccgtcagatccggccaccccctgatggttctgactgcacttcagacctggcagggtggaaccactgcactgataagtgggggctccgggatgaggtactccaggctgcctgggatgctgcctccactgcyatcaccttcgtcttccaccagcgttctcatgaggagcagcggggcctccgctgataaccagctggtctgggtgtagctcttagaggaaggagatagggaaaaggggctccttgctccacagggccctgttgaattttgttctctgggagaaaatcatcaagaagggctgcatgatgtttgcccaaaatttattttataagaaaaacttttttggttaaaaaaaagaataaaggtatgaaagggtttgaggcctgagagcagtgtggtaagcccagcagggaagaagccccctatacttctctaaagcctgggtgcctgcttgaggagggaaggcaggaacccaggggcaggggaggggatctcttcagcaattatgatgaccactgtaacctcctggcccagggttcccaggatactgagtaaggggcccaaagactataaacccagctgtgagaatgcctgtttgctgggcctcatcaagrcctccaggacctcagtgcaagggaagaaggaaaaaagagaaaaaaggtgacagaaagagaaagatagaactggtggttggggttctgggcagcccatgcttcagcccctgcaagctgatggtaccgagcatgagactgtgaggtacgggccccatcacatggtgctaacataatctgcgaaggcctgggatgagtcccatgagtcgctaamcacatggcaggtagcccggagccgccggatggcttccctggctgtgactgcatcctggtccagccagttttggaagaggcgcaggtgaccaaaggctccacggccccagcgctccagccgcttggcgaactccagaagcccatctggcttgatgcagttggaactggtagggtgagatggattagatatccaggaagcagtgaattcctggtctatatctctgtagccccatcccttgtcttgcccctcccctcatgtacctgatgtccagctgacagagagaggaggatgaatcctctgagaaaacatctgccaaggccagcaggccagcattccctggagagaaggggagaacgcctatcacctccacccaagaacaggggacaagggtatcccaacccaactatggctggcagaaccagccctgctggttcctgaagccccagcacagaaatatctgtattccaactcccacgttcccagtggagaggtctttgcctttatccagtgagtttttaggtcaaaggcctagctcctttcccctctccctccccagggtctggcccccacccaggcggttccctggcagccggaggcccttcagtgtggagttgcccttcatagcagcaaccatctcaggcagaaattgggctgggcgcttctcaaacagacggcagaaggagaaggtaatctctgtcaagaaaaattatagtaaattctgatggctgcattaggactggtgctgcccctcctgccccagttggccctagcaaggggtattaacattatagaggcccaaaaagaggaaggaatttgtctagactccaagcaaggctggaactaaatcagaatccaaactaaagactgaacctaaatgttccctataagaaggttctctgcatggacaattctccattcacttccttctttccctaacactggccaccctctatgcgggggtggggatcagagaaaagtctatgaggggagcctggcacagtacatttattttgccccaccaccaccattttgtccacctctgaaaggtaagagcaacttttgggtgaagcactctaaaagagcgatttctcatgtttagtagaggaggaattgaggttggggcttttagaaggaaaatcatgcaggttctatatccattttatagctgaggacacaaggccaagaaaggaacagtggtttgctcactcagattatggcagaaccatagtgaagacccaggaaatgtccaggttctgaataaggaacttaccttgcagagtcagattctgtagcaaaaagagcacctcgctctgacagtcagcgagattcatgtcatggaagctcagtcttttcagggctaggttgtactctggataggaggcagagaccatggaccatggaccttagctttcctagagaacagtgctaggtccccacctactcctctcccttcaccattctggctgggtcctacctttgagtgtttgcaaaacaagcccaaaatcctggggagaggcaaaggtggcactatccagggacagctgctgcagagaacccgaggccttcagaayggagcacagcagtggggctggctgggctccccgtggaaatcccatctccaactgctccaggcagttttctggatatggtggggaaagaagattccagctggccatctctacctcactcccatagcaggtcccatcctgttcttaagggattcatctaaaaaattatttattcattcacttgtcgttgagtgcctaccatatgtcagcactgtgctagattctaggaattgagcactaaatatgagatttagtccttgcccttgtagaaattttagaccaggaagacaggctacccagacacaagcaaataaagtatgcagagtggtgggataggagacatacaagaactaagggaacatacagcaggggaactaatccagtctaaagatcagttcttttccttttctggagaccaagctgccttggtcactctctgctggtcttatggtggtttaggccctgtctagctcaagagtatcttagtggtaggctctaaaggggggataggttccagataagccaggaatgagtgatagaagaggtccttcccctttccccatacgaatgcatctgcacctttgtgtggggatacacgtgcgtgcacacacacaaacacacacacagtgcttcacctggtatctcctcatcgcctattatgtggctagggggccctgcattccctggcacaccagggttgtcccgctggcttgggtggtcaacacgaatagagaggacccgtagcaggggcagtgctcgcacgatagcacgtgtcagctccaggatgggcagtggtgagaacaggtcactgagatgcagggcacggaggcgacatccagcctggcctgacagggcccgcaggctgtctagcaggcggaagatgttagagcccaggcctatggcaagaaagagattaagtcagaaccatgtgggagtgtcagcaggggtaatatattcaaatacaactccaaatacttttggttactagcaaatctcttgggctttggctcagcttatttaaacccatttgtcttaactactcatccatgtcttgctttttccttaggtaaccagcaaactgaggtctgctgttttgggttatgcccacaagaagcaccagtcagggcagagtcacaaaattgagaagatacaatatggtgaggcagcatgtggctactagctgaatgacaggcacagacagtagcagttctctggatttctgggttctgagtagttttctgaagaaactggccttgaaggaaggaagttttggatagagggagaagacatagtcaagagtcccagctagccgggagcggtggctcacgcctgtaatcccagcactttgggaggccaaggtgggcagatcacttgaggccaggagttccagaccagcctggccaacatggtgaaaccctgtctctactaaaaatacagaaattagctgggctgggtggcacatgcctgtagtcccagctactcgggaggctgaggcaggagaatcacttgaacccaggagacggaggttgcagtgagctgagatcacgccactgcactccggcttaggtgaaaaagcaagactgtctcaaaaaaaaaaaaaaaatcacagctaggagagtgcaaggcatgaatgagacgcttgcttgtttggctacatgaggctcaggaaacagctctagagggcagggcactggaggccacattatggaaaggcaaagggatggtttaacctagacgcaatagggagcacctaaaaactatggagagtgacagtgacccaactgggatacttaaaagaatcaatgggtgggaatggggcaggaaaagataaccaaatcccacagcatggactaggatccaggaaggttggttgcttaatgccacaggcaaataattccttggactatgcaggctcctgttcattcattcaactacccagtgcctactaaatatcaagttttttgctagacactagtgagcagcacattgcttttttttcttacatagcttgataatgcgatgggaactgggggaataaagtactatgaaattacaaaggatgagtacctagtccagcttacatcagtaaaggcactccagctaagtcctaaagaacataaaggggacaggctaaaatttaggaagaatgattgtggcagaggcaacttggcatatgtagaggcctgaaggagaacaaaaaaatttcataatggctggtgtgagagtgtgaaggggggaagcattcaagatacaactataggccaggtgtggtggctcacacctatataatcccagcactttgggaggctgaggtaggcagatcacctgaggtcgggagcccaagaccagcctggccaacatagtgaaaccccgtctctactaaaaatacaaaaattagctgggcatggtggcatgtgcctgtaatcccagctactgagtcagtagaattgcttggacccgagaggcggaggttgcagtaagccaagattgcaccattgcactccagcctgggtgacaacagagactccctgtcaaaaaaaaaaaaaaaaaagatacaactatagagataaccaggagtaagaatatgaatgaccactaagtaaaattaagccattgaagggtgtttgcataaatgaatgacagggtcatttttgactgatttttttaaagaatcaagactgcatttttcaaaggatgcttgggctgcagtgcagataatggatttgtatggcaagagtaaggagtccggaggaactactgaaattagttcaggtagtgggtaatggtagcttgaattaaggatgtggagatagagaaataaatgtatttaacaaattgtaaagatagggctgggcttaatggctcatgactataatctcagcactgtaggaggccgaggttggtggatcacttgaggccaagagttcgagaccagcccggcctatatggggaaaccctgtccttactaaaaatataaaaatgcattcaagttggatgtaatgagttgggtggggtattgtgggttatgaagttgtcatgtctactagctggataaatgggtctggaagttcaagagaaagatctggggtaatgtcacataatggggagtctttagcatagttggcctttgaaaccacaggaatggatgaaattgtccaagaagcgtgcataaagtgggaaagctctgaggaactctgaataaacagaggaggagaaaactttttttttttttttgagatggagtctcactctgttgcccaggttaaagtgcagtagtgcagtggcacgatctccagtcactgagtagctgggattacaggcgcccaccatcacgcctggctaatttttgtatttttagtagagatggggtttcaccatcttggccaggctggtcttgaactcctgacctcgtgatccacccaccttgacctcccaaagtgctgggattacgggcgtgagccactgcgcccggccaagaaaacattttttaaggtagtgaaaaaaaatttaatgaacagcagtaaatcctgccaagaagagttactgaaaagtatacattggatctagtaacaaggaggaccctgatgacataggtccttgccagtgcagtggtaggggtataagaggctggaaggggctgtgagtaagagaagtggaaacagtacagataactaaggttgtgaagaacaggagataacagtttattaatatggcatagagggaggtggtggtggcagtttttgatggagacctgttaaaatgctgataggagagagacggtggaaaggagagtagcatagttgtttgaaagcatgaatctgcagtctggttgcctgggttttgaatcctagctctataattgctaggttatcctgaggaagtcacttgccctcatagggttgtgaggattgttagatcaaattatcaagaatacttaaaatatgccagacacatactaagcagtatataaaaattagtttgagaaa

SEQ ID NO: 95023 - DNA, 25141 bp, Homo sapiens
agaggcctgtaaggagaaatatcacacttggctgcttactggccaccatgagtaaagtacatcaacctttcatgttgtcttctgggttcacaggagcaatatggcagagtgattaagggcactggctctaaagacagattgcctgggtgtgaatatcagcaaactacactccagctatgtgactttgcgcaagttacttaatttctctgtggttcagtctcctcatctgtaaaatgttaataacagctatttcatagggttgttgaaaggattagggtaaatgagtttctgtgggtaaagtgcctaggacaatgcttgacacattagggttaaatgttacctgttaacagatgtgtctaatgaggggaggaagcttggtaaaatagagaaactaagattcacaagatatgggttgttgttctggctttgctattaattgtggtgtgcctgtgtctcacttttatcagtataataaagatcatatacttggctttgtgtttcataggacactgaggaatgaggaagaaaaataggtgtgaaggtactttttgaaaagcacgaagttctagcaggtatcaggggtaatatttaccggaagaacattatggtgccttgctcataatcattgactgagaaagagacagaaagatactcacctttcttgagggcagtttcctcaatcctctccaagtaatatatattgagcagaggtaggatgctttgaagtattgggcctgggagggctacaaaaatcaaaacaaaagtttacttttcctcccctccccctcccacccaagaggtttccaagcattatttattctactggaaaggaaaatggaagggtagacttctcatttgacaaatggaacctctagaagctaatctagatctgttccaaactctagtccacttatcttcagccactcagttggaagctggaatttcaggggcaagggtgagatcatcccacaaaacaagctgacatgctaaatgagcttgacatgcttatttaggagctggtcagttcacttctgcccaagcaaaatgaaccatttggcattgaaaaggacctactgaatatgtgtgataaaaggtctttcataatctgccctgctagtatcagctccctgctttgcctcctacatttcagccacacttaactactttttcatttacctaacatattatgccgctttctgcccctgtacctttgtcatgctgttctttccaataggaatgtcctttgtcatgctgttctaataggaatgtcgttgccactttcagtatatcaactactcatctttcaagtatcacatgccctttattaagtctttcctgaattccttttccatttttccagattaaccactaccatcctttgggctactgctatattctgaactagtactttcctatgaagaatagaaacaattcgtgtctctaaagtcaatatatcttaaaaacaaaacctgctcttgccaacttctctagttctaagagctgttatagtatagtgtctaaagggtttggcctctagagtaggacaaatctgagtgcaatcctaactacttagttaaatgtgaatccttggacaaattatttaagcctctttaagccttagtttcttcaactggaaaaaaatggaggctgggcacagtggttcacacctgtaatcccagcactttgggaggctaagaggatcgcttaagcccaggagttcgaggctacagtgagctatgatcacaccactgtacttgagcccaggtgacacagtgagaaccctatctcaaaacaaaacaaaaattagcagagtgtgatggtgtgcacctgtggtcacagctacttgggaggctaaggtgggaggatggctggagcccaggaggttgaggctgaagtgagctgtgcttagaccactgcactccagcctggatgacagagcaagaccctgcctcaaaaaataaaaaataggtgggatgcaatggttcacacctgtaataccagcactttgggaggccaaggcgggcagatcacttgaggtcaggagtttgagaccagcctgaccaacatggtgaaaccccatctctactaaaaatacaaaaattagccaggtgtaatgatgcacgcctgtaatcccagctacttgggaggctgaggcacaagaatcacttgaactcaggaggtagagactgcagtgagccgagatggcgccactgcacttcagcctgggcgacagagcaagactctgtctcacaaataaaataaaataaaataaaataaaatggagataacagtaattaactcatgacattgttgtgaagatcatgcttataatctgtttaaaacaatgcccagccataataagctcgctaaatgttggtggttatttttatcctgtcaatggcatctctgtccaatcaagaacaagtcaaactcacacctgtaattcctgtaatctttggaggtcagaggtagggggcattgcttaagtccaggagtttgagactagcctgggcaacatggcaaaaccccatctctaccaaaaatacaaaaaaaaattagctgggtgttgtggggcacgcctgtggtcccagctactcgagaggctgagatgggagaattgcttgagcccagaagacagaggtggcagtgagctgatatcatgccactgcactgcagcctgggtgacagagtgagaccccatctcaaagaaaaagaacaagtctaagatcttggagtataccaaaacttccgctccagggtctctttttatctttacttacagaataactgaatcttgacatccaagaatctagtataattatttgtacatagtaggtcctcgatgtacgggctgaatgaaagtgttaattccctatgcttttacacgaatgtagtccacatcacctttcatctggtctattacaacagcctaactgctctccttcacttcagtctccatccagtccctcttcatcctgctcttggtgatgacactaccctcttcaaaacccttggaggtctctctgctgcattcatgataaagtccaaactccatatcctggtattcaaggtataatataccttattttaaagtttcctcattgtaccctttcctgctgcctctatacacccgctgccccaactccttacacaaagcgatgctagtccactacctccaggaagcctttcctggctgttagcccacacagaccttcctctaaaatagcaatgcttagcaggcctcttccttggctattctcctaaaaggcctcacttgattcagctttttctggtctaggcccacaggagctcttcctcccctgtctcctctcaacttggctgggggctcagccagtaatgggatggtggtatgtacagcagtggtaggggagggagaaggggaaagggagattcagtaaactgtcaattgttttagggggaagaggccacacgggaagaagttcctccagagccttaccccttttccctccaacctgctcccctctagttagccatctcttcttgcagccacaggaattctcatccccagttacccacaaactcctctcttcctttctccattcttcttaagccgggattttccttgcttctttctagcctgcacctttaatgctgctgcttcccaacctgggcctccgcacccagtcatcttcctttttagccagtcttagcatcccagaagctccaggcggaaaagccagaccctctctgccttcttccccatgccctaggacttttctgagctccctgctcagctctacggagcctttcctcctgttccccatgggtcggcctgccccttgtcttctcagccgctggctggcctggggcctccactgtcccctccgcacaccggccgacttctaaaagcctcttccaccaccactatgcaggacactcaggcctcatggtactgggctccactcccacagccaagggcctccccgaccaccctccagcttatcccggagcttcagtccccccaaactccagggccttttccccacaccccctcctcatggcataactcaaactccgcgccctgcaacctcgagtcctcaaagtcctcactcctgtcctgaccagggccttcctcctgcaaagacgccacggccacccgcaaggcctcctggtggaacctcccccgcgccgcttccaggcccggggcctgctctcctgcccccctccccagcaggcctcggccgggcctgccacctcttcgcccaactccaaccccggcctcccgaccccaccctcacagagccagcagcctctcaggcccgaggcctcccctgtccccagcgcggctaggcctgcttggcagagcctcactttcccctctttcacttgccccacgtcggacccaagtttccctcgtcagcggccaggccgcggccagcggtccccaacccacagccccgcctcccagcccaactggccggttcgccctccccggccgttcatcccggcgccccaggccgccctccatccaggcccggccctttggtcccggccgccttcaggcctggggcccccgttcactcccattcagcccaaggcctcttggcggcgccgcgccccctgccacggcagcccggcagtccgggatccccgggccgtcgccccgcttggggcctccttggcccttcccgcctgtccgtcattcgagcctccctcgcttgtttaagccgctccgggcccccctccactcgctctccggtccctcctcgccgctcgagccgatccgagtggcctccggcgctccctgtcctgcgggtcgcacggtcgctcggtcgcttagtcagtttggcacccgagaccccggttgtcggttcgctcccgtcagccctgggccgtcagacaggccgcggcgccccgaccctttcgttcggcctctccccctgccccattccctcgctctccaatctgctgtcctcccctccgcccatcggcttggcctccggaatctcgacccccgtggcgtgtcaggcagatgctggagccccggggccatcagtcaggttcggtggccccgggcctggcctggccttgccttaggccgggcctcctaacctcggcccctgcccyagggcagccgggccatcgctgcccaccggttcgacatccgagactctcctgcccggcccagccgagtgtcagttcgcgcggcccacagccgcaatccagcctcagtcgcccgggcccagcctgcttcgctccagaccgggcctcctggcctcgccccccgcgcccccgagccaggccgcggtgcgggtcagcctgcccatttaggtctccgtctttactctgtccagccctgtcagtcacaaaattcattctccgatcctacgagctggctttcagcgccccaggctgggccttgccccgggcctcccggcctcgccccccgcgccccccggccgctgggccgccccttgctcttagccagaggtagcccctcaccccgcgacttaccccacaccccgctctccagaacccccatatgggcgctcaccgcccgcccgcacagctcgaacagggcggggggagcgttggggcccgaggccgagctcttcgctggcgccgcctcccgggacgtggcctccatggtcgttgccgccgctacctcacagaaccagcaactccgggcgcgccaggcctcgggcgccgccatcttggggaggtgcgcgagcccgagagtgtcgcccgcggaccgccatcttgaaaaggtcagcagttaggacggctccataagcgatatggggaagaatgtgaattattctaaagaaatttcgaagaaattagcacactttccaagtctcttaggagctactattttagataaactcctagatcaattatacttgggtgtggtatgactaaggggatgtttcttagcaaagcctcctcgggtgcaaacatcagctacccctaacctctgcctgcggctggtagtacatgccaatctgagcatgtgttcgcgaccacgatgagtgtgccgcacttccggccagatcgccggatttccgctgagtgacccttacaagtccttcttgatcctgaactgggttaggtgccgctgttgctgctcgtgttgaatctagaaccgtagccagacatgggactggaggacgagcaaaagatgcttaccgaatccggagatcctgaggaggtaaggcaaggcgatccactcggccctcttctctgccctgaagcccaggacctagcccgccaaaacacgcacggggccctcttagcccccagtttaccctctagggtttgcatagtcgggagctctagttccctcgacctttccccagaattcgtccggtgactttggacagatagatgactagtttttctctgggcctcggcttctgcattctgtgaatgtagtgaaggtttgagagcgaaaatgttttgtggactaaagtcttgtaaaaatatgacctatgtttgcagtcagtcagatgttctgaagcccgcgtttcacagatttggggagcaaacagaccgccttgccccagctcaggttaggaatccctaccacatcttctatggaggttcggaagacctggccttgtgttccttttctttgaggaaggtgtgtgtctttggggacaatgaaagaatgtacgatgtgattctgtgatggaagagggagctctttcccagagaaagagtgctgctataattattgactgcttgctattccaagtgctttatatgcactaattaatttttttttttttttgagatggaatctcgytctgtcgcccaggctggagtgcagtggcgtggtctcggctcgctgcaacctccgcctcctgggttcaagcgattctcctgcctcagcctcccaggtagctgggactacaggtgtccgccaccacgcctggctaatttttgtgtttttagtagcgacgggggtttcactctgttggccaggctgatctcgaactcctgacctagtgatccgcccaccccggcctcccaaagtcctgggattacaggcgtgagccaccgcgcccggccctaattcatttcatctacacactattcctatgaagtaagtgttgggtactattagtgccatttttacagatgaggaaacaagcatagaggttaaatatcttttctaaggtcatgcagctaccaaattggtgcagccaggaattgcggccaagcagcgcggttctagaaccaggactcttatcaattttgcgacacagctactagttgtttctaatctcatttcctgtccgtctgttctctggtcacttgggggcagccattctgggctgtgggttcagaataattggagacttatttatcccttaatttttctagtcttattatttctaaaaagaaatagaacctgaggccgggcgcagtggctcacgcctgtaatcccaacactttaggaggacggccgaggcagacaggtagcatgagtccaggagttggaccagcctgggcaacgtggcgaaaccccgtctctacaaaaaatataaaaattagccgggcatggtggtgaacgcctgtggtctcaactgctcgggagtttgagcccaggaagtccaggctgcagtgagccgtgatcgtgtcactgcactccagccgaggcaacccgagtgagaccctgtctcaaaaaaaaaaaaaaaaaaaaaaactaaagaaagaaatggagcctgcctcagaaaggtcagcaagatccaccgctgcaatagatgagaaaaagcaagtaattaagcagtcagttttaaactagggtattctggccgggcgcggtggctcatgcctgtaatcccagcactttgggaggccgaggcgggtggatcgggaggccgaggcgggtggatcgggaggccgaggcgggtggatcaggaggtcaggagatccaaaccatcctggctaacatggtgaaaccccttctctactgaaaatacaaaaaattagccgggcgtggcggcgggcgcctgtagtcccagctactcgagaggctgaggcagaatggcgtcaacccgagaggcgaagcttgcagtgagccaaggtcgcgccactgcactccagcctgggcgacagagcgagactccgtctcaaaataaataaataaataaataaaataaaataaactatggtattctatgaggaacccataattttttttttttgagacggaatcttgctctgtctcccaggctggagtgcagtggcgtgatccggctcactgcaacctccgctcccgggttcaagcgattctcttttgcctcagcctcctgagtagctgaaattacaggcgcacgccacctaatttttgtatttttagtagagacagggtttcaccgtgttagccaggatggtctggatctgacctcctgatccgccctcctcggcctcccaaagtgctgggattacaggcctgagccaccgcgcccggctgaggaacgcaaaattattgaggattaaatctttttatctggtgtgatcttggtttttctcagtgactggaaattttacatgtagcaatccatattcaaacatatttggatttattttttcaaaacctgccatgttatttttgacacaaaattatcagtgacacagaattaccagtgttgtagcattgctaatagggaaatgatataagggtcttgtatctacggtcctaatttctgttttctaactcgggcagaatgtaattttagtttttttgggaaaactttttcagtttttttttttttttttttgtgacggagtctcgctcttgcctggctggagtacagtggcgcgatctcactgcaacctctgcctcctgggttcaggcaatgctcctgcctcagtctcccgagtagctgggactacaggcgtgtgccatcacgcccagctaatttttgtaattttagtagagatggggtttcaccatgttggccaggatggtctcaatctcttgacctcgtgatcctcctgccttggcctcccaaagtgctgggattacagacatgagccactgcacccggctttcagtatgttttttaaaagagcagcattaagaaaccttgttaatgaaaaactagaatttacatcctaaatagcatcttcatatttagaagaaacctttgccaattgtgagaataaatagcctggattccaaattgaacctttcctacccctcactcccagcttgtatgagctttggtggcttcactgaatggcatggtagaggatgaaacatgtattaggactttttttggagacggggtctcactcttgtcacccagactggggtgcagtggtrcagtcatagctcactgcagcctcaaacccctgggctcaagggatcctcccacctcggccttctgagtagccatgaccacagacgtgcgccaccatgcccggctaatttatttatttttgagacggagtctctctgtcgcccaggctggagtgcaggggtaggatcttggctcctgcaacctctgcctcctggtttcaggtgattctcctgcctcagcctcctgagtagctgggatttcaggcgcgtgccaccatgcccaggtaatttttgtatttttagtagagacggggtttcaccatggtggccgggctgattgagaactcctgacctcaggtgatctggccacctcagcctcccaaagtgctgggattacaggtgtgaaccactatgcccagcctgtttttaatttttttagagatggggtcttgtcatgttgcccaggctggtctcaagcagtcctctcacctggccctgtattggagttctgaaaacatgattcctgagctagttctttttatttccctagataccttttctttccttgcccccaaatgtgggtatctgcatgcacaggcaggcaaacaccttatttctgaggtcagattttactatatcccaaatttaggcctaaactgttgctcccatgggcagttttttacactactatccttgaagaagaaggaaactaagtttgaggttgtgcatttgaatcagaagtgaataggtggggtctgttctgtatttccaagctcatgagtggagttgtgcacttttatttgatatacttagtctactaggggttctgggagttcagcaagccaaaaagcagtgactaaccatccttagttaagctctgaccaaacaagggwttttaggtttagcagttttcatattcctaattcaagttcacagtctagaaaaaaatgggttttcctcctaacttggtttgggatgtaaggactaaattttgctatttgtagcaatactgggacaaatactttagattatgtaggccccatgtgaacatctggcagcttgaatctgtatcagaaaatgtctaattactgtttattatctctaaactgggattacctccttaagggactgttgtgattaattaaatcataagagatatgaaggtgctttataaactggagagtattaagcacacttaggttcttgttaatgaaagtgagatggtgtctctgtcttgaaatatacctgggattcgttttaaccaagtatggtaaggtgacagacctggagacaaccgcctttgaaagaagagtttattattacttaaatttcctgaaagagagggatatgccacacaaaaaaatgcagagctatatggggaagtgtctgagctcgtcaggaggcagaaggtatgaggggaaggaagcatggctcagcaccttggtttctatgggaaggaattggtgggcagcgtaggtacacttgctcaaatttaggattggatagtttgaataatttcgttgggctctagcttatagggctggttcctagttgtcctatatttgtccctggggtgatttagagaaggggaaacaggagcttagtgtacaaaacttagataaaggaggcagggccaggctgagtggctaatgcctataatcccaccactttgggaggccaaggtaggaggattgattgagcccaggagtttgagagcagcctgggcaacataatgagaccttgtctctaccacaaagaaaatttttaaattagccaggcatgtggcgtgtgcttatagtcctagctactcagaaggctgaggcaggaggatcacttgagcccaggagtttgtggctgcagtgagctatgacagagcaagactctgtctcttaaacaaaagataaaggaggcagtttgctacaagcactttggatagttacgttgcatatgaaaggtatgctcgcaggcaagtttgctgtctaaaaattagccctggaagagcaggattagctccaggattagcaaggcctctaaaatgtaaaaacatcataaaacacagaaaacaaaataacatcgttaatagtgtcagtgtctatcgtcagtaattacatcagtatgatcaggaataaatatgtcataaaattgctgctgacattaattttgttttccttttgtaggaggaagaggragaggaggaattagtggtaagaactgtctcaggtttggaaacatctcagtaaaagcagggtttgagcttcatgaaattctaagggcattttaaggagtttttacttgataccttgtagataatgggggtggaataagctttgatacttcctgtgcagtggagagtttagggtgtgagccttggaagctgagtctgttctgggtttggggcttcttcagttgtggtaccagggagcagatggcatcttgagggcctggcactcaatcatctgctatttgtggtttaataaagaactttgggctaggcatggtggctcgtgcctgtaatctcagcactttgggaggccaaggcaggcggattaccagcctgaacaacgtagagaaaccccatctctactaaaaatacaaaattagccgggcgtggtggcacatgcctgtaatcccagctactcgagaggctgaggcaggagaattgctcgaacccgagaggcggaggttgtggtgagctgagattgcgccattgcgctccagcctgggcaacaagagcaaaactccgtcttaaaaaaaaaaaaaaaaagaactctgaaggaacctttgttagatagtccttctctatgttagcattgcctttctagttgggcagctggggtgcataggcctggttctcagacaaggggatttgaagtttcagacgtgtcatattccaaaatgctgtgttaacaagtaaggcctcctatagatctacttcaagtttggccaggtttcctttaccaccttgtttttcagataggactgaggctttcagtgcatactggcaaccttggaaggcaggaatgtgaaacttttccctactacttagcatcagaattgaatgggagaccgcattctgccatttctggcggcagtgtggctctgccagctggccttctgcacggtaattcagaggcagcaccttggtttggtggttgtgttaatcaaagcatatgtgtttggtgggtctctgctaaaaatgcccattttgttttttttctgtttctacatcaggatcccctaacaacagtgagagagcaatgcgagcagttggagaaatgtgtaaaggcccgggagcggctasagctctgtgatgagcgtgtatcctctcgatcacatacagaagaggattgcacggaggagctctttgacttcttgcatgcgagggaccattgcgtaagtcagtgggaagtcaggaaggggaaaggttgcaatggtcagggaagacttggtgccaacaatctttccatgctagggaaaggcccatcagttactctgggcccaatatatgtgacatatggtgcgctgagcattttatgtaaataacctattctattttattgagagggtctcactatgttgtccaggctgaagtacagcggcatgatcgtagctcagtgccaaccttgaactcctgggcctaagtgatcctgccttggcctcccaagtagctgggactacaagtgcatgccaccatgagaggctaattttttattttttaattttttctagtgacggggccttgttatgttgcccaggctggtctcaaactcctgggctcaagcaatccttccttccatctcggccctctgaagtgctgggattataggcatgagccattgtgcctggcctataaataatcttgcctagggcgcggtggctcatgcctgtaatcccagcactttgggaggccgaggcgggtggatcatgaggtcaggagatcgagaccatcctggctaacaaggtgaaaccccgtctctactaaaaatacaaaaaattagctgggcgcggtggcgggcgcctgtagtcccagctactcgggaggctgaggcaggagaatggcgtgaacccggggaagcggagcttgcagtgagccgagattgcgccactgcagtccgcagtctggcctgggcgacagagcgagactccatctcaaaaaaaaaaaaaaawaataataataataatcttgcctaatccttactacttccactggagataggtatcattatcccatttcacagatagaaactgaggctcagagaaaaaaacataaacatcccaacatgcaccactaaacagtggggaagctggattttgtacttttcaataacagactgttctttaaaaataatttgtattggccgggcgcggtggctcacgcctgtaatcccagcactttgggaggcggaggcggaggcgggcgatcacgaggtcaggagattgagaccatcttggctaacacagcgaaacccgtccctactaaagtacaaaaaattagccgggcgtggtggcgggcgcctgtagcccccagctactcgggagcctgaggcaggagaatggcgtcaacccaggaggcggagcttgcagtgagccaaggttgcgccaaaaaaaaaataatttgtatcctcaaatgtgtctaatatatagtagttggtccaaaaggttgcttttttttttgagacggagtcttggtctgtcgcccaggctggagtgcagtggcgcgatctcggctcactgcaagctccacctcccggcttcacgccattctcttgcctctgcctcccgagtagctgggaccgcaggcgcccgccaccattcccggctaatggtttttttgtttttttttgtttgtttgtttttgtttttttgtatttttagtagagacggggtttcactgtgttagccaagatggtctcagtctcctgacccctgtgatccacctgcctcagccttccaaagttctgggattacaggtgtgaaccactgcacccagcctttttttttttttttgagataaggtcttgcttgctctgtcacccaggctggagtgcagtggcacaattatggcacactacagcctctacctcctggttcaaacaatccttctgccttagcctctgagtagccaggactataggcacatgccaccatgccttggtaattttttttttttttaatttgagactgagttgcactctgtcacccaggctggagtgcagtggcgcaatcttggctcactgcaacctccacctcctgggttcaagcgattttcctgcttcagcctcccaagtaactgggattaaaggtgcacgccaccacacccagctaattttttgtttgtttgtatttttagtagagacggggtttcaccatgttggccaggctggtcttgaactcctgacctccagtgatccacctgcctcagccttccaaagtgctgagattacaggcgtgagccaccgcacctggcccatacctgggtaatttttgtattttttgtagagatgggattttgccgtgttgcccaggctggtctagaactcctgggttcacacatgccactcatctcagcttcccagagtgttgggattacaggtgtgagataccatgcctggcctcaaggggttgttttttaaaagtaaactcaggcagggcatagtggctgacgcttatgatcctagcacttttggaagaccaaggcaggaggaccccttgaccccaggagtttaagaccagcctgggcaagataggggaaccctgtctctacttttaaaaaatcaaaattaaaaaaataaaaataaacttctgcttgactcttacatataacacagtaaggtattttacataaattatacataagcaaagtttgatgtggttgcttctattaaaactaattggatggccagtaaacgtatgaaaagatgttcaacatcattagccaccagggatactaccatgagataacactttataccaactgcccactaggatggctataataaagaagataacgagtgttgacgacaatgtggaaaagttggaaacctcatacgctgtcagtaaaagtgtaaattggtacagccactgtggaaaacatctggcagttcctcaaaaggctaaatatacagttaatatatgacacagcaattacactcgaagatatatacccaagagaaatgaaaacatatgttcacataaaaacttgtacacaaatgttcatagaagcattatttatactacccaaaaagtggaaacaacataagtgtccatcagctaggctgggcactgtggctcatgcttgtaatcgcagaactttgcgaggtcaaggcaggcagatcacctgagcccaggaatttgagaccagcctgggcaacatggtaaaaccctgtctttacaaaaaatatatatataaaagccgggcgcggtggctcacgcctgtaatcccagccctttgggaggcggaggcgggtggatcatgaggtcaggagatcgagaccagcctggccaatatggtgaaaccccatctctactaaaaatacaaaaaaattagccgggcgtggtggcgggcgcctgtagtcccagctacttgggaggctgaggctggagaatggcgtgaacccgggaggcggagcttgcagtgagctgagattgtgccactgcactccagcctgggcgacagagcgagacttcatctcaaaaaaatatagacagatagatagatagatagatagatagatagatagatagatagatatagataaccaggcaagctggctcacacctgtagtcctagctacttgggaggctgaggtgggaggatcacctgagcctggggaagtcaaggcttcagtgagccatgatcacgccactgcactccagcctgggtgacagactgagaccctgtctcaaaaaaaaaaaaacaagttcttttctcaaaaattaaacatagaattatgtactatatgatctagcaatttcacttctaggtatatacccagaagtattgagagtaggcttaaacagatatttccacattcatattcacaatagccaaaaggtagaaacaacccaattttccatccatagatgcaaagatttttttaaaatgtgctttgtatatacaatgggatattattcagccttaaaagagaagggggcyggggcacggtggctcatgcctrtaatcccaacactttgggaggccaaggcaggcggatcacaaggtcaggagattgagactatcctggctaacacggtaaaaccctgtctcaaaatacaaaagattagccgggcatggtggcgggtgcttgtagaaccagctacttgggaggctgaggcaggagattggcatgaacccgggaggcggagcttgcagtgagctgagatcacgccactgcacttcagcctgggtacagagcaagactccgtctcaaaaaaaaaaaaaaaaagagaaggggctgggcatagcagctcatgcctgtaatcccagctttttgggaggccgaggcaagtggatcacctgctgtccggagttcgagaccagcttgaccaatatgatgaaaccccgtctctactaaaaacacaaaaattggctgcgcatggtggtatatgcgcctgtaatcccagctactcgggaggctgagacaggagaattgcttgaaccccggaggtggaggctgcggtgagccaaagttgcgccattgcactccaccctgggcaacaagagcaaaactccgtctcaaaaaaaaaaaaaaaaaggagggaaactctgacacgtgctgcaacattgatgaaccttggagacattaaactaagtgtcaaggaagacaaacattgtattgttccactttggtgaggtacctagaatagcagtcacattcatagagacagaaagtagaatggtagtaaccaggagctgaggggagaaaggaaatggagagttactgtttaatggatatagttttgatttagtaagatgaaaaaggtcccaagattggacgttctagagattgtaggggactgtatggttgtagaacaatgggaatgcacttaactgccacagaaatgtacagttaaaaatgattaaagtggggccttgtgcggtggttcacacctcctacactttgggaggccaaggcaggcatgtcacttgaggtcaggagtttgagaccacctcggacaacatggtgaaaccttgtctctactaaaataaaaaattagctgagtgtaggccaggtgcggtggctcacgcctgtaatcccagcactttcagaggctgaggcacgtggatcacctgaggtcgggagttcgagaccagcctgaccaacatggagaaacaccgtctctactaaaaatacaaaattagccgggcgtggtggcacatgcctataatcccagctactagggaggctgaggcaggagaatcgcttgaacctgggaggcagaggttgcggtgagccattgcactccagcctgggcaacaagagtgaaactctgtctcaaaaaaaaaaattagctgagtgtggtggcgcacacttgtaatcccagctactcaggagtctgaggcaggagaatcacttgaacccgggaggcggaggttgcagtgagccaagattgtaccactgcactccagcctgggggacagagcaagactgcctcaaaaaaaaaaaaaaaaaaaagattaaaatagaaaaaaaaaattactgaagtggaaaattttatgttagatgtattttatcataatttttaacaaaataagtactgaacatgctacaacctggataaaccttgcaaacatgctaaatgctaaggggaaaaagccagtcacaaagtaaaaaatatcgtatgatatgatttgtatgaaatgttcaaaataggcaagtcatgatctgttccctgaattaacatccctactgttgattttccccctcccactgtgtggtcattctaaaaatatttacatatatttgtcagccaagcactggtttaggatctggkagtaagatagacatggttcattccttcactgagtttatgagccagcataggaaacagaagtagaacaagtgctaaactttggtaagtctctcaggtatacctttctcagggtaatattaactgaaccccccgccccgcctcccatttattttcctcctagcatttcccattatcacaggttaccttatttatgtgttcattttaactcattaccctgtaagtttcttaagtggcaggcatgttttgttacagttataactcactcagcacttagaacactacctggcatataggagatgtcctgttgaattaatatgtaatgttaatgtcactgatggggaggtacaagtttttgtggaaagataggagggacagatttgtgtgtggataggggcttgtttagagaaggcttgcaggaaatgacagttatcagatctaaattctaaaggaagaataaaagatgaaaaaagtggggagttcactaggactcaagtgctgcttgcctatgtgagaaggggagtggtgagaagaggggcagtactgtttcaggtcttgaaggaccttgtaagccatgacattaaagctgccarttgattacctccttttctttcccccatctaggtggcccacaaactctttaacaacttgaaataaatgtgtggacttaattcaccccagtcttcatcatctgggcatcagaatatttccttatggttttggatgtaccatttgtttcttatttgtgtaactgtaagttcacatgaacctcatgggtttggcttaggctggtagcttctatgtaattcrcaatgattccatctaaataaaagttctatgatctgcaaacctgcccgtcttttttttttaattgagaatttttttttttaatttgatattttcttttagttttgagggggtggggagcggcaaggaggacagggtcttactttgttggctaggctggaatgcagtggcgcaaacagctcattgcagcctccacttcctgggctcaactgaccctctcaccgtggccccaagttgctgggactacagcatgcatcaccatgcccagctaattttaaaaatattttgggccgggcgcggtggctcacacctgtaatcccagcactttgggaggccgaggcgggtggatcacgaggtcaggggttcgagaccagcctgaccaacatggtgaaaccccgtctctactaaaaataagaatattagctgggcatggtggcgggcacctgtagttctagctactcaggaggcttaggcgggagaattgcttgaacccgggaggcagaagttgcagtgagccaagatcgcgccactgcactccaggctgggcaacagagcgagactccgtctcaaaaaataaaataaaaaatatatattttctagagatggcatctctctgtgtccaggctggtcttgaactctggcctcaagcaatcctcctgcctcagcctcccaaagtgctgggattataggcatgagccaccacacatagaccacaatttttaaacacataagaatagatgtacccatcacctagcaagtatgtatgtcttcatgagggctgggcctggcacggtggcttatacctgtaatcccaaccctttcagaggctgaggcaagaggatctcttgaagccaggagttcaagaccaccctaggcaacatagtgagatcctgtctacaaaattaagtagctgggtgtgatggtgttctcctgtagtcctagctacttgggaggttaagataagagaataacttaagcccaaagttcactggttacattgagctatgatcactgagtctgggacacatagttgagaccctgtattttttaaaagaagaagccaggtgagatggctcacacatgtaatcctagcactttgggaggctgaggtgggaggattacttgaggctggaagtttgagaccagcatgggcaacatagtgagactctgcctctacaaaaaaaaaattatgtaagaaacttttggtcaggtgtggtggctcatacttataatcctagcactttgggagaacgaggtgggcggattgcctgagctcaggggttcaagaccagcctgggcaacatggtgaaaccctgtctctactaaaatacaaaaaaaattagccggtgttgtggcgtgtgcctgtagtcccagctactctggaggctgaggcaggagaattgcctgaacctgggaggcagaggttgcagtgagctgagatcccgccagtgcactccagcctgggcgacagagcgagactccgtctctaaaaaaaaaaaaaacttttcaatttgggaggccaaggcgggggaatcatgaggtcaggagatcgagaccatcctggctaacacagtgaaaccccatctactaaaaatacaaaaaaatcagctgggcatggtggtgggcagagaatggcgtgaacccgggaggcgaagcttgcagtgagccaagattgcgccactgcactccagcctgggcaacagagtgagactccatctcaaaaaaaaaaaaaaaaaaaacctttttggccaggcacagtggctcatgcctgtaatcccagcactttgggaggtcgaggtgggcggatcacctgaggtcaggagtttgagaccagcctcaacatggagaaaccccatctctactaaaaataaaaaaaaaattagccaggcatggtggtgcatgcctgtaatcccagctactcgggaggctgaggcaagagaattgcttgaacctgggaggtggaggttgcggtgagctgagatcgcgccataaaaaaaactttaaaaagaaaaaaccaggcgaggtggttcacaacccgtaatcccagcactttgggaggccgaggtgggtggatcacgtgaggtaaggagtttgagaccagcctggccaacatggcaaaacctctctaaaattaggtgggtgtggtggtgggtacctgtatcccagctactcgggaggctgaggcacaagaatggcttgaacaaaacctctctaaaattaggtgggcgtggtggtgggtacctgtatcccagctactcgggaggctgaggcacgagaatggcttgaactagggacgtggaggttgcagtgagctgagattgcactattgcactccagtctgggtgagagacagagactccatctcaaaaaaataaaaattaaaaaaaaaatttatttttcaaaagacagggttttggccgggctttgtggctcacacctgtaatcccagcactttgggaggctgaggcaggtggatcacctgaggtcaggagttcgagaccagcctggccaacatggcaaaaccctgtctctactaaaagtacaaaaattagctgggcgtggtgtcacgcgcctgtaatcccagctactcaggaggctgaggcaggagaattgcttgaacccaggaggtggaggttgcagtgaaccgagatcacgccactgcactccagcctgggtgacaacagtgagactccatctcaaaaagaaaaaaaaaagaaaaggtaaaaaccagaacaaatgctgtggtgtttaggtattggtatgcacacacacacaaaaaagacagggtcttgctctgttgcctaagttgggagtgcagtggcaacatcatagctcactgcagcctcgaactgggctaaagagatcctcctacctcagcttcccatagctaggacttacaggtacatgtcaccatgcctggctaattttttaaaaagggaatgagggccaggcgtggtggttcactgctgtaatcccagcactttgggaggccaaggcagataggtcacttaaggtcaggagtttgagaccagcctggccaggccaacatgatgtatcccgatctctttttttttttttgagatggagtcttgctctgtcacccaggctggagtgcagtgtcgcgatctcggctcactgcaagctctgcctcctgggttcatgcaattctcctgcctcagcctccagagtagctgggacttacaggcacccgctaccacacccggctaattttttgtgtttttttttagtagagacggggtttcactgtgttagccagggtggtctcaatctcctgacctcgtgatccacccaccttggcctcccaaagtgctggtattacaggggtgagccaccgcgcctggccccaaatctcatttcaaattgtaatccccaggtgtcaaaggagggacctggtgggagatgactggatcatgggggtggtttcccccatgctattcacatgatagtgaatgagttctcatgagatctgatggtttaaaagattttgacagtccccccccatctcattgccagctcctctctgaccccgctgctgctatgtgtggggaaaagaaagagggatcagattgttactgtgtctgtgtagaaagaagtagacataggagactccattttgttctgtactaagaaaaattcttctgccttgagatgctgttaatctgtaaccttacccccaaccctgtgctctctgaaacatgtgctgtgtcaactcagggttaaatggattaagggctgtgcaagatgtgctttgttaaacagatgcttgaaggcagcatgctccttaagagtcatcaccactccctaatctcaagtacccaggcaaacactgcggaaggcttcagggacctctgcctaggaaagccaggtattgtccaaggtttctccccatgtgatagtctgaaatatggcctcgtgggaagggagagacctgaccatcccccagcccgacacccgtaaagggtctgtgctgaggagaattagtaaaagaggagggaatgcctctttgcagttgagacaagaggaaggcatctctctcctgcgcgtccctgggcaatggaatgtctcagtgtaaaacccaattgtatattccatctactgagataggggaaaaccgcctcaggggtggaggtgggacatgcggtgggcaatactgctctttaaggcattgagatgtttatgtgtatgcatatctaaagcacagcacttaattctttaccttgtctatgatgcagagacctttgttcacctgtttatctgctgaccttctctccactattatcctatgaccctgccacatccccctctctgagagagaaacacccaagaatgatcaataaatactaagggaactcagaggctggcaggatcctccatatgctgaacgctggtcccctgggcccccttatttctttctctatactttgtctccgtgtctttttcttttccaagtctcttgttccacctaacgagaaacacacacaggtgtggaggggcaacccgccccttcagctatgtaagatgtatcttgtttcccctttgccttcccacatgattgaaagttcctgaggccttcccagccatgtggaactgagttaattaagcctcttgtgtttataaattactcagtctcaagtaggttttttgcgaagaggcgcggtggttcacgcttgtaatccagcctgggcaacagagtgaaacactgtcttgaaaaaaaaaaaaaaattcaaatgtacaccaagggtgaaattttgcagtgaacatccctaaacccatcacccagattttagtaaatgtttactgattggtttggctctgtgtcccccgccaaatctcatcttgtagctgccataattcccatgcgttgtgggagggacctggtgggagatgattgaatcagtggggcaggtccttcttgtgttgttcttgtgatagcgaatgggtctcacgagatctgatggttttaaaaacaggagtttccctgcacaagccctttttgcatgctgccatccacgtaagatgtgacttgcactgtactacaataagtaagagtaagactctgtccaggaaaaaaaaaaaagaaaagaaaaaagaaagaaatgcctaagatggccgggtgcggtggctcatgcctgtaatcccagcactttgggaggccaaggcgggtggatcgcgaggtcaagagatcaagaccatcctggctaacacggtgaaaacccatctctactaaaaatacaaaaaattcgccgggtgtggtggcaggcgcctgtagtcccagctactcaggaggctgaggcaggagaatggcgtgaagccgggaggcagagcttgcagtgagccgagatcgtgccactgcactccagcctgggcaatagaacgagactccagctaaaaaaaaaaaaaaagaaatgcctgagactgggtaatttataaagaaaagaggtttaattggctcacagttctgcaggcaagcatgggtggggaggcctcaggaaacttacaatcatggcggaaggtgaaggggaagcaggctcatcttacatggctggagcaggagggatagagagaagggggaggtggtatacactttttgttttgttttgttttcagatggagtctcactctgtcgcccaggcaggagtgcaatggtgagatcacggctcactgcagtctccacctcctgggttcaagcctcagccttccgagtaactgggactacaggcacatgccaccatgcccggctaaatttttttttttttttttgtatttttagtagagatggggtttcaccttattggccaggctggtctcgaactcctgacctcatgacccacctgcctcggcctcccaaagtgctgggattacaggcgtaagccaccacraccagctggtgctatacacttttaaacaacttgatatgagatttgggcagggatgcagatccaaaccacgtaaggttttaaaatggttaacagaaaaatggcttaaaattttaattggctttatatggcattaaatttaattaattaa

SEQ ID NO: 95024 - DNA, 32362 bp, Homo sapiens
  misc_feature (1)...(32362): n = A,T,C or G
ggatcgaattcaatattaaagagagaatctgtttcaagatagcttaaattaaatactggaaatagatttcattcgccctgattggctgactttgttcgtgtgcctattcttgaaagaatcaattattgtgggcaagatgaatgcagactatgttaaataaatataagaccatactggagttgagggtgagggcaatctgaatgcacccaaggcttgcaaattcatggtactgggtggaagggggaagcaaggaatggatgctggggagtcattcaactgacgtccactctacccactcaacatcttctaggctaaccctattcccttcccaggtgaatcctatgtggtccttgccaggagccatggctctttcatcaggtgggagcccatttaggctctccctgaaacactccatcatatgaccaggctgaaactatgctgataaatgaattcaccatcaagaatggaattctgctgatagctcatcatgtttctttattctctgactcaagtgacttgctttttaaaaatttttaaaatatactttaagttctagggtacatgtgcacaacgtgcaggtttgttacatatgtatacatgtgccatgttggtgtgcagcacccattaactcgtcatttacattaggtatttctcctaatgctttccctcctccccccgccacctgacaggcaccggtgtgtgatgttccccatcctgtgtccaagtgttctcattgttcatttcccacctatgaacaagaacatgcagtgttttgttttctatccttgtgatagtttgctcagaattatggtgtctagcttcatccatgtccctacaaaggacatgaactcatcattttttatggctgcatagtattccatggtgtacatgtgccacattttcttaattcagtctatcattgatggacatttgggttggttccaagtctttgctattgtgaatagtgctgcaataaacatacgtgtgcatgtgtcttcatagcagcatgatttataatcctttgggtatacacccagtaatgggatggctgggtcaaatggtatttctagttctagatccctgaggaatcaccacactgacttacacaatggttgaactagtttacagtcccaccaacagtgtaaaagtgttcctatttctccacatcttctccaacacctgttgtttcctgactttttaatgattgccattctaactggtgtgagatggtatctcattgtggtttagatttgcatttctctgatggccagtgatgatgagcattttctcatgggtctgttggctgcataaatgtcttctttcgagaagtgtctgttcatatccttcacccactttttgatggggttatttgattttttcttgtaaatttgtttaagttctttgtagattccggatattagccctttgccagatgggtagattgtaaaaattttcacccattctgtaggttgcctgttcagtctgatggtagtttcttttggtgtgcagaagctctttagtttaattagatcccatttgtcaattttggcttttgttgccattgcttttggtgttttagtcatgaagtccttgcccatgcctatgtcctgaatggtattgcctaggttttcttctagggtttttatggttttaggtctaacatttaagtctttaatccatcttgaattaatttttgtataaggtgtaaggaagggatccagtttcagctttctacatatggttagccagttttcccagcaccatttattaaatagggaatcgtttccccatttcttgtttttgtcaggtttgtcaaagtttagatggttgtagatgtgtgatattatttctgagggctctgttctgttccattggtctatatctctgttttagcaccagtaccatgttgttttggttactgtagccttgtagtgtagtttgaagtcaggtagcatgatgcctccagctttgttcttttggcttaggattgacttggcaatgtgggctcttttttggttccatatgaactttaaagtagttttttccaattctgtgaaaaaaagtcattggtrgcttgatggggatggcattgaatctataaattaccttgggcagtatggccattttcatgatattgattcttcctatccatgagcatggaatgttcttccatttgtttgtatcctcttttatttcattgagcagtggtttgtagctctccttgaagaggtccttcccatcccttgtaagttggattcctaggtattttattctctttgaagcaattgtgaatgggagttcactcatgattttgctctgtgtttgtctgttattggtgtataggaatgcttgtgatttttgcacattgattttgtatcctgagactttgctgaatttgcttattagcttaaggagattttagattttgggttgagatgatagagttttctaaatatgcaatcatgtcatctgcaaacagggacaatttgacttcctcttttcctaattgaatgccctttatttctttctcctgcctgattgccctggccagaacttccaacactatgttgaataggagtggtgagagagggcatccctgtcttgtgccagttttcaaagggaatgcttccagtttttgcccattcagtatgatattggctgtgggtttgtcataaatagctcttattattttgagatacatcccatcaatacctaatttattcagaatttttagcatgaagggctgttgaattttgttgaaggccttttctgtatctattgagataatcatgtggtttttgtctttggttctgtttatatgatggattacatttattgatttgcatatgttgaaccagtcttgcatcccagggatgaagccaacttgatcatggtggataagctttttgatgtgctgctggattccgtttgccagtattttattgaggatttttgcatcgatgttcatcagggatattggtctaaaattctctttttttgttgtgtctctgccagattttggtatcaggatgatgctggcctcataaaatgagttagggaggattccctctttttctatcgtttggaatagtttcagaaggaatggtaccacctcctctttgtacctctggtagaattcggctgtgaatccgtctggtcctggattttttttgattggtaggctattaattattgcctcaatttcagagcctgttattggtctattcagggattcaccttcttcctggtttattcttgggagggtgtatgtgtccaggaatttatccatttcttctagattttctagtttatttgcatagaggtgtttatagtattctctcatggtagtttgtatttctgtgggattggtggtgataccccccttcattttttattgcgtctatttgattcttctctcttttcttcattagtcttgctagcggtctatcaattttgttgatcctttcaaaaaaccagctcctcgattcattgatttttttgaagggttttctgtgtctctgtctccttcagttctgctctgatcttagttatttcttgccttctgctagcttttgaatgtgtttgatcttgcttctctagttcttttaattgtgatattagggtgtcaattttagatatttcctcctttctcttgtgggcatttagtgctataaatttcctccacacattgctttaaatgcatcccagagtcaagacccatcagtgtgctatattcaggagacccatctcatgtgcagagacacacataggctcaaaataaagggatgggggaagatctaccaagcaaatggaaaacaaaaaaaggcaggggttgcaatcctagtctctgataaaacagactttaaaccaacaaagatcagaagagacaaagaaggccattacataatggtaaagggatcaattcaataagaagagctaagtatcctaaatatatatgcacccaatacaggagcacccacattcataaaacaagtccttagagacctacaaagagacttagacttccacacaataataatgggagactttaacaccccactgtcaacattagacagatcaacaagacagaaagttaaacaaggatatccaggaattgaactcagctctgcaccaagcggacctaatagacatctacagaactcttcaccccaaatcaacagaatatacattcttctcagcaccacatcgcacttatgccaaaattgaccacatagttggaagtaaagcactcctcagcaaatgtaaaagaacagaaattataacaaactgtctctcagaccacagtgcaatcaaactagaactcaggattaatgaactcactcaaaaccgctcaactacatggaaactgaacaacctgctcctgaatgactactgggtacataatgaaatgaaggcagaaataaagatgttgtttgaaaccaataagaacaaagatacaacatgacttgctttttaaatggtgcactcaatgtctcgatcctataaaatgaagcacaaatgtgaaatttcaggaagtgtgacagaccaatggagaagacacttttggagttctttcattgtactctcttcttgctttctctgcctatgggtaagattggacattatgtctccccagcagaggaggaggcttggtctcttgtgccagaggggataaggcagccatgttgatggcgtatcattctctgaattagaacctgtgatctgagttctgagatttgagatccaagtccacctgattgctggtttttttcctgccacctccctgccagactgtccttgctcttatcttgctgggaggctgacttctgcagactgactccccaggctccttgccatttcacttctgattggcttggctgattggagacactagtaggagatgggagatggcagatgaaagagtttaggacatttttgctctgttcttccrctgttccagcatcacttctctcgcactagctgtgttccccataaatacaacccccaccaagctacaggatcatgattttcttcccttcttcctttagtcctggggtattgatgcatttcttgttgtttcaagtctctgcatgccacatcatatcttgtttgatttctttaatctgcctgcctctgcaaataacataccctccccaggcaaggcagtggtctgagccaaacttgttcttccacagaagcctgggctgtggcactgggagctgccaatttcttgctgtgcaactttggatatttccctacctctcttgagcttaagtggctccatccagccaggagggattgaatttgatgacctctcatcaccctgaaagttctatgttcctaagtgtcaaaatggcactattgttttaggggtggagttggcccctttctggcctggtatttcccttttggggctagaaccttgtctctgaaggtgcctcacaaaaaagaactcaaagcattgtgagcctagcataaatgccagctctcttaagggttcacattgaaggggacactggaagctttcttgagagaaagcataggcaagctgagcctcagcttcattatctgggaaatgggtataaaatgtgagtgcctctgacctccttgctgtttgggttaaatgagatagtatgtaaaaagtgcctgaaacattcacagtgcttgtatgagaagacagtggttattatgctgatgattacaccaagaattgccatctgtttgttctaaggaatcaaggtgggatacccattgactgttttttttggagtccactattaggtttctctttagctgaattttgggagaaggccactaggctctctcctctgttgtttgcagttttggaggttgctgtctccgccttatggcactcagcccagccttggctgctgctggctgcagggagtggctagggctggacgctgacaagatgcatgggtccagagtataaaggaacccaggagcagctgaaggcaggtcagatgaaggctaggtggctggaactgcaaccatggtgcccagcttcctctccctgagcttctcctccttgggcctgtgggcttctgggctgatcttggtcttaggctttctcaagctcatccacctgctgctgcggaggcagacgttggctaaggctatggacaaattcccagggcctcccacccactggctttttggacatgccctcgaggtatgtggaggtcgggagggtgggggagaaagaaaacatcctccctcctttcagagaatcaggcctaattcccagggggctgtggagggagacttcaaacttgggcagggggatgatgtcctgggatccatggcttccattcagctttcccaccggaatttctccttcactccagcctttcaagctgacttcagaagtgggggcaacttccaagtcagggctcaagcatggcacagacaccttctcctcattctgaggcccaaagtttggaccaggttctgctaaaagctcagcaatgacagaaaggcaatggcagaaatccaaaacctctggayagtayatagaagtaggcaatccattgaaagctcaatcagcgtccgtgttgttgtgtgtagtgtaaagatttccatttgtaaggcaggaaatgagagtgagcatgaagatgagtaccgccacatgacagacctcaccgagtgtctaagcggttggtgtccccaaaggcagggctctcccggccatgcctatgggtggctcaggagccgtgacaccttcccaggttcagatcatggttcgtcttcctgttactccagggtgggaaccaccttagcccctgctctcaggaagatctcttagtttcctactgtattggggatctagaccagaggtttctaattagacacagggcagggaattggaatcaactgggaggagcaaattcctggacctccagtycctggagattcyaatttgtcagattggaactaggagtttacatttataaacctgtccaagtgttagtgttttgatctgcagccagcttggggaatccaggtagagatgccrgagacttttctttctttccctctctttttcctttcctttccctttccctttctttctttctttttttcttctttctttctttctctttctttctttctctttctctctctctttctttctttctttctttctttctttctttttctttccttccttccttccttccttccttccttccttccttccttccttccttccttccttctttctttctttccttccttctctytctctcttttctttctttctttctttttttgatggggagttttgctctctctcccaggctggggtgcagtggcgcaattttggctcactgcaacctctgcctcccagattcaagcaattctcgtgcctcagcctcccaagtagctgggaccacaggcacgygccaccatgcctagctaatttttgcatttttgtagagatggggtttcactatgttgggcaggctggtctcaaactcctgacctcaagtgatccacctgcctcggcctcccaaagtgctgggattataggtgtgagccaccgcgcctggctgacatgccagagattgaggctcagagtgaggcaagttccttctcctaccttctgaactcactttcctcattctcagtctggatgggggcactgcttctcttccttgattgacactagaaawgagcttgacctctaggcttattcttgccctgacagataaccctgtaacatgcatcctgaagacatccaggaaaggaaagtgtgggtcagagagatgaatcagacccaggcctggggttcaaagagcttacggtctgaagggaaaacagacaccagagccttgctcccgagctgggcgaggttcctccccaggattctgccttagccscattattttgatctcagcacctgtcctgttggattgaagtcttctgtttacctattcaacttctgcactagactttggctcctggaggatggagatctgatctgattcatccctgtaccctcagggtccagcataaagcctagcatagtgtaggcatcactaatgaaccagtagtgaatgttggagggtagggagagtatccacagaggagaaagcatgagggagaagaaaagcaaagggaccaggagggcttgggagaggctttgmtaagtacacaagagggccaagggaaggttgaggtctgacgctaaaagggtacaagaggtatttagagagaactttctccctttcttcttgttccctctccacttctacctgccttcgtcaaagttgtgtttgccctcagccagggacttctttaggacagggaccttgcacccccacctccatgtcagagctggctgttttcttccccttaacggcccccacccccaccttgagagtatgcagagggcctggaacacagtctagctttggcttcttggctctaacacaactgtctgaagggccttctcttggcatcaggttgagcagacaaaggctggaggagtgactacttgtgggagctacaaaggtttcctggggaaccattgcaagcacaactcctgcagtcctcaagggcttggcacctctgttcttgcctggattcatacctgaacttgagaaatgggttgggcagagaggggattattttccctaatgtaaaaatgaggacattgaagttcagagagtgcaaagtatttgtctatgtctgtttagtagctcaggagttaggtcgagactgggcccaggacttctgcattttaattcgtaatgttgtcagaccataaaaggttactgcaaagttgattcttaggcccagcaatgatgggagtaggaaggggaggaagactgatgggtaaagggactgggggcagggaagagctgtccgtcaggattaatttctccttcttggtctctgattacagtctggaggccttggtagcatctacctgtcatcctcctcaattctcagaatgtgtcttctggaggtggggacatgtcctattcttccagggtccccctcattccagtctaggaaccagggaggactttgcacatagtaggtgctcagctatattgttggcctgaggttggaacccttgaaagaagccaacaaattggtgtgtgtgggtgtgtgtgtgtgtgtagaatgccagctcccagatcaaggaaatgagatactctgagactgcagaggcctctttcccagccatgccctttgctgtgagagtgcccttgaccttgtgctgtgtagtgaagacagggctgtggctcattttcattcagtaaacattgattacaggccttcrctgtgcccagttagctaagccactttacctctctgtgcttctgtttccctgtcaacaaagtggagataatcatttttaccttactgggttagaaggggatagaaagagataaagtataggtattttgcaaactactgggcagataaacgtcaggtgttaaatcatcatagagggattcttgctacaaaacaccctggggcatttgctttcttcatccccttccttcttctcaaatcaacccagtctttgtgaaccagatatggtccctctttcctaagcaaccagcagtgtctgatcaacaactctgggtctggtcctatgctgaggccagaggatgaagaatcaagacaaagagcttgcctcagaggaactaggtctgtaggagagatgaataacacagcacatgtgttaccaatctttgggcctagagaagggcccctctcggcgtggggagtcagggaaggtccagggaggtgatgctgagrcacattctcaaagatctggaggtagaaacctgtggcaggaagtgcagaagaaaaggcagaaggtgctmtctgtgcaaaaaggcacacaggctggaaaaagcagtgtgtttaggaaattaaattgtcttttggggtctaggacatacctgtgttagtacctcagcgcttctgcagtggtgacagggaggacagaatggagaggatgaggctggaggtagacggggcagtcacacagatccttgaggccaggtcaaaaggctttaccttattttgaggacgatggggaatgatggaaggaatttaagcaagggagagacaagctcagacttatgttttagaaagatcactttggcttcaaggtggcgaacagattgacagagggcaaataggaggcagggaggctagggtggaggtgatccaggcctccaccttgtgttggggagtgagccagtgggctggaggaaagtggaaggtagggcaggccaggtcttggcatggtagccacaggagagagaggcgttgagacctccaccatagccagatgtgagggtcagtgagggctcctccatgtagcaggaaaaggaaacaaggattacccttggagctctgttaattggaggcatcaacacagctggactagagcagaatctagcgaaagtcatcaaaggagagccataagactggattgtaaacaggaggaatgaatttctatgtctcaattttaaaatgtgggcatctgagacccaggaagaggaggctcagtggygggcagcacytgtcagtgtctgggtatgggatcctcgagtactggwtttggagaattccgtggcagagtctcctcccatgacctgctacatctggttctttttgctctggtttgctgatttcaatgtaaaaatcacttggtgggcctgcagggaggaggggctgcctccacagggcatccctcttcatattgatataaaccatggagaaaacgacattccatattcctggctagtttttgggtgggtgatggtaccatccccaggttcagtaggagaggcagattttggggacaaaagtgtacgaacatgtgtatgagtgtgggtttggaaatgctgggtctgaagaatctggagggtgtcatgcagagagttccgggggttgattatgattctggacctcaggagaaaggtaaactggaaagagctgtcaactgagaaattgttggtaggtagatggcacaggaaaccacagaagcaggtgagagctttcagggagaagacgcaagggaagaggccaaggactggatctggaggaacaaagagtgggtgaggagctgcccatggcagccactgggagagaggggaggacatccaggagacagtgcatgagagacagggagtcaactgggctcagcgccagggagggtgctggattccttagcaagatcagcataggagaggtggggccatyacaaggaattggaaacagtgggcacagctctttagagaagttagattatgaagggatgagcaaataaggtgttagctggaggaggaagctgaacaaagggaggtttggtttcattttctttcttttttttttttttaaagtgagagacttgaacaaattttgaatgaggatgggaaggagcctgcagagagggtgaggtctgtgatttgggagagaggggctgattgatgggtgaggtgccttgtggggagggttggaatccagatggactggtcttggacaggccctgcatgcttctctcctgaaacagagggaaacagagaggctgggtgcaggtggggtggtccttcaggtctgccagctgactttttggggtttcttatctgatggtttctattttctctgggaagtacagcaagggtgatctgccaggagtgaggaggggagaggtagagagggcagttgaaataaaagtttttgagaagcagattgtggctgatgccatggggctttccagaaggcatttctgctgatctttgctgaaatgtcaccttagagtggccttcctgacccacccccatccatagtggcagccctgccccttactctgctttttttctttctggagttatcactacatgaaattgtattcttggtgtatttgattctttttattttctttctccccacttggaatgtatgctggtggggcagggctttgtcttgctcaccactgtaaccagaaactagcactgtccctggcacaatgcccatgtgttggaagagtggatgaatctctggggggaaccaactctgggcagcaaagccacccatgcggactgaggacagatgactgcatccccttggactcttgggcatttcttgggtccctgccttcctgcctttttagctgtttggatgttttcctgcattcctcctctcatctgattgggtgctcctgagtctggagttcacctttggatgctgaagacaggagggatgttgggggcagagcacaggctttggaatctaaagactggggcacgatgctagttgtgtgactttgggcaaagcccatcatcacttcctagccaaggcatggtggctagagagtcctggtgaccacactgatctcacccaaagtctctttgctccttctattgagctaggggttctttctgtatgttatctgttcacatgtacatgtgtaatggtttatttgtctttgaaagggaggatggaggatgaagtcatgtttgtcaccagcatgggaggaagtcacctctctgctccctgggrtattttgcattcgatcccctctttccaggctctccatggctctgttcaacctcacagctgaatccccaatgagtttttgtacattgagtctgcttttcccactgatttttatagttatttcagagatgctacatcttctcccttttggttgtttttttcttggcttctagctctttagctttatttaaaagcttggcagtggcttggactcatgcacacatggagctctggtaattttggggtgtggggagagggcccatagtagggagacagctgagactagggcaccaaagggcacctaagggtgtccatcctgaaggagagcagwcctagggggttctagcccccaattcccaatccctgcaggacttccctgggcagtgggagcctgtgtggtcccagagggagacccatggggaaggctatgggcaggtgtctttcactttagcgactaagaagccttttgaggaattaagactgtccaaagatggttggggtattttgaaaagaagtttcctgtcactagagatgtttgagcacttgggcagggattcttactgggtgaaggtgctgggcaggcaccctgtgtgctgggaatccgagaccgacatgacctgccttgagggaactatgacatgctgccgaaaaggaaaccccttcgtctttctcctccctcaccttttgtttttcgaaactcttatccccattttgtgagcagactgattttcattctgaagcagccccctggggcactgtagctgcagcacactggtcaagggtagcttgtttcttggacactggcccactgagcttcgggtcaactggctgatggcttgagcaggcttgctaacaagggctgcagaaagagactaagccaggatccctggtctcccttaactcaygctggactgttccctttggtytttgtaccgcacgtttccacctttaaagagaggtcagggttccactaggcaatgttgaaatccttttccgatctgattcttggagcaaagcttactttaggctcttgagaagcagagaggaaagtggtgacgtatgcttgctcttcccaatccctccagtggtttatttctggtgaggtcaacaaggagtgccaatrtgagggtgggaggtggggctggggagctgggatcagtgaattattttcataccctgctctcttcctgtttccttccttctggagaaaaaacaagccgtcccagaacttccagtcctgtaagtgtcccagctcaggcattctgagggcgagtctgaggcatgcagttgtgtaatccagaggaactgtccaggcagtcacgtgtaccccacagggaggatgcctcagccctcttgaggggctgcagctgcaatagtgggaccaggtgctgggagctgtcctccttcttaccaggctcccggggtaatcaaggcaggtgcctggcaggtgcttctagttctctarctttatttaaaagtttggccatcgcttgggctcatgcacrtgttttttatttatcttagttttctttatttcttaaataaatctaaagagctaggagaaagctgggcacagggaggcagtggcaagctggctgcgacctcgatcagggcacaggttgtgaatgtggtcagcatgagaccagggtctactgtcccttgtggggttgctgcagaggtgcacaagcatagctgataaggagggaagtggggcttggatgaaccagatcagccaaaggctccttccaatcctaagatcctatgagtctggcttttttgtgacttaagcctttccttgacccatccaattgggctttctggacctggtagggatggagagaaggggaatggccaggtgaccaggaagttggcaaggaaaacccaggagggcagatggaaaaataagacagacaccagggaaaggagcacttccagggataccagccaggagggaggcaggcatacaagaatgtttccccttgcctgtgggtggagatgatttttatcactttgtgttctttttgacatcgtgtactcaagggcagtgaaaactcttacagccctgttgggttgaactcaggattctgcgttcagaggcagtgagggaagggatcaatgggatgattacagacgactccacagagggcctaggaggggaagagccctagagaaggcacagacgggtggctggaggccaaaataggcccaatcccatgagcccttggagatagtggcttgggccagaaaggatccctgggggctacattatcagatgcctgtgtccttctttaagaatgttccctggaagatacaacatggatgtcttagtcctttgtgttgctgtaaatgaatacctgagactgggtaaaaggtttatttggctcacagttccacaggctgtacaggaggcatggtcaatatctgcttctggtgaaactgctattcatgaggaggagctttaggaaactgctattcatgaggaagagcagacatcacatggcaagagaggaggaaaggagaaagagagagagagagagagaggtgccagactctttttaacaaacagctctcaaatggtatttctagttctagatccctgaggaatcgccacactgacttccacaatgattgaactagtttacagtcccaccaacagtgtaaaagtgttcctatttctccacatcctctccagcacctgttgtttcctgactttttaatgattgtcattctaactggtgtgagatggtatctcattgtggttttgatttgcatttctctgatggccagtgatgatgagcattttttcatgtgttttttggctgcataaatgtcttcttttgagaagtgtctgttcatgtccttcgcccactttttgatggggttgtttgtttttttcttgtaaatttgtttgagttcattgtagattctggatattagccctttgtcagatgagtaggttgcgaaaattttctcccattttgtaggttgcctgcagccctcccattactgggtatatacccaaaggactataaatcatgctgctataaagacacatgcacacgtatgtttattgcggcattattcacaatagcaaagacttggaaccaacccaaaggtccaacaatgatagactggattaagaaaatggggcacatatacaccatggaatactatgcagccataaaaaatgatgagttcatgtcctttgtagggacatggatgaaattggaaatcatcattctcagtaaactatcgcaagaacaaaaaaccaaacaccgcatattctcactcataggtgggaattgaacaatgagatcacatggacacaggaaggggaatatcacactctggggactgtggtggggtggggggaggggggaggggtagcattgggagatatacataatgctagatgacgagttagtgggtgcagcgcaccagcatggcacatgtatacatatgtaactaacctgcacaatgtgcacatgtaccctaaaacttaaagtataataaaaaaaacccaaaaaacaaacaaaaaacaaaaaaataaacaatatgcaaaatccttaaaaaaaaacaaaacaaaacaaaacaaaaaaaagctctcatgggaactaagagaactcactcaatcctgccagaatggccccagggccattcatgagggatccacccctatgatgccaacacctcccatgaggccccacctccaacattggagatcagatttcaaaatgagattaggaggggacaaatgtccaaattattaaggtttggacatttttcccttcctaatttgtttggatactatcagtgaataggtggcaattgtgagagagaattttacggagagaaaaagcaggcccagcacaggctcaggcctcaacaggaattttatgggactgtaacctaacctctctattccttaggctcctcttccctaaaatgggaccacttagarttgttgtgaggattcaatcaggtcaaaatgtaaggtgcttagaacaaggtctagcacacagcaagtgcttaataaagattagtcattaccatgcctccccacaaactccagagcttggaccttttccaaggcccctgggcaggccactaggagtgttaagtgtatctttgaaagactcccactaaatggggaaaaatagttaaatacattatggtacatccttatagtgaaatactacacaactgttaaaaatagtaatgacagttaagtgcactagcttggaaaggaggacaagttatgttcaatgaaaaatggctggttttgcaaaaatatttattgtataacttcatttacttaaaacacctctgggtgagtaaacgtgactagaaaaacctccaaaggacatgtaccaccctctggatgacctattcaagctcatcccaggtgactgtcccaccatggggcagctcctggaagacaccatgatctttcccaacccagcgcgtttgtgctttctgttttctcaccyggaatgcttttcctttatgcttcacatggccagagactcaccatccttcaagtttcaccttaaatgttgtctccaacaagaagccttccaagattaccctatctaagcaggccctccctgttagtgtctctcatagcactgtttttattctgagcactcactattgtctgtgattattttacttaattgtctacttgtctattatctgtcttctccatagaatgaaagggcagaacttgtctgtctcattcccctgagatgtctagaacagagccctgcacatgtaggccctcaataaaaatgtgttgaaygatacggcaggggtggaattgaggccatttctctattgcacaatgagcaaatattacctatctttataattaaagagctttaatgtggagaagaaagcactttctggctgcagtgcagtagagagttggtggcaggtgctaaatggaagcaggttggctastttggggatgttgagctaaccccggtgtgagaagagggcggcttggaattagagcagtggttgtggggctggagaggggactaagcccagggatgtttaggagaagagggtgcaggagaggtaaggaagcaaccagggcctgcctgggcagccttctcccctgccctcccagggacttggggcctagctggtgacaatgtgttcctgagtgaccttggccttctgtcatcatttcagatccaggagacggggagcctggacaaagtggtgtcctgggcccaccagttcccgtatgcccacccactctggttcggacagttcattggcttcctgaacatctatgagcctgactatgccaaagctgtgtacagccgtgggggtgaggagagaggatggggatctcaggagagggtggggcttcctgagaacaaagggctcagggcatgatatggggaggaagcctgggcctgtgtactaagtctgcgsagctgaggttcccaccctactcataaatgagcctcctctaggaaccccgggtccctgcttgacctgattgtctcctcctgcagaccctaargcccctgatgtgtatgacttcttcctccagtggattggtgagtgagcacctgccttccctgccckgccaacctcagacccgtggtgctgggtgactaggatcctggcctgtcccactcarttggttatcccagatggcctagttctcgggtgcccatcctaagctcagctgctcagtggagagacaagggaggagcaggagagcccccagctgtggggccaaggcatcttctctggcagggcctgattctctagacagggcaaaggctttggagaatgtgtgagtgcgaagaacagtttcctgaaggaggtggcactagagttgatccaaaaggagatttaaataggtagtgctggccagggcaagggcctaaggaaatggtgtggtggtaggaccayggctggtcaccagaggctgtgaggctgtcggggtggctacaaggcagagcccagcttggagatgatgctgggcagggaggacaggccagccttgactgccaggataaggaggtgatttgatgttgagagtaggtgggagtcattgagtattttattttattttattttactttttcctttacagaggtactcaagttaaagccattgagtattctttagccaaggccatatgcttctccaaagctcctcttttactcatgatcctatggtgtcttcagcgttttcctgggagctgagaaagggcagggccaagagggagaacacattcccaatcctatttactcaccgagtaccactgggaagactttttgcttctaaccctctttttagttatcaatgggaggataaaattagaaggcagacagaaaagggttaggaaaatgaagaggtggttttgaagacaggaatgcatttccattgctgggtgtgttggagtggggtaggaagggtcccacctgaggccatgaagcacgaacacggtgggacattccctaagtcctgaagctgtggccagtctcagcagctgagagtcaaggctcagcaggctccccctctgcttggctgtccccagggggatgcgtgtcctttgtctcacatctggcaatgtcatctgacacaagttcctggacccaggctttgtgggtgcagctgagatacagaaactgagttatcctgtcctaaggaaggagctcactcagccaagaactgctgccacctgtctcctgaggtcctggtagcctagggtgagggcatggagggcaatactgggtcgcttagtggcccacccttggagggttccaggctcagggatggagtcgtgtaggatgtgcttagccccaggctgccagggcctggactgaccagccctctctctcccatcccttccccagggagaggcctgctggttcttgaggggcccaagtggttgcagcaccgcaagctgctcacacctggctttcattatgatgtgctgaagccctatgtggccgtgttcactgagtctacacgtatcatgctggtgagctccctgtgccagagtactggaggctgttgcctgctgggctagcccctctccaccctgattttgtcctrgggagagtaggtggtgctctgcagtaaggagaatagctgagccccaaggcctgttctgcctgcaacagcagtgccaaagccctgctctactgacatgtgccscaggctgccactgagtcggtgctgaatctctaagtgtcctggcagcccgatccttgtctccaccaggagacccagccctctttcctcccaggccaaagggtctctgtgagaacttaataaggctcctagcatagcaggtttgaggactgcctatatttgagagtatggggaaaggctttcacatctaaaamgtgtctcctcattttctgtctaccacagctgcccagaattatgtcaatacaactcatctctaagagggatgtcagaggtcagggttagagtcttagggctgggtaatccctaagttatccaggctagtctttccccttgtaggaaactcccctccaggattacttacatatacaccgtgcgggggagctcaccacctctcagccatcctactcccttataggctgccctgactgggagaaaacgtctgtgtgctgtgcaagatctgcctcctggtcctgccctctgagcctgaagcccagaggcttccaaacttctacccaccctatcctgatattccagcaggatggagggcaggacagggactgggagtgtgtgaagggggcttggtggtggaggataggctacgggtcctggagggcagcttggggcatccagcscaactaacccctgcatcgcctcctacacattgcctcctatccctggactccaggacaagtgggaagagaaagctygggagggtaagtcctttgacatcttctgcgatgtgggtcacatggcgctgaacacactcatgaagtgcacctttggaagaggagacaccggcctgggccacaggtcaggagccacctcggggctgaccgcactgtctccaaagccatcttagaggggagagttggcaggggtcctgggctctgatctgagaagagatagggtcctgccccagggagccttagcttgcggggagacaggacctgctcatggtggggtaaacacctggctttagcaaggaggcttaarggcagggagaagaagagcaggatgctctgtggttsgggctagattcctggaatggagtttctctggctctgctcctgggccagtgtctaagccaatccctcctcctaccctctgcttagcagggacagcagctactaccttgcagtcagcgatctcactctgttgatgcagcagcgccttgtgtccttccagtaccataatgacttcatctactggctcaccccacatggccgccgcttcctgcgggcctgccaggtggcccatgaccatacaggtgggcctttcccacaaggctcacctctaggaagcctgggttcctcctcctggyccctctatgccccctcccattataggaccccagttcccctttggacaraagatggcttcccaggcagtgacactctgtgcttttggttcagaccaggtcatcagggagcggaaggcagccctgcaggatgagaaggtgcggaagaagatccagaaccggaggcacctggacttcctggacattctcctgggtgcccgggtgagtacattgttgcccacccctacctgaggactggtcccagagaggtcttcaaccatcctcccaggacagcagaaggagctcttaagcatttcccctctttcctcagcaaatataacctgttcctcgtcccatgaaacatattagcaggggttcagaggtgggcaggtgtagggtgtgtgtgcctgagctgtggagttgggagcctaggtcacgtggtagtggctggacgacatttctagacttctaagatcccccaaaatgttggccttgtagaatcctagaatcttagacttcattcattcattcattcattcagtaagttctttattcatcaattctagaaactcactgagttctgactctgggtcatttccgtgctaggatgcagagatgggaaagacctggcccttccttccagatgcttacagtccagcaggggagacagtaggtagatgttgaccaaaatgtcttcctctggcaggtggtattctatgtgcccagtgagcagaactaacagtcagggctggacaaggtcacaagtcatttggccagagcatttagggasggctttgtggaggaggaggcatccaggctgagctttgaaggaatataggaatctgggggaaggtcctaatccaccctctgaaaaggagctttcactccctcccagagaccttcatttgacaaccaccattatgagttcttcttgttacccacctccaatacctcaagctgtcctattatgccttccctaacccagggaagatgacatcaaactgtcagatgcagacctccgggctgaagtggacacattcatgtttgaaggccatgacaccaccaccrgtggtatctcctggtttctctactgcatrgccctgtaccctgagcaccagcatngttgtagagaggaggtccgcgagatcctaggggaccaggacttcttccagtggtgagtctgagggtgggcccggtttatcctgctcagcccttgggaagggcgatgcccatcctgtcctgaaccatcctggaaatcaggtgaggtggcggctgctatcctgttacccccagtgtcataccttttgtggtggtggggggtggggagagtggttggctgggcacagatgcacccctgagcccattctcccaaaatggagcctttcagaagtgttatgtagagaaagttgtcaacaagaggctgatattttgtgtgctaacttcttctgacggtagaacctgattacccttctgggtccctggatagagtagggagagctgggagagaaagaggtggaaatgtgggggtgaacagagctgagacagctgggagagccagttccttgctacttgcctttggatggcaatactcagcttccagatgccatatctctcctgctggtgaaggagaaaagacttccccaaacttcatcacttaaaaactttccattgttttcccctgtttcttggctcaagactgaactcctaaacacttaaggattgaccctgacctctctgcagtgtgatctctgggagtctctcaagaggctcctycacccttgctggctgcctgttcccctcaggcctttgcttgtggtcagacamcctgcctttctctctgggctcctgagcagcctccaagagggggctaggcacacagcaggggtacagaaaatgctgagccagagggggaactttagatccacttgaaagggactgacctataactccagggtctaggacctggagtatgaagcctccattaccatttctgttggtcatatgtgagaatccccccmccacggggtatccagacacatgccaggtgctatcaggggtgcagaacggaagagaaagagaagccatgctgctcgtggggagttttatggagacaaattcacataatcaaacagcgagagaaaaatcacaggatcacgtggtctgaatgttgagggcagagggaaggagtgaggcttgaactgactttctaaggagggttaaaattcaggcaaagagagagaggtaggcattgtaggctgggtaacaatgtgaacacaacccgaggcagggattagaatatttattttattttcacgtcattccatctagagcttgaagcaacttagaggacagttattcaataaaatagtaaaatgcaaatgaaaaataagagccagtggggagtttggggactctgcaataaaatattgccctgtagttatagttggatgtcacatttgggcctgagcttcccggttgccaaagggaaaagacacacacacacacacacacacacttcacctcattaaataatgcatcaactttggttggttcattcaaccaacgtgtatcagccccagtttctttcattcagctcagtaggggaaaccaagctgaaacctaaagaactgtcctttgtaggcttccatgggggtcctgagagttgcagaagtgaccttgtctttgatggctgggtgcaccttcatctctagggtcctgtgccttcttctcctaccagtgaagatgagaaagggatggagaaaagtggaaccagatcctttagatctgagtgttcacaccatgtcaggcctagcctggccaggggcacttggaactctgtgcctctgactcttgagtgtgtggtggtggtgagggaggaaaactggggctggggtctgctttctcgccaaatcctgttgcttcccattccaagaatgttctggttgtgttgctggcagggatgatctgggcaaaatgacttatctgaccatgtscatcaaggagagcttcygcctctacccacctgtgccccaggtgtaccgccagctcagcaagcctgtcacctttgtggatggccggtctctacctgcaggtgggatgggtggatttgggggtggaaaaggagtycctgcatgctcctctggcaccctctgtgcctttagtcaaatctttgcacttttggggaagagctcaggctttgcgttcagagagccctgggtctaaatcccagccccacaacatatygatcaattcttctacctctgagcctccatttccccttctgtaaaatggggatgagaagagtatctatgtttctaggctgctgtcaggattaaagagaatgttcaccaaggctgccatgtaccaccatgcaggtcatgccctgaacagcaccagggagcaacactcacatagactatgatgctgtgcagtgtgcaacctgcacaactgtatgtggtagcttcataaagagtgttaagcctgtacctggttcatagcaagcacctggtgaatgatagctgttactgttggcagtataatattatgaataataacttcccaagagtcagttagctgaaaaggtttaatagttccttcctgttctacctcatgatggatgggttcattctcccctttattcatctcacaaatgtctatcaggtgctgtacccagtgccgggattacaggaactgggcatcatgatgatcaaagtactgtgatgagtyggatgtggtcatgaackctctgtcactggcagtggtcaggcaggagctggcaccccagttaaggggtcactaggggactctgaccttatgtggaggtaggcctggctacccaggactacctggtcaccaacctctgttctgcccacaggaagcctgatctctatgcatatctatgccctccataggaacagtgctgtatggcccgaccctgaggtaccctttccctgggctgggagatcagacagggtgggggactgggagggtcaccctctgccagaacctggmgagtgtttaagcaaggcctgtcccttcaggtctttgactctctgcgcttttccactgagaatgcatccaaacgccatccctttgcctttatgcccttctctgctgggcccaggtatggagagacccagtatcccaggccctcaggactggggaggagagggtggatgacatcataggggaggcactattagaaggtactctgaataaaggggaatcatgctgggtttgtggtggttctaatgcaggaggcttcttcttgcaattatcatattcctgtccctgggaagtgggtgggatagatgagtcattccaagagagaaccccatgccagacccccaccatgtgaatctacctggtctgggaccctcaccatgctcccaaggtttgtttcataagcccaggtcaaccaatctatcagccagttattcatccaaaaacagttattgacttttgttggctgctaagagcaytgaatgtcatcactctggatgctccattgcacgatgactctttgtgctgcttgctacaggaactgcattgggcagcagtttgccatgagtgagatgaaggtggtcacagccatgtgcttgctccgctttgagttctctctggacccctcacrgctgcccatcaagatgccccagcttgtcctgcgctccaagaatggctttcacctccacctgaagccactgggccctgggtctgggaagtagctctgatgagaatggggtcccagatggctcaggctgtgamctccctgggcaccaccctccccaggctgggtgtggaggagttgggrccccctgccttcaggaggcttgtagtttagaagggaagtaggcattaccatagacgactcctagaggacagtgctatgtaaaaatgtgtgtctataaatgtttatcatgcatgtattctagagctcattcatttattcaacaaacatttggtgagcacctatttcgttcgagaaacttcatttatctcctataattggcaaacttaaaaatgcagcagaaacttacattccaaccttagagactcatagtgagcacaaggaaagttttgccctgagattcatggttatggctgggtaccaccaaatagaagaatggcttaggggagtgccccttcactgagatgtgtttctttgttgaactttgtgtgtgtgtgtttagaatataacagacataagaaaaaattacctaaatgaagactgtacaaaataataaataattctgaagcagactctcttgtaaccatcactgaagtcaagaaatatggaatatggtatcactgatgtgtcttctgctcctcctgagatgggtctctgtggcacccctgccattgtcagtgtctgtgtctcacagtcacgtrgtgctccaggcattcagggttcagctggggaaggtggccaagtggcattagaagggggtttcctggaggaaaggaacccctctcccccacttgaatcagcttaaatcaggccttgaggaggcctgggaggctggatgggagggggccattattccacttctgtaggaagggaaggaacctgtaagacactcatctgggaggagcttgagctgaggcctctgattctggcctctttgaccaagactccatcattgtactgacactctccgagagtgtgtgtcagtgtgaaaaggagctaagagctttggtgtgagaagggatagacaggctccctgtgggagggagataggaggctggggaatggtgggcaccaaagatggattccatttaattcttccagttctctaaacacactctgctgcctcctatgatcctggacatgtgtgtacatgtgtgtgggttgaatgtggagtgtgcaatggacacatacaggtgtggctgtgcctgagtgtctctatatggtgtcatggaatgtgcacagatgtgcactcagcctgagtcttgcccattgcatggactgagcaggttactttttggtcgctcattcatgccctatgggatcctgtggttagagcaactctccatggctgaccacccagaattctgagcccccactgtcctttgttctctgagcatggccagcacgagccctcgcgtgctatctgatactagggacctgctgaacatcctgtgcaggaagttcccagcccactcttctgtcccaaccctctccctctgaccccagtcaagcactgactgtccaggctgctcctttcctgcctcttctcagagcagggctaaagtaacccagtgatttgggaggtcaggggactgggagggaggttctgcctacagccaccaatttagggagaagccctgtcagagaagcagaaaaagatgtcacatcttagtaaaaagaaggtctgtctatggcattcagggacctgggctaaaaatgggggacacctgtgctcagatccagcaagagaagcaaggtctaaatggagagaaactggcacagcagggacaccagtccagtgaagctgtgagaagtaggggactgggtgttgaaacagctccaaggcagtcaccaagtgtggacagggttgaggatgtccctgttcactcggagtggccagccagagaggcaggaaaccaccacaaggctgtggtgtgggggaggaagtgcttggggtccgacatcctctccactggccagacccatttgtctaccttggctcctcccagaccttgctggatagctgcccactctgtgaacttcctgaagagcctgcagacctcatgtgtgagggagaccgacaggtgcctggtcatgtggccaggctgggctcccttttcacgtctcattgcgggtatgagaggctgggtccttgaggccctcatgccagaccaggcctgtgaggctttcctgctcagctcacaacagccctgctggttgggatgtggtgtgtcactgctcagactctggttgctaacttgattcccaatgtggcagtgtttggagtctgggccttgtgggcagtgtttgggtcatgggggtggatctctcataaatagattaatgtcctagaagaaaaccaaggcaataccattcaggacataggcatgggcaaggacttcatgtctaaaacaccaaaagcaatggcaacaaaagccaaaattgacaaatgggatctaattaaactaaagagcttctgcacagcaaaagaaactaccatcagagtgaacaggcaacttacagaatgggagaaattttttgcaatctactcatctgacaaagggctaatatccagaatctacaaagaacttaaacaaatttacaagaaaaaaacaaccccatcaaaaagtgggcgaaggatatgaacagacacttctcaaaagaagacatttatgcagccaaaagacccatgaaaaaatgctcatcatcactggccatcagagaaatgcaaatcaaaaccacaatgagataccatctcacaccagttagaatggcgatcattaaaaagtcaggaaacaacaggtgctggagaggaggtggagaaataggaacacttttacactgttagtgggactgtaaactagttcaaccattgtggaagtcagtgtggcggtttctcagggatctagaactagaaataccatttgacccagccatcccattactgggtatatacccaaaggattataaatcatgctgctataaagacacatgcacacgtatgtttattgcaacactattcacaatagcaaagacttggaaccaacccaaatgtccaacaatgatagactggattaagaaaacatggcacatatacaccatggaatactatgcagccataaaaaatgatgagttcatgtcctttgtagggacatggatgaagctggaaaccatcattctcagcaaactatcgcaaggacaaaaaaccaaacaccgccatgttctcactcataggtgggaattgaacaatgagaacacttggacacaggaaggggaacatcacacaccggggcctgttgtggggtggggggaggggggagggaaagcattaggagatatacctaatgttaaatgacgagttaatgggtgcagcacaccaacatggcacatgtatacatatgtaacaaaccagcacgttgtgcacgtgtaccctaaaacttaaagtattaaaaaaaaaaagattaatgtccccctgcagaggcatatgagtttttgctctaactgtaagggattagttcctgagaatgtgggttttgaaaggagcctggcttcctcagtcttccgtgcttccgctctcactacgtgagggtcctgggttgtagttttgtttattgtgcttgttttgtgttggttgaccttcagccaggaggtggcactttaaagagagcatcatctgtggtagtatagggaggggccagccatagagctcccaagagattatgtcctttgtctttggctaccaaggtgagtagagaaaaactatcaggtgggcacagggttaggcatgtctgagctcagactctccttgggtgaggcttgctgcagcagctgtgggggatgggagtgtggttctcaggccagtggaattatgttcccagggggattatggctgcctctgctgtgtcatgcaggttaccagggaagcagggaaagccataattataggccttacctagctcccatgcagccccaaaagcctgtctcattcccattatgcttcaccaacagcactgagtttatttccaggcagtgggtgagcagggctgagaagttgccccaggttgccagcctcctggctgagaaagcaagcagggcattcaggtttcatgcttcctcacctgctgtggcttctgtgctgtgtctgtactcccaatttccccctcccccaggttctgtccaggaaacttcacgttcagtcaaatttattacgaagttcggctggaaatttccttctttgtgtggtcttttcccagttcctctggcagccctccctagggactcctatgagacaaagtcagaaatggcttctttggggactgagagtgcccagtgcttcttctacccctgtatttcactcagctctgtaaattcatctcagctccaggtaaggtcaaatcctactccctcgatctggactttcagttttcccaatgagggtgtgtgttcaggggcagatgagtcccctttcacactttagacactcacagttttttgactgtttgccggggcctgcaacagcaatctgcttccttcagagggtctggggattctgtcagctttccaggtgttttcctgcactagttcttggaacaaaaattcatgatatgagtctccatatgctactctgtctgtctgaatgggagctgcaagttattcctgcttcctgtttgccattttttcccccaatcagtgtatattaacttttaaaaattagtgaaacatacagaacataaaattggacactttaacacattttaatttcattccattggagaaattggtttcataacatccatagcatgccttttattcattcaaatccatgaaaatttcaaaaaaattatacttaatattagttatgatcttttcccttttataggtctacctttagctgccaccataacatctgctaaattcacactgcagtcttgtcttcaattgcccagagaaggtcctacagcaatttcaatccaacttcagtcaagtactatagctatagtgggaacatgtttactaattctttttcattctacagtagagaaagattatacaaccagaactttacactctttttaggagccctgactgcctagtttagtacaatctgtgctgaacacaaaatgatatttagaaaatgattggtttgtcaacctgaagtcaagaagctctactaagagtaaccgttggtaagaactaacctttctggcacttttacatacctctatgtgagcattttctaaagctttattattctaatactctggatccattattcatcatttaaatgacaagacttttttttttaaataagacttttaaaaactcttttactctatcctcagtaatattggaagccttacagtcatagatgtaccattcctgacccgtgtctattgtaaagaaaaaaacaaatctgactttttgaaatcactttatattaaatagttgaaacaattttcatctaaataatgaacactgactttaccccaggtaaggcttgttaaggtgacagagctggtaattgtgtagaacttagacttataatcagaggtgcaactcttctgcttaaccatatgttcattaatgatgagaacacatagacacatagaagggaacaacagacactgggtcctattggtgggtggagggtgggaggagggagagaatcaggaaaaataactaatgggtactatttattaataatacctgggtgacgaaatactctgtacaacaaactctcatgacaagtgtttacctatatagaaaacctgcacatgtaccccttaatttaaaatgaaagttaaaaataaaacaaacagaaaagtttattattaatcaactcttattagttattcctgtttaattagccatagcattcttagtattgtacaaaattgcacaaaaagttttaagacatacacaactttgacaaggacctagtgttattgcccccatggactgctacaaccatttgcaaatgctttcaaattgtttcttcaagaatcattgtacctgtgagagaagcagcttgccactgcaaactctgtgagacagtcaaaaaactgtgagttcccaaagtgtgagagggggaaaagtctgtctctgaacacatatctccactagagaactggaaagtccagagcatggagaaggatttaaccttacctagggctgacatggatttagggagccaacaaaatataaaagcagaagcagccatgggaagggccctataggcactgctggtccccagcttgagcccagggaagccatccttgactttacctcacagggatccttggggaaggcagccagcagaattgggcagggattacagggtgaaggaagctcctagttgaacttcttttttttaattatactttaagttctagggtacatgtacacaacatgcaggtttgttacatatgtatgcatgtgccatgttggtgtgcagcacccattaacttgtsatttacattaggtatttctcctaatgttatccctcctcccttcccccacctcatgacaggccccagtgtgtgatgttccccaccctgtgtccaagtgttctcattgttcaattcccacctatgagtgagaacatgtggtgtttggttttctgttcttgtgatagt

SEQ ID NO: 95025 - DNA, 45030 bp, Homo sapiens
  misc_feature (1)...(45030): n = A,T,C or G
tcaaaagaagaggccaggcacagtggctcacacctgtaatcccagcactatgggaggctgatgcaggaagacttctcaaggccaggagttcaagaccaggctgagcaacacagtaagacccaatctctaaaaaaaatttttttttaattagctggacatgctcgtgtgcacttgtagtcctactcagaaggctgaggtgggagcattgcttgagcccaggaggtcaaagttacagtgagccaagatcacatcactgtcctccagcctgggtgacagtgagacccagtctcttaaaaaaataataatttttttttttgacacggagtctcgctctgtcgcccaggctggagtgcagtggcatgatctcggttcactgcaacctctgcctcctgggttcaagcaattctcttgcctcagcctcctgagcagctgggactacaggcatgcgccaccatgcccagataatttttgtatttttagtagagatggggtttcaccatgttggccaggctggtctcgaactcccgacctcaggtgatccaccttcctcggcctcccaaagtgctgggattacaggcatgagccaccgtgcccagtctaaaatttttttaaaaaagaagaaaataaaataagaaaggggcctggtgatggaattcactatgctatgagaagcatggtttaactattaaataattaaaaataacaatttaaaaagaagacaactaatcaatctgccctttccagagagaacccaggttagttcactgggaatataattatcttcagccttggggaataggagcacagaatggttctggagaggagacagtgttgaggaatcctccactgtggttaccaggaaggtctcaggtctaaaacgattcctaaactgaggctttctcctaagcctgatcttcatctttggctctccctggtggtgatggtacaggaggcatttgacattctctagacatggggtctggacctgccacctccgccttggtaccacctctcattccaggctaggggaggctggacaaagcacagaggttcattctgggcctgggtgcatcctcctgcccactttccaccctgcctgtgtcaggctaaaagcccctctcccaaagatgtccaattcctaatccccaggacctgaggataaatataaattttcttttaagagaagagtcttactatattgcccaggctggcctgaactcctgggctcaagtgatcctccagcctcagccccctgagtagctgggactacagacactcaccagctgcttaacctgtgaacattttgtcttaaatggtaaaagggactttgaaggcaggatttaattaaggatcttgccaatgggaagatgatactgaattatcccagtagacccaatgtaatccttacaagtgagaggcagtagaattagagagatgtagggatggaaacagaggttagagaggagagaagatgctctgctgctggctttgaagatggtgaaaagagccacgaatcaagcactgcaagcagcatctagaagctggaaaaagcaaggaaacattcttccctggagcccacggaaggagtgtagacctgtcaacactttgactttagcctggtgaagctgattttggacttctgaactgtaacataataattttgttttttgagccactttgtggtaattcattacagtgacaataggaaactaatgtcctgccccagcttctgggcagcactaatctgttctcctaggagagtagggtctaagtgagtgtatggcatgggtagggaatcagaggaggcttcctggaagcccctgcagtcaggttgatctgggttattacagctcatttgttacttaactgaccttgagcaaatttataagtaagactattgttaacaatgcactgtttataggattgctaaaaagtaaatttaaaaatattttcaattatctaatttgtaaattagcaactttttttttcagtcacatctccttgtgggcttacacatattcattcttccattcactgaacaggtgtcacggaacacccagtgtgtgcctggcaccatacacacaatgagcttgtgtctgctacaactctcaagcatttctcactgaagctgtcactgagcttccagttagctcagtgctcaacctcaatgcctccatcctaaatgcaggcctcagccgggcatggtggctcaagcctgtaatcctagcactttgagagaccgaggcgagtgaatcacttgaggttaggagtttgagaccagcctggccaacatggtgaaaccccatctctactagaaatacagaaattagctgggtggtagtggcgtgtgcctgtagtcccagccactcaggaggctgaggcaggagaatcgctcgagcctggtaggcggaggttgcggtgagccgagatcatgccactgcgctccagtctgggcgacagagtgagaccctgtctcaaaataaataaataaataaataaaataaataaatgcaggtctttacaatgcccactcccatggtctcttgtctcagccagcaccgcccccgcttatccccccaggcactgtttctgcagctttcatgagcagcctcttctttgtctttactctgaccccggacaaaagcccccagtgcacttgagggcagtatgcgccctctgatattttccacaccccgttttcatcccatcctctcctctctctgcatttctgccctttttcttaccttctccttctttgagctcccaaacagctgtaccctataagccagaaaagtctagttagagagaagctgagcctcaaccagccaagttagaggcaggtagaagggaccaaagatatgtgtttactggagtttccgggcttctctggtggtgaactgaaatctaaggtattcagccaggatgcctagacctaagcggaatacccaggcagcctcactcaccccagctttccagccccacaacactctcaggtgctatccaattgacccgtaattccctgacctgtggagccacacctacttctgcaagacccatctaagtttcctaatttcacagctccccacccccacctctgcttctaacctccaggtctgaaatgctgagctctgttcctatgatgtctggagctactagccctccttcccagaaaaatggtgggtccaggattgatttttcctcctatctgtgatccagactagtgcatccttcaccccttcatccagtccaggcccagggttttctttcctgcagctcttcctctaaagactaagctgcctctttaggaagaggtgagaacgcaaacattgtaacaggggcaaaattgctttcagtccctttgggcttcagtggtgttgactggccaggtgatggagctgtgggcatgtgggcttgtgatctgggttttctgacctggacgtcgccacaactttacaatgggtgatgctgggcaagtctatgccctctttaggtctgactcactagcctttctgcgcactgacgggggctggtctttagaaggccatgttttatttgagcttggaggttccacacagcaactccagcagtggtgcataatggccacaagagggcgggcaacctcttcagctcataagtgtgtagactgaacaagtgaacctcaaataagaatactatacagtgtcttccaagaagggtataattccatgaacaatgttgctgaagagaaaaaaaaaagaaataaaggctgggcatggtggctcaggcctgtaatctcagcactttgggacgctgaggtgggaggattgtttgagcccaggagtttgagaccagcctaggcaacatgacaaaaccctgtctctagaaaaaatacaaaaagtaacccgggcatggtgatgcgtgcctgtagtcgcagctacttaggaggctgaggaggatcacttcagcccagtaggcagaggctgcagtgacccgagatcgcaccactgcgctcccgcctgggcgacagagtgagaccctgtcttaaaaataaaacaacaggccaggcaggtggctcacacctgtaatcccagcactttggaaggctgagatgggcggatcacttgaggtcaggagttcaagaccaacctggtcaacatggcaaaacctcgtctctactaaaaatacaaaaattagccaggcatggtggtgcacgtctgtaataccagccatttaggaggctgagacaggagaatcgcttgaacccggaaggcagaggttgcagtgagccgagatcgcgtcactgcactccagcgtggatgacagagcgagactccatctcaaaaacaaaacaaaacacaaaacaaaacaaacaaacaaaaaaaaacaggaagggtaattaaccgagggcacactacaaaatgactacagagtagggactggaataggagattcaaattcccagtctgaggggaagtcaggagtcccaagaccataggagtggtatggagaggtcttgtgagcagtggaagaagctgagaatatactttggacatttcaatcatttgagggggtgggaggggaagagagggtgtttagggacaagccatggactgaatattgctccagaaggaccggggtgggagtttcaaaatgagacttgaggaatttagggaagcagagatgatcaatttggcttccttcccttccccaacacagaatacaaaatagagaaatggcacgagttattccaggatttgaggaggacgcctcttttgcaggaggatgcagtgaacagccaaagtcatctgacatccttttccatctttttccttctagtatcccagtttcaaggcccaggaaaggcagggactaacatatggagcagttaccccagagttcaaagggttaatctctaagaattcattctctgacaccagccacagctcttgtccccatctctgggaccgtcccctctgagccccaggttggcagcttccctgaattccttctatgatataatttgtaattcggcagggctctgggacccaggctcagagacccaggctctgctctctcctcagtttccaggagtcagggcttgctctaagggaggaagtaaacaggcctttcccttgctccctctccttttccaggatggggccccgggaccaaagagcttctgtctttccctgccacgcccccacgctgcagcctagacaaggagattccttgtgtcccgacctcaggcaggcatccttgtgaccaaatggtggaaggctggggacagggtgggggaagggcagtcacaaagtcagaaaggatgacacctcccctatccaagattctggtacacccccagagctctgagaccttgaggttctctctccctggctcccatcaacaaagggcagaggaggccaggactcatttgcatataaaaggcctggagaaactgaaaaggcatggacacacagaagctgaacctcctggaagggagatatggagtcagaatacaggaatagggccagacacagcagctcatgcctgtaatctcagtaatttaagaggctgaggcggaaggactgcttgagcccaggagttcaagtgcaccctaggcaacatggtgaaaccctgtctctggaaaaaaatacaaaaattagccaggcatggtgatgcatgcctgtagtcttagctccttgggaggctgaggaaggaggatcatttgagtccaggaggtcgagcctgcagtgagcactactgcactccagcctgggcaacagagggagaccctgtcaccctatctcaaaaaaaacaacaaaacaaaacaaaaaaatggaatacaggaataggggcaacacagggacagggtaagacaggggaccatggcagggtgagccaaacagacttgagagaaataaatggaggcccctgaaagcttctctccctaaaagcagtcaggagtgctggcccagacagggatgcagggatggagccacagaggaagtgagatcccctaggataaaatgagaacactctatttaaaaagtaagacctgaaaagaagcacaaacatctgacaatgagaaactttcctgccaggaggagtgacatgttactgttcacaagaagtaatggtatggacgataaataatgtgatctcacttagcagcaggggctcagatgcccctatatgacctactaccatccaaggacccgtacaaagggctacccatcctggcaggaaatgacatcactcagcaggtaggaaggggtgggtctaccagcccaaacgcttctgggagggccaatccatagagggttagtcctgaaggtccatgtccctcctcaatcctccatcttggccaagagagaggccaaggcttctagactttgggtgaagtaattatgcccccatctcttcatctgttaactccagggagtcctaaattccttaaatccttacttagctggggggagtagtgagagatactaaataccaaaagccataggtcaatcctttagagtcaatatctctatagaagtatctctaggggctgggcataatcccagcactttgggaggctgaggcgggaggatcccttgagcccaggagtttgagaccagcctgggcaacacagggaaaccctatctctacaaaaaaaaaataaataaataaacaattagctgggcatggtggtgcatgcctgtggtcctaactatgggggaggctgaaataggaggatcgcttgagcccaggaggtcaaggctgcagtgagctgtgatcatgccactgctctctatcttgggtaacagcataagaccctgtctcaaaaaaagaaagaaagaaagaaagagcaagctagctctagggacccaataattgagggataaaggcagagactccctagggactagagaaatgatgagccaggtttccatggtaactgatttcagtgcagcctcttcctagtctcagactgagggagaatcaattttgggggagaccacatctaatggataaaagagccacaggattacaaaagggtggaatagttgttacaagaaggtcacatcatcctggcactgctcccagaaccagtgggcctcgaagcccagcttggcactctcatcctctggtgactcaggtggtccacctygaagcctctcccctgggggcttccacacagctctcaagctccctagcctggtggctgccacatccacctcagtcctggccctctctccaccagctataacttttgcccagtccatctcggaacgtggagccccaggtgggccctgttcatccagctcgctgggggccactgtgtccaggaagctgccaatagagacactgtccagccggtcggtggtgctggtgtctggcaggctgtcccagctgcctcgccttgagcggcctgggctcccgcctgtcaggctatattgactgctggtgaggctgctgcaatgactggtcaacgtcccccgctcctccaacagccagcgcactgcctcgatgccctcattcaaggtcaccagctgctgcaggatcttcacatcgatggctcgcaggtaagcctgggggagtgggagaaggaattagtcccagttctggggcatgggtttccccagcgtttccacaggccactaccttgtggttcagccaaccatgtttcactttaagacggatggaattataacggcttgcagtgtaggcttcagaagcagacagactgctgcctaacatttcagctctaccactgattagacatatcttctttgagcctcagtctctttgtttgtaaaacaggattaaatcacttacctcacagggtagctgtgaggattctgaaatgctgtctattaagtactcagcacagtgcctagcacagaggaaggtctcagtaaatgttaagtattaaaatccaatcctattaagctttgaacttcatatttagggtacttctttttttttttttttgaaatggagtttcgctcttgttgtccaggatggagtgcaatggcgcgatctcagctcaccgcaacctccgcctcctgggttcaagcgattctcctgcctcagtctcccaattagctgggattacaggcgtgtaccaccacacccagctaattttgtatttttagtagagacaggtttcaccatgttggtcaggctggtctcaaacccttgaccttaggtgatccgcccacctcagcctcccaaagtgctggaattacaggcatgagccaccatgcccagccacagggtactgactattgagcctgcccatattcaccagaaagacatagaaacaaagaatagcaagatagggtgttaatcaggaagtagattgggccaaaaggaggcaggagctggggaataaagagagctaacctggttccctagtcttttcagggcattggtagcagccaccgagaggggaaagggttggccagagcttagaaggatcagaatcccmctggctgggcattcaggccttcttgcctgtacacaccagtctacctgtctgtactggaagtaaatttgacttacagggtaatctcaagcgtccgttccagctcagatgcactgttaccttccctaagcacaagtctgaacctgtctctccctgctcaagagcctttataggcattgcactgctcttagagagtgccgaatccraacatctacaatagcagggaactccgccctcctcttagagaatgaaatctaaacattttagcaactggcattcaaaagcctgtaacatgtggctctcgcccatctctatagtttcgcctctagcattctgctctgtgaacccaaggtgctgccacaaatgactttttaaaactagttttatttagttttacttttattattattttttgagacagggtcttgttctgtcactcaggctagagtgcagtggcacagtcatggctcactacagcctccatctcctggtctcaagcgattctctcacctcaacctcccaaggagctaagaccacaggcgtgcaccacacctggctaattttattttttgtacagacaaggtctcaccttgttgcccaggttggtctcaaactcctaggctcaaagcaattcttccaaaagtgctgggattacaggtgtgagccaccacacccagcccagttttatttctaatcaaagtaacagatgcacagagattaaagaggcaaacagttccacaagattatgaacatgaacagttctcccatcctggtcctacttcccagaaacaactattattatttatttagttgtttattttggtatttacctcctaatctccatatttatattgctatttcttggtatttaaatttcaggcattttctattgatttcccacactatataagattagggacttaactttcttttttcttttttgagacagagtttctctcttgttgcccaggctggagtgcaatggcgccatcttagctcactgcaacctccgcctccagggttcaagcgattctcttgcctcagcctgctgagtagctgggattacaagtatcacctaccacgcctggctaatttttgtatttttagtagagacagggcatcaccaggttagccaggctggtctcaaactcctgacctcaaataatctgcccaccttggacttccaaagtgccgggattacaaggcgtgaaccaccacgcccaggcaggatttaactttcatcccactccccactcccctgccatacagatacccttcccatcttccatcctcctaataggcaataaaattactcagtgtttactttattaggatttggaaatgctcttcacagctaagccatgtagtttactatagttactttttatttcttacaacattttatccttagaattattattattattatattgcctagtttgctatgtagttatcagcaagtcaacctcaaacactccctcaattctctgaatttccctctccaggcttttgaatgcatgacacgttctatctattccatcttctgagaggcatctcttaaggagccctctgctctgcttccatctgtccttgctgcacaattgccctccagggatctccctccattatcatcttggtaattcctttgcctctttccttagctggatccctcgtttcttagattccatatcttcttttttcatttactccttcatttgggtgaatggttctttccctctagtagcatcctgagaaagttggcataagaggtaaatttattgaagctttgcatgttttaaaatgttattacacatccataagatataatgaaatcatgtcctttgcagcaacatgtatgcaactggaggctataatcctaagtgaattaatgcaagagcagaaaaccaaatactgcatgttctaacttataaatgggagctaaacattgggtatatgaacataaagatggtaatgatagacactggggactgttggaggagggagagaggtgggggcaaggattgaaaaattatttgttgggtactatgctcacttcctgggtgatgggttcaacagtatcccaaatctcagaatcatgtgatatacccatgtaacaaacctgcgcaggtacccccctccgaatctaaaataaaagttgggctgggcatggtggctcttgcctgtaattccagcacttggagaggccaagagaggaggatcacttgagtctaggagtttgagatcagcctaggtaacagagtgagacactgtctctacaaaaaatttaaaaattagtcaggtgtggtggtatgtgcctgtagacccagctcctcgggaggctgaggtgagaggattgcttgagcctggggggtcaaggctgcagtgatccatggtggtgccactgcacccagcctgggtgacagaatgagatttctctcaaataagataaaatagggccgagcgtggtggctcatgcctgtaatcccagcactttgggaggccgaggcgggtggatcacgaggtcaggagatagagaccatcctggctaacacggtgaaaccccgtctctactaaaaatacaaaaaattagctgggcgaggtggcgggcgcctgtagtctcagctactcgggaggttgaggcaggagaatggcgtgaacctggggggcggagcctgcagtgagccgagatcgcgccactgcactccagcctgggcaacagcgagactccgtcacaaaaaaaaaaaaaaaaaaaaaaagataaaataaaagttgaaattatttttaaaaagttattaatctttcctcacactattgatagtttggcaggatatagaattccaggttgaaaataattcttcctcaggggttaaggcattgttccattgtcgtattttatttttgagacagggtcttactctatagcccaggctggagtgcagtggtggcacaatcatggttgactacagccttgatcccctgagctcaagcaaccctcctgcctcagcctcctaagtagctggactacaggcatgtacctacacctggctaatttttaaatttttttttgtagatggggtctcactatgttgcccaggctggtctcaaactcctgagctcaagggatctgcccatcttggcctcccagagtgctgggattagaggcatgtgccatggcacccagcctccatgtcttttaattttcagtgttagcctttaaaaatctaatgccattccaatccctgatcctttgtatgtgacccttttcccattcttgctgaaagcttttaggatcttctctttgttcccagtgttctgtttttacagcaatttgccatggtgtgggttattttcatctattgagttagccacttgatgggccttttcaatctggaaactgacgttcttcagttctgggagattttttaaaattatttctttgatgattatcctccagtatttttctgttctttctgggaatcctattacttggacagagggtgtcctgaactgatgatcctctatgtttttgtttttgtttttttcactcttgcatctctttttttttttttttttgagacagagttttgttgtgtcgcccaggctagagtgcaatggtgcgatcttggcttactgcaagctccacctcccgggttcacgccattctcctgcctcagcctcccaagcagctgggactacaggtgcccaccaccacacccggctaattttttgtatctttagtacagacagggtttcaccatgttagccaggatggtttcaatctcctgaccttgtgatccacctgccttggcctctcaaagtgctgggattacaggcrtgagccacagcacccagtcacatctatttctatacttgctctagtttctgaaatatttcaacttgatcaactcctctttttttttttttttttttttgagatggagtctcactcttgtcccccaggctggagtgcaatggcgcacatcttggctcactgcagcctctgcctctcgggttcaagtgattctcatgactcaggctcccaagtaactggaattacaggtgtctgccaccacatctggctgatttttgtatttttagtagagatggggtttcaccatgttggtcaggctgctattgaactcctgacctcaggtgatccactgccttggcctcccaagtgctgggattacaggcatgagccaccacacctggcctattatcaactctttggtttttcttttttcttttccccgccatgatgtgtttatttccaagtgctgtttctagttctctgaatgtttacctttttacaccttcttgtttttgttcatggctacagtattatcttttatctctttaagkatatgcttaatgatttttataagttcgtatctctctgtattatctccatttcattcaagttgctttttcttttcctttttttttttctttttgagacagaatgtcattctgtcacccaggctggagtgcagtggcacgatctcggctcactgcaacctctacctcccaggttcaagcgattctcatgcctcaaccttctgaatagctgggattacaggtgcccgctaccacaaccagctaatttttgtattttcagtagggatggggtttcatcatgttggccaggctggtctcaaattcctgacctcaagtgatcatccagcctcggccttccaaagtattgggattacaggcctgagccaccatgcccggcctcaagttgctttttcctatttatttaggtctatatagagggtcagatgtctatcatctttaactgctgctcacccttcagagtggatctctacaatgactagaaaccgtgtatgtatgaagcttgccaactctgagcctcactacaggatgatctgattgggctgtttaattggaggtctaaagtctgtatcttttttttttttcttgagttaatcatattccccatattataccactctagagagtataacgtaagcaaggctgtcagtatcctaggagccaagtaggggtaaaggcttggagaggtatttcatgatatttagtactttttaaagtttttgtagagacaaagtctcgctacgttgtccaggctggagtgcagtggcatgatcatagctcactgtagcctcaaactcccaggctcaaactcctcacctcagcctcccagagtgctgtgattacaggcgtaagccattgtgcctggccgtatttagtgtatttttatttagtccctcttgtcctcaactatgctcagtgtcttttaatctagagaccttctgttctattctccatatataaagtcatttgtcacgtaacaatggggatatgcttagagaaatacaccagcaggaggttttactgccgtgcaaatatgacagggtaaatgcacaaactagatgacattttaaaaaatttatatactttttaaaatatggaaaacaaaatgtcccagcacaattactgaatatcaatccctacttgatctgctatgccaatatcaagtgccatatatcatatttgtgtatatgctgtgttataatcttatgaaatcactatggtatatgctgttcatcgaaacatcgtatgttttggtcgtatgatgactgaaacatcatataaatatttgtgtatgtgtacacacttatatacacataaatgtttatatatatgtgcatatatacacacatgataaatgtttatttgacatatgtagtctatcattgatcaaaatgtttatatggtaatcccagcactttgggaagctgaggaggacagatcactagaggtcaggagatcgagaccatcctggctaacacggtgaaaccccgtctctactaaaaattacaaaaaaaatttttgccaggtgtggtggtggacacctgtagtcccagctactcaggaggctgaggcaagagaatggtgtgaactcgggaggtggagcttgcagtgagctgggatcatgccactgcactccagcctgggcgacagagcgagactctgtctcaaaaaaataaaataaaataaaataaaataaaaaattagccaagcatggtggctcttgcctgtaatcccagctactcgggaggctcaggcaggagaatcacttgaacccgggaggcagaggttacagtgagctgagatggtgccactgtactatagcttgggtgacagagcgagactctgattcaaaaaaaaaaatttggccgggtgcagtggctcacgcctgtaatcccagcactttgggaggccaaggcgggcggatcacgaggtcaggagatcaagaccatcctggctaacacggtgaaaccccgtctctgttaaaaatacaaaaaaattcgctgggcgtggcagtgtacgcctgtagtcccagctgctggggaggctgaggcaggagaatggcatgaacccgggaggcggagcttgcagtgagctgagatcgcgccactgcactccagcctggatgacatagcaagactccgtctcaaaaaaaaaaaaaaaaatttacatggttgtttatgttatacatggtctgacaytgaccaaaacgtcattatgtgtgtatgtgtatttacatatacaggtcagatcccgcaggtcacacaaacacagtaaatgttttttgtatttgaaaaatgtttattgaattattcaggaaataactgctttattcacatctatgataaaccagagtaagaccatgcattaatatttgtacattgaggccaggtgtggtagctcactcctgtaatcccggcactttgggaggtcgaggtgggaagatcacctgagatcaggaatttgagaccagcctggccaacatggtgaaaccccgtctctaataaaaatacaaaaattggccaggcgttgtggcgcacgcctgtaagcccagctactcaggaggctgaggcaggagaatcacttgaaccgaggcagaggttgtagtgagccgagatcacaccactgcactccagcttgggcaacagagcaagactccgtctcaaaaaaatatatatatatatttgtacattgagaaaattagacactggaattaaatggacctagatttgagttccagttttgccattaatgagccatatgaaattaaaattgatttctttaaaccttcatttctttattataatatgaggtactatctaaaggtttgtcatgagacatcgaaggaacatattaacatgcatagcataccatctgacaagtataatactgtaaatcaataaatggtaggctatttggctctacatattactatggtcgacttatttactagttgtgatattactgtgtgtgtgtgtgtgtgtgkgtgtgtgtgtgtgtgtgtgrtgtgtgcaggttttcatccagtttttggctcataagccccatagccattgttacagtgtttgttataatgctggggcactcagaaataggcttcaggaaacagtctctttctgaccttctcctgctctcctctcaccttcccagagtagaactctaatctgattgtgggtcataagaccctcattccagagaaggtcctgactcataccctggaggaaggaatgccgcagagagaggccaataagaatctaaacagacaggctttgctgggttttgatcagaccctttttgtccaataacattttgatatggttgtccatgtttcaatcgtggacaaccaataaagtctctttaaaaggcccaaaggaccaggcacagtggcttaagcctgtaatcccaacactctaggggactgaggtgggaggatcgcttgatcccaggagttcaagaccagcctgggcaacacagggaaaccctgtctctaccaaaaaaaaaaaaaaaaaattaggtgagtgtggtattgcacacctgtagtgccagctacttaggaggctgaactgggaggattgattgagccagagaagtacaggctgcagtgagctgtgattgagccactgtactccaacctgggcaacagaaccagaccttgtctcaaaaaataaaaaaaggtccccacaacaggattcagagagcgtccaagtagctgaacagatggagggtggtgcacccagggagagcacagaagttccgcaccccttcccgtatgccttgccccatgcatctcttcatctatatcctttgtaatatccttataataaaccagtaaatgtgtttccctgagttctgtgagccacaccagcaaaccaatcaaacccaaggagggggtcataggaaccccaatttgaagctggttggtcagaaggtcaggaggcccagatttacgactagtgtctgaagagggggacagtcttggggactgagccctcaacctgtgggatgtgacactgtctccaggtagacagagttgaaattaaattagtagacacccagctggtatctgctgcagaactgattgcttgcttgctggtgggaagaaatcctcatatattttggggtcttctgtattaatgattattgttgtgttgcattaagtgaaaaaattaaaaaaacacacacacacagtttagggttttctaaacactatggcaaaagcatagaaaaaaattttatacctgaaattatttgtgtttttggaagaatatcacaactctaattcaattgaacaaatgactattgggtacatggatttgctaataattacaaagataatggagaaattgttcctgcttaatagaagcttgcagtctcaataaggggagatgaacataaataactgcaatatcagactgtacagactattaacttgataaaggagattatcttcaattatttcatcctggagacaaatatatgaacagtgaagacaactgtcctagtccatgaccaaactaaatacattaaacaaagctcctcatactaaaaacacttgtcctgctgttttcccctccctcctttccttcctttctgcctccctccatccctcccttccttcctctttccaaaatttacatctacagccgtgcatggtggctcatgcttgtaatcccagcactttgggaggctgaggcaagtggattacccgaggtcaggagttcaagaccagcctggccaacatggcaaaaccccgtctctactaaaaatacaaaaattagctgtgtggtggcgggtgcatgtaatcccagctactcgggaggctgaggctgcagtgagctgagattgggccactgcactctagcctgggcaacagagcgagactccatctcaaaaaaaaaaaaagaaaaaaaaaaagaaaacaacaacagaacttacatctccagtcttctgctagataaagaattaggtggcacctggttgcacagttagggaggggatcttagaatatgacttttaaacattcaaccagcccttttgttttcagccccacttgtgcccccagttccagaaatacctggtgcttccaacccctaagacctttaagggtttttgcagtataaaatgtgttgctttggcagggggcggtggctctgtaatcccagcactttgggaggccaaggcggatggatcacctgagttcgggagttcgagaccagcctgaccaacatggagcaaccccatctctacgaaaaatacaaaattagctgggcatggtgtcacatgcctgtaatcccagctacttgggaagctgaggcaggagaattgcttgaatccaggaggcggaggttgcggtgagccaagattgcgccattgcactccagcctgggcaacaagagcaaaactctatcccccacaaaataaaaaagtgttgcttttcagctttccccactgctggctcgggactgagcattttttaggtctgagttagttaccactcttccttctgaatttcagtttccaaaattttgttcctattaccttgtctcttattctcattgtcataacggcttcatgccttttatttattttatttatttatttttctctttttgagacagagttttgcacagtcgtccaggctggagtgcagtggcacgatcttggctcattgcaacctccgcctccagggttcaagcgattttcctgcctcagcttccctagtagctgggattacaggtgcaccaccacgtccagctaatttttgtatttttagtagagatggggtttcaccatgttggtcaggctggtctcgaactcctgacctcaggtgatccgcccgcctcggcctcccaaaatgctgggattacaggcatragccaccgtgccggccctcaatctggtatcttgaactggaattcccactgactttattcattcttcaagccccagctcaaatgtcacctcctcgaggaagtcttccttgcccttcctcgagatggaattaatccattcagttatggaaccaatatttattgtttcttattggtgtggcactatgttcgatgaagaaagaaaaggcatcatttcttaccttcagaaggttcataatctagtgggtaagataagacaatgaagcaagcacttaaaattcagtgtggttggcttggcattgtggctcagcctgcaatcccagaacttcgggaggctgacacaaacggactgcttgaggccaggagtttgagactggcctgggcaacatagcaagaccctgtctctattaaaaaaataaataaggctggtggggtggctcacacctgtaatcccagcactttgggaggccaaagcaggcagatcacttgaggccaggagttcaagaccagcctggccaacgtggtgaaaccccatctctactaaaaatacaaaaattaactaggcgggtgcctgtaatcccagctactcaggaagctgaggcaggagaatcgcttgaacccgggaggcagaggttgcagtgagccgagatcacgccattgcactccagcctggacgccaagaacgaaactccgtgtcaaaaaaaataatgataataaataaataatttaaaaatgaaaagttcaggccaggtgcagtggctcatgcctgtaatcccagcactttgggaggccgaggcaggcagatcacgaggtcaggagatcgagaccatcctggctaacatggtgaaaccccgtctctactaaaaatacaaaaaattagctgggtgtgtttgcaggtgcctgtagtcccagctactcgggaggctgaggcaggagaatgggctgaacccaggaggcggagcttgcagtgagccgagatcgcaccactgcactccagcctgggcgacagagcgagactccatctcaaaaaaaaaaaagaaagaaagaaagaaagaaaagttcagtgtggcaaacgctagtggaaacaactgctatacagaggactgtagatacctagagggccataacctaaccaggtcaggaaatgcttcctaggataagggacatgagctgaaaatttaaggttaagaaggactcagctaggatgggcgcagtggctcacacctgtaatcccagcactttgggaggctgaggcagaagatcacttgaggtcaggacttcgaaaccagcctggccaacatggcaaaatcccgtctctactaaaaatacaaaagctagctaggtgtggtggcacatgcccatagtcccagctactcaggaagctgaggcaggagaaccgcttgagcttggaaggcagaggttgcagtgaaccgacattgtaccattgcactccagcctgggtgatgggagtgaaaccctgtgtcaaaaaaaaaaaaatagaaggactcagccagacaaagaggtggagagaagcatttcaagcagaggaaacagcctgtgcctccttccaatttgaaatcgactttctagagcacaaacccaaccacatcactctacagtgaagactcttccaggaggcccttcctgggttctaccagcacttatcatcctgtactagaaatgttcttctgtctcctccttccctaaccagactgtgagctccctgagagcagatcctgcccaatccatttctggtgcttggcccagtgctaaggaggtcacattcagttctgtgattctcttgcctttactatccttgacccctttgatggttcccaggattcaggggtctgggttgtagtgtgttgctgggaaataaatctgagagcagattctataatcctgtggcagtgggattccctgactgtgacagcatcactcccagaatagaagaaagcaaggttttcttgccagaaaaagaaacactcttttcacaccatctcttgaagaaaatagagtataggataaacagctcaggagagatgcagcctcagaggcgactccaaacccaattctccttccaaggagattcaggctccctactcctctccttaacatctacataccagactctctgcccagcgctggggtcctgtatggtttcctcattgctcaatataaatcaggccctagggtaaaagcctggaaatcccagtccgagctcccagagcggggactatcagaatattgttactataaaggttcttaacaatcatctggtttcacagtccccatctccctctaccccctccaccaaaaggaggaaaaactgaggccaggagagagacagagtgctgctcaagaccacaaaacgtttcagaagcagagccaagacttgaacccgtgcattcttccttgcctaaagctttttctcaaactgcctctgtggaggtgggttgtcatagcaacagttctttgggtgggagaactaagaagaagttgccactgtttcccattcccacatatcccagtctggcttgttcactcaacctttgaatggagggtagaggaagaaagcaggagggacgaggcctagaggcaggactgaccttggcctcaagggtaggccttccccctttgtgcaaggagagctgggagaggaacaattgaaggacagtccttagagggcttgaaccagtcctgccttcagtagcccgaaggcaaatcccttgccccaccccttgtccttcctgggtgcaacccagtaggcagggcagagcacaagaagagattaatattaataacatcctggcctgaggaaggagaaaaaataggatggggatctctcctcattctggccccagaaggctccctcccttgtgccctttctcgggcagcctcaggccccaggcaagctgggtcaagaatacagagagacaaaatcaaaagttaaatgcagccccttaaagtttacagatagtttccaccaaggcagagaagagagccagagactgggcgtggctcttccactgactccctatgtgagttcagaatctgcaagcacgttttatctgtaagatgggagaaatgatgaccagttttctcatttcaatgacataaaatgttcagactatctggcacaaagcaggtctcaaagtaaagatgcaaagtgcagtcagatgatctgggttcaaatcatggccctgctttttgcgtgatgttgggcagttattaaactccctgtgcctctgttttcttttcttttctcctccctccctcccttcctcccttcctccccttcttccccttctttttttgagacagggtctagctctgagctctgtcacccaggctggagtgcagtggtgcgatttcagctcactgcaacctcctcttcctgggctcaagtgatcctcctgcctctgcctccagagtagctaggactacaggcacacaccacaacacccatctaatttttgtattttttgtagagacagggtcttgctttgttgcccaggctggtctcaaactcctgggctcaagcgatctgcctgcctcggcctcccaaagtgctgggattacaggcgtgagccaccatgcccaccctgtgcctcagtttctccatctataaaatatcacttaacagggttactgtggagatgaagagagcatcatgtaaagtgctcagcaagctgcctggcacatgcactgggtgaaagttttcaaagcaagtagacagtctagataggctcttactaggccttgagctaaagtttgtacagtgaggcaaaggcaagcccccgcttaggtgggtacagtcacagccttgctctggagaattgggcactcacctccaaccttcaaggccaagtgcacacttggcattcaagtccttctcccagggggcctttcctgactgctccacccaccagactctcttcccagcctctcagctcaggcgtcggagccctggctggtctcagagcccccatgayttccttccccttctccttcacagaccagcttggcacaggctgggcacacaggaagactttagctgacgtactcactgtgggctcctggttgtgagccaggaagccgatggcaattcctcagttccccagaactggctgcaaagtagtggcaggtgtaaatcacccacttcaccggaatcagggccctggggaacctgccagggcctcggctgcccttttggctctgaatctagaccagcagcaatagagaaaggggagggttgctgtttcctcttctccccaagaatgtacagatgagatccaaatatccagtttacctggaagactggctgggaggagactgagtctgaggcgagggaatcagcaccagtggtgctgctactctctgtccctgctatgggtctaggaactttccattattttaagtagggctgggggatgtagaggaaacggagaaggttttcagtgcccctggtccaggtagttttcagcagataggcccctttacccacttcttttctgtgcggaacactgcggcctcacaggaacttaaaccctttcccggttagcagaaggagaaaaaaccggttgccttacaacggggactggcggggaataggtggcccatacaggcggggggaatttgtgctgcgttgggttctcagtacttcccagtcctcatctctctcctcccaattatttggcaggaataacttccaaaacccactgctcccaacccaagtcctcaggaccatcaacaccccactcactcttgggggacaagtaatggacgtcactccatctccaccccagcgtttacggattgatctgggagggattctgagcagttaggtggagagttttaactacctcctctccagcttaactctgggagcatgagttcgtccctcccggccctacactagggactcgtccccttggcccatggattcagcactcaccagctccatcttcagcgccakgatcttgtcccccaagtcgtggccggtgctagacgcccctgggagcagcagggcgccagaggttcccagctcacactcgcctcgcagcccgcggagcagcccttcaggggtcttcctgcccaccttaccctccacatcccgcaggtcaggcgtctgggactccacggtcccctccatgcgggcccaagcctgaaaagggctgggcgaccggacgccggggaccggctcccgggggtcctcccttcgccgctgctaaagcggagcaaaaccggtgggtccccgcccgcgcggcgcgggggcgggaggagggcgccgtaacactcagaaaagccgcgcagcaccgtctgtggatgtattcgagtgctgcgcacacaacctctggccctggattgcgtggggctgggcgattctggagttggacctgaaagagcactcggagacctcagcgccttcgccccaccctggcactgaatccagccaggcacacagcaggcgcccaatacatgtttgcagaatgaagtctaagcagcttcagtcagagatgtgggagtttaaggaacagcggtaacagagagctgcagagggcttggaagtcttcctggagcagaggaattgggtataaaacgatgactggattttagctagacacacacacacacacacacacacacacacacacacaccaccccccccccccaggggctagaattcaggctaacggagtagaaaagggcaaccagtactgaagctgaagaggtccacgttgggcttacaagcaagatgctccttaagcttgactgtgcgtatgaattatctgcggatcttgttaaaatgtaggttctgattttgtaaatctggggtggggcttgagatcctgcattttttttttttttttttttttttttttgagacagagtctcgctctgtcgcccaggatgtagcgtggtggcgcgatcttggctcactacaaacctctgcctccctgggttcaagcaattctcctgcctctgcctcctgagtagctgggattacaggcatgcgccaccatgcccagctaatatttttgtatttttagtagagacagggtttcaccatgttggccaggctggtcttgaactcctgacttcaagtgatccgcctgccttggcctcccaaagtgctgggattacaggtgtgagccactgcgcccagccaagatcctgcatttctaataagctcccaggtgatggccatgctgctggtccacacttcaagtaataagggaccacactttgagtaacaaggttacagaaaatggttctgagatgtttgggttttatttaacaggtaatgaacagccatgaaaactctggtttgtttaggcttttaattcaagtaattccagcccatggttgcagaaggatttacaatgagaagatagttacccctaccctaccctttcacacctctaggcccactcacgtgaaagtagccannnnnnnnnnnnnnnnnnnnnnnnnnnnnnnnnnnnnnnnnnnnnnnnnnnnnnnnnnnnnnnnnnnnnnnnnnnnnnnnnnnnnnnntgtaaatcctaccactattttttcttttttagagacagggtcttcttacattgcccaggctggactcaaactcctgggctcaagcaatcctcctgcctcccaagcagctgtgactacaggagtatgccaccatgcccagccacactacttctcaattttaaacattcatctgctgtttattgtcctattcagataaatatggatatatgggtttaactcacactctgtagttcctttcccccattggcaatatatatttcttttcttttctttcttttttctttttttttttttttttgagatggagtctcactctgtcgcccaggctggagtgcagtggcacgatcttgactcactgcaacctgccctcctgggttcaagcgattctcctgcctcagcctcctgagtagctgggattacaggcacgtgccaccatgcccgactaatttttgtatttttagtagagacgggggtttcaccatgttggtcaggctggtctcgaactcttgacctcgtgatctgcctgcctcagcctcccaaagtgctgggattacaggtgtgagccactgcgcccggcctggcactacatatttctatcactctttttagttcatctaaggttacctttgtaattaactttttttaaaatttagatagagtctcgctatgttgcccaggctggtctcgaactcctggcctcaagcaatcctcccaccttagcctcccaaagtgctgggattacaggcatgagccaccatgcctggcctacctttataattttaagtaacatcattttccttggtactttttgatccatggaagggttttaagttagagatagacaaaacatttgtcttttttttttgagacagagtccrgctctgttgcccaggctggagtgcagtggcaccatcttggctcattgcaacttctgcctcccaggttcaagccattctcctgcctcagcctcctgagtaactggaattacaggcacctgccacaacacccagctaattcttgtatttttagtagagacggggtttcaccatgttggccaggcggatccatccgcctcaggtgatccacccgccttggcctcccaaagtgccgggattacaggcatgagccaccgaacccggcaacatttgccttaaagaaaatcactctggattttgcaaggagaaaaggataggaggagtaaaaatctagagtcaaggagactggctggaaagcaagaaactgaaatggcctgcactggggctgattgtgaggtcaaagaagaattagactagaatggaaggctctttaggaggtaagactgacaggactaggtgactggttacattcatttatagtggcattcaataaaaatttgttaaaaaatacaaatgaatgatttcaacaaatgttacggagagcttactatgtgccagcctttgtgtgtggtgtagagaatacaatggtgagcaagacatacctggactggtcactggagacagacaaggagtcaagggtgactcccagctgtttggcctggtgcagttcactgaggaggggaacccacaggaaatctaggagtgaaaggaaatgattccagaagttgtgctgttgcgttagaggggcctgtgaagatgtcctgctggacatcaggcagcctggagctcaggaaagaggttagaactgccaatgtcagtttgggcatctagattggtaacagaggtcatgagagaatgagatcatccatgaagagtcagtttgaggagaaaagagggtcaggaaggaaccctgagggacatcttttaattatttatttttatttttttattttttgagacggagtcttgctctgtcactcaggctggagtgcagtggtgcaatctcaactgcaacttctgtctcccaggttcaagcgattctcctgcttcagcctcctgagtagctacgattataggcgcctgtcaccacgcccagctaacttttgtatttttagtagagacggggtttcaccgcgttgggcaggctggtctcaaactcctgacctcaactgaccaccccacctcggcctcccaacctgctgggattacgtgagtcatggtgcccagccgggacatcttttcaaatgtaataaaatgtgttgggttttcttccattcttatacatacttactaggaaaaatcatgtatttctttaactcctaagacaagtactgttaacatttcattttgggggatattaccccaccattcaggaagcagatggaatacagaaagctcaaaaaaatctaactggtcttctggcttcctctgtctgcttccaacccattctccacaaaaaaagtaaaggttctcttaaaacagaaattggattatattgctcccctgcctaaaactgttctatggctatccacttcaaacaagcatcaacatcacctagaaacttctcaggaatgcaaaatcccaccctgccccagaccactgaatctaaaactctagggatggggcccagcacctctgttttaagaagtcatccaggtgattctgacgcaagctaaagtttgagaaccattgtgttaagctaactgctttctatgtatgatgttatttaaacctggcaattcttatgtattgttgccagcagagtgcagtggttaagagcagaatctggagctaggctgagtttcaattccacctctcctagctttgtgatattaggtcttatttctttatctgcgacagggatagtaatagcgcctatagccagcacggtggctcactgcccataatcccagcactttgggaggccaaggcgggcggatcacttgaggtcagaagttcaagaccagcctggccaacatggtgaaaccccgtctctactaaaaatataaaaattagctgggtgtggtggcgcacgaccrtagtcccagctactcaggaggctgaggcaggagaatcgcttgaacccagaaggcggaggttgcagcgagccgagatggtgccactgcactccagcctgggcgacagagcgagactccgtctcaattaaaaaaaaaacaataataatgataatagcgcctacctcatggggttgttgtggaattaaacatcatcagtaaggtgcttagaacagtgacagaacctggattttaatctcccttggcctccaatagctgtgcatgccccaggactaggtaacggccttgcccaggacgggtatggggcgggtggtgtgtgccctgtgtccaagggttgcagcccctctgaccctggcgtgccctgtgatctggtccaaggtgctaggcctctgactggagtcgggcttgccatcggcggtgctggggagcgggctgctctcgtgcaggcagccccaccagccagccgggctgcgaactgcctagcacggtctgagcattcgccttactcgctggctgcttacaccccgacgccgctgccgccaccgccgccgccgccgccgccgccctaagcaccgcccgtcgccctctcaccccgcggcagccggcggcgggcgaaacgagagtgggggtctttttaccccaatatactctgtgttttcttagtgactactttcaaaaaattcggacaatttgtgatgtggaaaatggcagataaccgcctggtttaaattcgcggttcctaggaagttagggagcggcctcgtattggacatgctggtgggggcggtggccgctgagaaaagtgagaggaaaagcctccgcgcggtggtgttccggaaactaaagatgcaagccggggtgacttatcgtcggctatctccagtgtgtgcgtgtcgtccgtggcgttacagaagaagaagctgtcgcgcagatgtttatgtgacggctcttgcatatgagggcggtatatgaagaggagtctgttgttatccatcccaccagtgatcagtaaggagtgctaggatacatagtttgctcgtgtggaagaaaacagaaataggtgttattatgtattagttatagtctactnnnnnnnnnnnnnnnnnnnncggcggcggaagcgggggggcgggccaggccggggcggggccgcaagcggcatggaggaggcggaggccgcggcgagccgggccgagcagtgagggccctagcggggcccgagcggggcccggggcccctaagccgtgagtgcctccgcgtgggtgtccggaacgggtagcgctgccggtgcaggtctcctgagccctcgggcggctccgggccctgggaggaggagagaagctggggcagataggatgggacgagggttgaagactggggcaggagaggtcgctctttgctcaccacaggcttgggaaggcctggaacttggtccttgtaggggctaacgaactttgagccgattatttggcctccacccttggacagccttgattcagagagttactccagtctcagggaatttccaggtgatccaaccccactgaagggtttcctgccagcccagagaagttgagccactttccccatgtcacacagtatgggtgcttgcagggaagagttgctgggaggtcctccctcatctccccagaaggcatcagactttgggaggagcatcttaccccatgtggccctctggtcccttcagattcctgaagtcatgggctggccaggacattggtgacccgccaatccggtatggacgactggaagcccagccccctcatcaagccctttggggctyggaagaagcggagctggtaccttacctggaagtataaactgacaaaccagcgggccctgcggagattctgtcaggtatagagatgtcccaaaccctccccaccgagcgctccctcccagcttcctccccacctaaatcaggcactgggacccctgttggccagccccagtgggaaaggggcagcaggttcctagaggggagacctctatgtgtcatgtccctataggtaatgatttgaacccaaagttctggaatcggaacccaagtacaacttctaagcttctgacggaagcctgaagtctgatcaggctggctttgcagagaggcacacccctgtgaggcagttagggccaggacccaggtctgatcccccgcttgggtccctgggcctggctccatctctagaaaccaacaatggaggggaccaaggaaatcaaggtctcaaatagaagaatacaggagcactgggtagggagggccctaatggagggggaagtgtcaggggaggttccctggggaaagtggctgtgaaactaggccctggtcaggggagtagagctaggcagacagaggaagggacaggacccagtttctctggatgtcttcactgcagccagggccctcctttcagaaagaccctctaggatctgaaggaggtgctcctcttaatcatccctacccctcccctcagacaggggccgtgcttttcctgctggtgactgtcattgtcaatatcaagttgatcctggacactcggcgagccatcagtgaagccaatgaagacccagagccagagcaagactatggtagggctaggctaaggatggggtagggggccktggatctcacagctggagtggcaggcagaccctaagcggtgagactctgctgaggagactatctccatgacctgttgtaccccacagatgaggccytaggccgcctggagcccccacggcgcagaggcagtggtccccggcgggtcctggacgtagaggtgtattcaagtcgcagcaaagtatatgtggcagtggatggcaccacggtcagtgggccagggtctggtgtacagtcactctattctgctcagggcatggtccactggcagcagggtctactgcctaagtgggaactgcaactctgccagtttctagctgtgtgactttggagtcctcgattccttatctatagactgggactaatgatttctacttgtcaggattcaatgaaaagtttgtgaagtgtcttgtatgtagtgggatctcaaaagtaatcattcataatagtaggcagtcaattcattgatttattttataaccatcccctggtcctttctttggcctcagccttgtgctgggcactggggacctgaaagtaatcagacctggccctaccttgaggggttcagtgtggtggaggattgtgatacttccaggatgaagcagagacagcagaggctctaagagccatgaaagtcatggaggggagggttgtagaaagacgtgatctcttctgatgggagtgctatagaggctttctggaagaggtggccttcgagctgagttggaaaagaactgtgtgaacagaaacataggcaggaggtgatgtttcaagcagctggtgttttaagtacccctaagacagagacaccttgaatgccagagtgaaaagytggactttgtctctgccactgtgtaggtgctggaggatgaggcccgggagcagggccggggcatccatgtcattgtcctcaaccaggccacggtgagtttctaggggtgggtgacccagagggctggagctgggctcttgctgatgacaccaactcaccagaagtatatcccctgccagggccacgtgatggcaaaacgtgtgtttgacacgtactcacctcatgaggatgaggccatggtgctattcctcaacatggtagcgcccggccgagtgctcatctgcactgtcaaggtcagttattctgtcctgaccctgacccctactccctagctccaaccctgcttctagccccggcttctctgcccctcatataacatagtgggaagattctctgaaggaaggttactcaggttccaatctcagccttaacatttgtattaattcagcaaatagttattgagcaacagctgtatgccaggtacttctctgggtgctgaagatacaatgggaaacaagacagagtccccaccctcatggagcttatattccagcagtgggaggtcaacagaaacagccaagtaaatgtggataatgctagtaaatgataacttgtataaagaagaaaataaagcaggggataatgaatgatagaggggaggggacattttagaaagagaaggcccctgcaaggagatgatatgtgagcagaaagctgaggaattgaggagtgagccaggtgagtatctggaggaagagcattccaggtggaaagaatggcaagtgcaaagcccctatagtgggaaggtacacggcatatttgaggaacagcaaagatgctagtcgaggtggagcagaataagggaggagagtaggagagtggttggaaaagaaggcagagagtggcgggagagagaggtgcagatcgtgtgggtttgtggaaaggacttattagctggatgaccttagaatctctaagccttcagttattattttatctgtgaaagagagtaaccatagagggttattgcaataatgtaatgagctattttaagtaaaaggttgctacatagttcgtgctctgtgaggccaggtctcctggaaccatgccagtcaggctaactgccttctctggtcccccaggatgagggctccttccacctcaaggacacagccaaggctctgctgaggagcctgggcagccaggctggccctgccctgggctggagggacacatgggccttcgtgggacgaaaaggaggtgccggcatcagaggccatccactctgtagtatcaagagcctgggaggagcagaaccctaggagatggggtggggtggggaacaaataggagccagtggcagtgggttggatgaaagtaggcagggagatgggaaaaagcccccaaactggtgtctgggcccccatggccctcattcctgcctcctgccaggtcctgtcttcggggagaaacattctaartcacctgccctctcttcctggggggacccagtcctgctgaagacagatgtgccattgagctcagcagaaggtggagttagtggagcatggatggggcagggcctgggctgggggtgggcatttagatctctctgtggagctttattcctttgattgtgtgcctggggctcttcaaaccttgctggccccatgcctccatgacaaccgcatccttccctcagaggcagagtgccactgggcagacacagagctgaaccgtcgccgccggcgcttctgcagcaaagttgagggctatggaagtgtatgcagctgcaaggaccccacacccatcgagttcagccctgacccagtgagtggggccttaagacagtgaggtttggactccttcccagctcagcaggggggccccaggaatgatctaggttgggctttccctacctgagcctgggagagaaccaggggcaggatttacactgcgctctgaaagacagggctggggtgaaggggcaggccatgtgagtaaagctcagcgctagagttgggctgagtgtgtggagagcccagaacagggaagatcctctatcccttccctgtctactccagtctgcacctaccctcacctgagaagtcttccctaggtggggatcccagtttgaagsgggaataaggcaagagctaaacgctatttctcccacagctcccagacaacaaggtcctcaatgtgcctgtggctgtcattgcagggaaccgacccaattacctgtacaggtaagcctgggaatgggctatacccagcactgaacaggagggtgcttaggtcatctacctccaggaggaactcttgaggtgggcagaaaggcaatagattctagacgcattcacctctgtgggtaagcatagggactctgggcccagctgtaaacacaggggarcctgagttgaggggtgatgaagtgaccctaacctatccctgggctccccaggatgctgcgctctctgctttcagcccagggggtgtctcctcagatgataacagttttcattgacggctactatgaggtgagcaggacttggggggtgcctcgggtggagtacaacatggagcagcagtgattgccagggacgggcaagggagaccgcccaggcaagggctgtgaaatgtgaaggccttggattgcagaggtgggcagrgggaaagtgacctcacatggtgagcagtggccatgtcccccaggaacccatggatgtggtggcactgtttggtctgaggggcatccagcatactcccatcagcatcaagaatgccygcgtgtctcaggtactgcataggcaagtggggatggggcagacacctggctctgccttctaccctaaagctcatgtgycctattcccaccccactcccagcactacaaggccagcctcactgccactttcaacctgtttccggtgagtactaaggatacaactcttgggcctgggaggggggaaacatgggcataaggtctgggcctgttacgtggcaagctcttcccctcactgggcctcatccttcacatctggaaaatgggggtaatgctgcctgcaagaagagggttgggggcaaaggagatcacaggatggagagacccctttgggaccatgatgtcccattccccttctaggaggccaagtttgctgtggttctggaagaggacctggacattgctgtggattttttcaggtgaggggagtctctaggtttcagttgaggtccctcagtctgcagggaaagagtcagtgaggtgtcctagagagctttctggaggacatgagctcacaagtgggggcgaagcctgggcaaaggtaggatggcaggtgttggggctgctgttgaaggtacagtggatgaatggagacagtggggatttgggggaaggaggtactccaggaaggaggtgctcctgagaccyagctccagcaattcyagcatctctgtgtgactagatttatccttgtccctccctgaactctttgaccctgcctctctcagtttcctgagccaatccatccacctactggaggaggatgacagcctrtactgcatctctgcctggaatgaccaggtaggctggaatgaccagggtttagcaggcgagtttatgaggcctcagctaatacctcccactatggcaccctgtccccaggggtatgaacacacggctgaggacccagcactactgtaccgtgtggagaccatgcctgggctgggctgggtgctcaggaggtccttgtacaaggaggagcttgagcccaagtggcctacaccggaaaaggtaactgtcagggtagggtgagggggctggagtcccctaccaactcgaaacatcttaaccttcatcgtggtccatgtctgccagctctgggattgggacatgtggatgcggatgcctgaacaacgccggggccgagagtgcatcatccstgacgtttcccgatcctaccactttggcatcgtcggcctcaacatgaatggctactttcacgtgagtgggaggcagggagcagggcacagtgtggcatgacagtcaagaacaagaacatggactctgaagcaatcttagctctgctacttgctagccatgtaaccttggggaaagagctatcctatttttgcctcagtttctttatctgaaaaatgaggataaagggctgggcgcggtggctcacgcctgtaatcccagcactttgggaggccgatgcgggtggatcacaaggtcaggagatcgagaccatcctggctaacatggtgaaaccccatctctactaaaaatacaaaaaattagccgggcctggtgatgggcgcctgtagtcccagctacttgggaggctgaggcaggagaatggcgtgaacccaggaggcgaagcttgctgtgagccaagatcacgccactgcactccagcctaggtgacagagcgagactccatctcaaaaaaaaagaggataaaatactactacctcactgggttacgatattttgaggtttaaatgagtcaatatatgtaaagtgctttgaattataaacatatataagrgtcagctggtattgtttttatttttactatttttagcactagactgtgggtgtctggggagagtatttctgcctctaagtactggtccagccctgcaatctctgccctttcctgttttggcaagtgctggagcctatgcttcagcctgaggagaacrgggaagtccttaggtaccgccaacccacctggctgcattcagaggaccattccccagttacagcaagggaggccttgagccagcccagcccaaaggaaygaatagcgtccagcttggaacctcctagaagccagaggtccctcagaggctgactaatacgcgagccccattcctctcccagagaggggcaggcgcttccctcaggtcactctcagtaccagagtcaaagtagttttttccttcccagcccagcccgtccctttgcccaccacctcctgcagggcctgtttctgacatctgtggctctagaacagcaggcccagggagaaytacaagaggcagggactgctagttcatgggtctgtggtgcagtagtgtgagctgccgtgacagcatgagctctccagcaatggtggaggccaaattaaagctagtaagagcttgctgaggatgctgcaaagaggatggagaagacggtgggaaattagagggctctttacaggtctaggacttcatttgtgtgtcttatagatgtctggctggtcagcaagtgggtgtgggccagacaatgtgaggtgctgattttcactytcatacccactccaggaggcctacttcaagaagcacaagttcaacacggttccaggtgtccagctcaggaatgtggacaggttggggctggcagcagggcaagggrtggatatctaggagatttggaggccagtccctgaaagtcccttccaatgctgggcctgtgtgtttactccagccctgcggctacagattcccatgtgaccccttgccctgctcagtgctacccatgggacctgagggcctgcccactcccctgacccatttctccctcctcttcagtctgaagaaagaagcttatgaagtggaagttcacaggctgctcargtatggcctargacaattggggtgtagcagggagcaaagagtcaaatactggggatcttggccccataatttacagggtcctgtgcaaaatgaaaatcagggccctcatctcaaacattaggaacttcaggccgggcgcggtggctcacgcctgtaatcccagcactttgggaggccgaggtgggtggatcatgaggtcaggagatcgagaccatcctggctaacacggtgaaaccctgtctctactaaaaatacaaaaaattagccgggcrtggtggcaggcgcctgtagtcccagctacttgggaggctgaggcaggagactccagcctgggcgacagagcaagactccatctcaaaaaaaaaaaaaaaaaaagaacttcaaggtggcaacagcagagcattcaaccaagtacagggtcctgtgggacacacccatgaagtgggccctgtcttggctatattctcccaccctctactgcagtgaggctgaggttctggaccacagcaagaacccttgtgaagactctttcctgccagacacagagggccacacctacgtggcctttattcgaatggagaaagatgatgacttcaccacctggacccagcttgccaaggtgctccaataccatgcccaccctggagaamccctccccctcacacacatactgccccaagatccagggagcctttgctctggaatcttcaacctcagaacctcctctttatactcttagaacacctcttccaacctccttgtccaaattcatattctaaaagatgctatctcttacaaattgaggtggtttctgaggaggggtgggggctgggccaaagggtcgtcagtgacccctccctacagctctctgacccatgtctctgtctccatcccaccctcactagtgcctccatatctgggacctggatgtgcgtggcaaccatcggggcctgtggagattgtttcggaagaagaaccacttcctggtggtgggggtcccggcttccccctactcgtgagtgacccttttctgccctgggaaacaggaggcctagtgagatccagggatatagctaatggcttcttctctatacattcttgtattattttcccagagtgaagaagccaccctcagtcaccccaattttcctggagccacccccaaaggaggagggagccccaggagccccagaacagacatgagacctcctccaggaccctgcggggctgggtactgtgtacccccaggctggctagcccttccctccatcctgtaggattttgtagatgctggtaggggctggggctaccttgtttttaacatgagacttaattactaactccaaggggagggttcccctgctccaacaccccgttcctgagttaaaagtctatttatttacttccttgttggagaagggcaggagagtacctgggaatcattacgatccctagcagctcatcctgccctttgaataccctcactttccaggcctggctcagaatctaacctatttattgactgtcctgagggccttgaaaacaggccgaacctggagggcctggatttctttttgggctggaatgctgccctgagggtggggctggctcttactcaggaaactgctgtgcccaacccatggrcaggcccagctggggcccacatgctgacacagactcactcagagacccttagacactggaccaggcctcctctcagccttctctttgtccagatttccaaagctggataagttggtcattgattaaaaaaggagaagccctctggggatgtcttgtgattgtgattttgtgtgtcaggggggtgctggagggaagtggtggagagaatacttgtgttggatggtgagttttccttactgtcctccacagagtttatcttccatttggggccatttggccaccaggggatgcctgagtctcaaactccaaggtttttccccaactctaccctaggacagcttgactttagccccgccctacttgaggcttggagcagccaccctacctcttccccaccgtttaaccaccagccgggttcctgcttatcttgcctgggccgggcacctgtccccagagacagagcaggagagaacaaaaagggatactggggagttggaagaggaaatgagagagcaggtgtgcatagtaggggtgggaaggaagtggatgggacaggactgggcaggcatcattcaagagacgggctagggtgcagatggagatgtaggagcaagggtgtctatggcccttagagcactttgctattcagaattctctatctgggcatttttgtggagaaatgggtcatggtcttcatcagattctcacatagccagtaacccaaagaggttaggaagatctaagttagtcataggggcaccagaaaatggatgggattgtccagagggagtgaatgagaaagcctacggcagggaaaagaacatttaagggatctgtgaagggcctaatgtcaggaggatgagtgtggagcacctcttcagaaagggtctgcctgcctctgtacaagtacagaactccagctggaactccagccctcctgcctgctctctgccctgcctctttcacaggtgcttggagcccaactcggtgacagcatgggtggtatgtcgcttggacatatctcgccaccctgacgccttcagtgtttgttggagctggatatagtgcctgaggtggcacaacagccaggttgagcagcaattagcccatgatgaggtagaggcccgccctgggcaaacaaatcccatgcagcctccacacaggcacacggcagaggagaagtgtgagaggcacagtatggtggtgaaggggtgaggcaggctagctcctccccctgtcccgcaccctagcaggctcctggtctggccctcacagaccagctctaaggcactgtttggttctggccaggtccctcttcctttctgggctcagcaagggggtggtggttctgggctgccctggaaaagctcaggaagagagttacaggggtcaaagggaagtaaggagggggactggtttgttaggctgggctttgcttggtagcagacactgtaccctcttgccatagcctccctcaggcctctcactcctggctcaacagtgatcaggtctatatcagacattctggccagctgccccttcaagtggaactagtaccatgtcagccaggactacaccaggtgctggagttctgggcccaaatctaggctgagctcttcacagaagcctgtgggactggggcaagtatcttggcctttccgatccctagtttcctacctggagcatagggatagttagggctaaagaagagatgaggtctaggtcaggtgaggtggctcacgcctgtaatcccagctctttgggaggctgaggcatgtggatcacctgaggtcaggagttcgagaccagcctggccaacatggtgaaaccctgtctctactaaaaatataaaaagttagccgggcgtggccgggcacggtggctcatgcctgtaatcccagcactttgggaggccgaggtgagtggatcacgaggtcaggagatcaagaccatcctggctaacacagtgaaaccccgtctctactaaaaattcaaaaaattagccgggcgaggtggcgggcgcctgtagtgccagctactcgggaggctgaggcaggagaatggcgtgaaccccagggggcggagcctgcagtgagccgagatcgcgccactgcactccagcctgggcgacagcgagactctctcaaaaaaaaaaaaaaaaaaacacaaaaattagccgggcatggtggcaggtgcctgtaatcccagctactcaggaggctgaggcaggagaactgcttgaacccggaggcagagtccgcagtgagccgagatcacaccattgcactccagcctgggcaacaagagcgaaactctgtcccaaaaaaaaaaaaaaaaaaagaaaagaaaagaaaaagaggtgaggtctgaagaacaccaggtaggccagcagcaacgaaaaaatgaagtgcttgctgagatcccagaagcagggacagatctggggttttgcctgagtgggaaaggcaggcagcctggaccctaggaagggggctcctgaagggcttcccagaacctaaggagtgaccctttcccattgccctggtaagaattcgtcacaagcttgttattttcatagctttccagtccagtgcccctacccaggagggggtagtttcagtccaaagttctcccctttataaggaggcagactggcctaacccaactgtacttcttcatgccctctcagccatccctcttagtttccctccaaggcctggaacccaaatgaaggggagaaataaccacttctgacccccaaccccaccctacttccctcctttccagggccttctgagttggcagccccacaggaatccgtggccagtttaggcccctctccccaaggatacatgaagagtccaactggcaacattgtaacaggtttatgcattttgaagtgccttctacacatccacccagaggctctgctgatttcacttatgcccaggctataaaatgcctttctctcatcccccagtagagcactgggatcaccactaggcctagggggcatatcaagggtttaatagactgggggaatgggcaacagaactggctaccttagaggctctggaatgccccccacccatccacccaccaatggaaggaaagtcaggcatcgcctaaaaggagtggtccctatctagccccaagtctggagcagaaagggcaggtccattctggcccaagtgacattgttagatcctgtcccctcccccaatcactgctgcttgccagggtgcctcttcacagttcccatgtggcagcagtagtggcagaggcagaagtggacttattgtagattgcagtacagatacatggacacaatcatggcagccagctggagagggaggaacagggagagatgagggaacatgatagggatcctgaagcctgtcccacagacaccctacctgaggcccagttagaagtctgtttcctccagagaggcctcagatgggttgagcagccctggtctcatgcccatgtcccagtcccagcctcctcatctgcttacctcgaggcccccaattccagctgccacaccacccacggtgactgcattagttcggatgtcatacaaaagctgattgaagcaacccttcaggaagagaaaagagcatttatagttggcagctgccctactcccatccccgtttgccactctgaggccatgaaaacagtccccacccactcatgccagcccacacctctactttttggtcgtgagccttttgcttggtgcaggtttcattggctgtgttggtgacgttgtcattgcaacagaatgggggaaaggcactgttctctttgaagtagggtgagtcctcaaaatccgtatagttggtgaagccacagcacttgagctggagacaagatgagggtggaggtggggccttgcttctttctctccaccctaaaacctcccccagccaaccttacccctttcatggtggtgttccacacttgagtgaagtcttcctgggaaccataatctttcttgatggcaggcactaccagcaacgtcaggaagtgctcagcctgggtgaggcaggccagtgtttaggggctggtacagaaggtggccattcacaggccacagcccactcccagggttttgcccaatcttcttcccttcctccatcccagtgtctcaccattgtggtgtacaccaaggcgaccacagcagctgcaacctcagcaatgaagatgaggaggaggatgaagaagaactgagtggggaacaggggtctgggttttagggagagacagtccctcatgccctccttgccctaatccccccccccggaaaagtgagacagaagcctgagcctaggggggtccaaagcagggtttgggaatcccagggcctggtgtcaagggcgaggggactcttggtcatcagcctgtggagctgggtttcacacaccgtcacgagggcacacttgctctcagtcttagcaccatagcagcccaggaaaccaagagcaaagaccacaacgccggctgcgatgaggaagtagcccacgttgacaaactgcatggcactggacgacagtggcccgaagatcttcagaaaggatgccccatcgattgacacccagatgcccactgccaacagggctgcaccacacagctggggagagagaggtcaggcaggccttaaacagtgctggcaagtagcttactaccacacagctgagtaagaaggatgggagccgagaaacttccctctttattggctagggagtctaaaacctcatcctgtaaggagggaaacatcctctagagccagaaaaatgggagctgggatatgcatagctaggaccaggctgcacacctgggcagatataaaggagatcaggggttctagaaatatcctcagggtgggcagaggggcaagactttccctcactgctgccagggtcctgccacatagctaggattgaaaacaggcaggtgagggcccagcctcctatttcctttctgggctatgggtgcctagaacactctgtcctctgataggtggagacgggggtggtagcagaacaggctcaatagtcaccatagtaatggaggcgaggctgaggttccacctgctggcaaccttggagagggaggaggttgagaaggttcacccacctgaggccccatttggctcccctccagaatccaacttcaggcccgcccctcatgtagacaagacctccttgcctcacaagaggaaagtgaggtaccagtgggaatacagccagagcttctcttaaaggctgtctagctcaactccaaacctcagggggaattctgaggcctagattgaggagggccctgcgcagttcccacagatcttagaggaaagcctcccggcccagggcttcagtggatgaatcagcctgacaccaccttggtgactagtcctcacttgccagctataaaaactgaggctagaacaggaagtgaggtggcagattgtggctggattccaggcatgtttgcccaaggacagaaagctggacttctagcctgcagggtcaaatttcatggagctggaggtctgccctatcctgctttgcccagcctggcaaggtctgggtaacagaggccagaaatcaaaccggatttgcctttaaccctctcagggcagagcctctcctgtccaaatccctggaatcctattgcttcctccagatacagggataaagactagttcaggactggcacagtggctcatgcctgtaatccccgcactttgggaggcagaggtgggagaatcacttaagtccaggagttcgagaccagcctgggcaatatagtgagaccgcctctacaaaaaaaattttttttaattagctgagcatggtggcacactcctgtagtcctagatactcaggaggctgagtgaggtaggggaatcccttgagcccaggaggttgacgctgcagtaagccatgatcatgccactgcactccagctttggtgacaaagcaagatcctgtctcaaagaaacaaacaacaacaacaacaacaacaaaaacacaagttccctgcagccgaaggaagcccaaggcacagaccacatcagaactagagagtctacccacgcttctaaactaatcaatacatacataaactctgtcgcccaggctg

SEQ ID NO: 95026 - DNA, 117475 bp, Homo sapiens
  misc_feature (1)...(117475): n = A,T,C or G
aaaaccataaaaaccctagaagaaaacctaggcaataccattcaggacataggcatgggcaaggacttcatgtctaaaacaccaaaagcaatggcaacaaaagtccaaattgacaaatgggatctaattaaactagagagcttctgcacagcaaaagaaactaccatcagagtgaacaggcaacctacagaatgggagaaaatttttgcaatctactcatctgacaaacggctaatatccagaatctacaaagaactcaaacaaatttacaagaaaaaaacaaacaaccccatcaacaagtgggcgaaggatacgaacagacacttctcaaaagaagacatttatgcagccaaaagacacatgaaaaaatgctcatcatcactggccatcagagaaatgcaaatcaaaaccacaatgagataccatctcacaccagttagaaggcgatcattaatttggatatttaaatgtggaaattttcaaagaattgagatgtgagcttagatttagaaataaaagaaaataaaatcttgcagcatagaaaacaaacatacacattttcttttttattcatgtattgataagaagcttcaaaggcttaacacccattcccagaatatgtcatatttgtcagtttccatgtgaaaaataattgctaatcatttcagcttttcaattaagggaacctctagtcattgtttattattcctagtaatgactgtaatgacttcaattaggtttctggaaaattaaatttttatatttatgtatctagtccttatgttttctttatcatggtagaaatttctttaaagctccccaaaaccacatgtggcatttttgaatcaagtgagtagtactgaatcctcttattctcagtgtggagttcaatttgtttttagttttgaattgatgctggttgctcaatttgactaaacctaggcttttctttaaattaatggccatagaattctaagcatacagaagtacaagtatttaagggccaagtctacagaataatcaaaaaggtggtttctagggagttctgcttggagagaatatcactattttcacaatgccctcttcctttctactttttctctcaacacgtatatagaagctaaagcttggtaaatgtaattccagtggtgacctgagacacccaaaagaacaactgttaagaagaggatgtgggggagccaggcattgttgttaattgtgtcaggccaccaaccttcctgcttgtatctattaaaaatactgtaggcttaaacaattcactcctctctaggactctatttgcaagatgagggtatggattagagagtctctacccttgcaagactgacattcttataactaattcagcacattttattactcctactttctcttactataatcactggcagcttcagttggcttgccctcttataagtgaggtttgccaaagtgtgagggcattgatatttattttgtgccacagatcactcggatgagtacaatttccaatcgattagtctcataaatcccctacacaacattttaaacatggctttacattaatatagactatttagtaaatctatttcttccctaccacatttttgatacacattatggttccctgtaaagggaaattataacagacggtcattagtgattaaaaaaaaagagcattccttttttttccacagactatttttagttgaacagttttatttcagagcatagtttatagatactactaaagtttaggatttgcacagagaaagtggtttgcttgctatgattttcataagaacctaagagtgattttctgtgccaactggcactcaatttcaaagaaacctcaagaattcagttaagcaagtctcaaatttcctgataataggagtaaatgcactatatcctcaccttctccatccacatgactatcatcaatatcatctgttattaaaatgaatatataacattgagctaatagtagatcatagcatcttgctcatgtaaaaaatatcagccctgctgaaagaatgtttcatgatcattacctaatagctttaatttttttttttattggaggtgaggtgagagctggagaaagtatgtagttaaaaaaaaccctcaaaacaccgtagttctatttttggcttttctgccactgactcatagtatgaacttgaaccagtcacctatccacacaagtgacttagtttatagactaatgtgagaaaatacttcagcttccctattttggagaactgctgagatcacttacataaatatttttctctgagctccctagaagacaggaactttataaatatttagyattattgttgaaccttaggtacaagtaagcaggaaaattawgatactctcaagaagaaatactttagcccatcctagctcatatagggagactgcattggcttataatcgtcccttgggttttcttttttcctcaatccttcccccaaccccttgcagtcgactaatgtagaaatacaaacaaaccttagcaacagagggtttggaggtaaggaaactcagcatgggggcagtcacactggcagattgcaagctatgtatcaaagtgaggagttaaaataaatataacatttcaaatccttgattgaaaagtgtgagaaaatgattcattttaggaatgactaatttggttgaatgttctgaacttaagtaagacctcactgaatcgctagttttgtctatttgatttcttttgtctactcatgtatccaaaggatatatgtggagagaagaagcctaaacaatgtgcttgtaactaatatgtttaaagtcgctctgtttatttcaagcagagtcttacaaagctaattcacctgtttctctgcaaatgcttgcccaacagactgctcctccaaccttttaatggaactgggctctggaatgatgttcctggaatgcatacaagggttatttttggatggtggaatttcaggtgattttttaagtttactttgttattcacacttttctgcatttcctgacctttttctttaaataaccagcaagtttcagttttaacaaaaacagtagttttaaaaactaattttgaaaccctttaccactaatttcattctcctctctgctacattccctaagttttcaacagacctatgctttcttcctgccttcgttacaaatttaagacaagcagcaatgcagtaattgatttccaacatcagaaaattgagtcctctatgcaactgaagtgtagagttgcttttgatccagaaaactcaagcagcgtacaaagcacacatagataacattttctattctgtctcaaattactgggtgattcaagccaaagcagagtggatctcttgagtatgaattatgctaatgttctgtttgttgacctgatctcaaaatggttatattagttttaatgtttcttgaatgttcaaggcgtttcggatgcaatgccagtcacaacaaaagacaataactttacactcaatgaaataataaatgaaaacaattgaaaactttctcctttgtgtattcatgtgtggtcttttctatgtttgcctcaataccaatgcagaacactcaattacatctggggccaaggtttcccccacagaacaactttgttacgaggatgcttacaggagcatctgggcatgcatctgttcactcgtcctacaagtattcattaagcacctattgcaagatgtccacattctaggcaatgagaaaccagacatggttcctgacctaaagaggctactggaggaaaacaagcctgtagacagaaagtacactgaagtgtcaggggtgccatatggggtctggcagaacattccatggggactaccgtggatagtatccacagataggatgctatcttacagtgaagtgtgagaaggaggacaagaaaatacttcaaaggaaggaaggcagaagtgacaaaccctgcgaataggcacagtgatgcaaaatagcacggctctccattgaggattccagagggatttttcatgtggtctacaggccgatgggtgagtgagatgggagtgatggaaggtaaagctaaaacagttaatgggggaagaattctggaaggcatgacctctttttgtttcattaaggagacaaaatgtcctaatagatgtgaatttggggtttatataacgaaccccaggaagcagatgtagcaatgtgcttgttccaggttcctccacactaggaataaaagtagggtcacaaaacagaaagtttgcctttagtcactctgcagtaatttaacttccctgaaatccctgcccaggatagtgagaggatagtgagtgtgtcccacccggtgccatgagccactcctctgggactccattccccctattttgttcctctttctctccatatcccccttcctttcttcatggctgaagccacgtccctggtatggtgcttgtaaaaacccaattctaaggttgccacccttacattgctgtatggctgttactgcccttgacatttgcccagtgggtcctggtggaggtgaggcaccagctacttatatttcatagtctccatgcccagttcttgtaaggctttgcaggctcttttatttctcattttattttgcggttccaacatcactcttctctgatgctggcctattgccattggccagccctgcggaccttgatccaatctctccttgggaaaagtcccttcccaggcaagtccctgagcactttggtaagcagatccacctacaggtcaccttccagacatgatcaaatattcccgtatccttagaagaatataaattagatgcatgacggtaactttggaaaagttatgggaaaagataggcagggggaaaaacaggctgaaatacgaggtgaggagagagaatgaggagtgtagggtggctagtgtggagcttgctcttcttacccatatttctcatctgatattctctcttatttgtttttctattttgcattgtttgtatttttataaagacaaaatttcgaacttttttggaaacttggcagatcataaataaaggaataaataagcaaggtaaattttagtggccatatttgtatttagcattctaaagacaggagtggtcaaaggtagaggcaaaaccaaaacaaaacaaacttttgacaaacatggttatggccagaacttggaatagcaagaaaagagaatgttaaattaaaatataactctcaaatgacaattcaccccttaccttctctgctgatggcaaagtagtttggctgactttgtcccatcaacgccaaaccaaaccaaacaaaaactaggtgaaggcaagcgtcagggctccaactcctgccgtgaggagcaagctctgcggccccgcagggtgggagggtgagagaaattctcgaggtggggggctggggaaagtgaagtgtgtccctccattgcaatagggacgtcactgggaacaaaggctctggaaagtcgacagcaacggatacggagacgtgaaggttaccctggacgggcctttctgtgcatcgcaccccagactaccccctttgctcactcaattcctcctctccaggctaaacttgctctctgccgtcaatgtccattctttccctggtaacctctcgcccacgtcccgcagagcccacgctcttcccgctctaggattctcttgccctcctccttttccctctgcctctggcctccttttctcctctctcggcgtctgcctcctcctgcctcctcctccctttctttccgggaagcccctcgctttccttcccaccgagccccgacctcggggaccaagtcaggggtcgggggctgcaggtggatccgctggaagggccgggcagggtgagagttggcggggctgggacccgacgggacggaacgggacgggaccggacgggacgcggcgcgccctgcaggcggcccggggcggggagagcgggtcctgcccctcccgggcgggcgcgcggccggcccgaggggcggtccctgggctcccgctcgccgccgctgccgctcctcgttctgctcctcactccccagcggctggaggccggtaccggcgggcaggaggcgcccgaggatgtgctgctggccgctgctcctgctgtgggggctgctccccgggacggcggcggggggctcgggccgaacctatccgcaccggaccctcctggactcggagggcaagtactggctgggctggagccagcggggcagccagatcgccttccgcctccaggtgcgcactgcaggctacgtgggcttcggcttctcgcccaccggggccatggcgtccgccgacatcgtcgtgggcggggtggcccacgggcggccctacctccaggtaagcgcgtctcctcccggagcccgcccggccgagcccggtcccgtccggaccccagagagggcgcaggtgcgggtcgtccccggggcccgcagctctctctcacctggcgcagccccgcgcccccggccacgctcactctcgcctccgcgggcagcgcctgckctcccggagccccagaaggcgcgcggtagggaagccgagcacggatgaccccaggcaggtttccttctttgaacactttcctgtccccagcgccccacttaatagacgcccccccgcctacacacctgcaatacaccccgcttcatccctgatgggaagggagaaggacctaggctttggctttggggacctaatgggacagctctcagaggagggaagggacagagcgctttagtacgtcgcggacttgctgtctaggagtggaaatctcagaacttcccaaatcgtggctatttgggagcctccaggcgcggggctgatgtcagctacaccattctccagaagaatgaagggcccctaagaatcgcttagggactttcctattccgagagctgttcaggaagccacatttagagaccaaaatcgaaggtccccaggcaaaatatcctatgaagtgacaaaactttggcttactttaataaccaataaagttaatttgaccgctgctgatttactttgaaggagcctaagtaaccaccttgcctgttcatgggtgctttactaaatagaaagaaaaaaaaaaaggaagaagaagattgtgagatgaccagaatgattaggtggctaggtttcctggacatccttgcttgatcgtgaccaacgtttggatggcggtgaacgtacacgctttgttattataaaaattcatccgaacatactgccctttgctaaaagtcttgatccagatgaaaactccgaattgttctggcattgcattaaggctttgatagtatttaaatcagtgttctccgtggatttagagtgcgcttcttagtaattttatccccaggttcttttcgactgaaatatgccatcaaacttgaacgctgattctggcactgagctgttaactctggaaggaaataaagtgacaacaataaaaagttcaaaaccactctattatctattttttcataaattaatcgtttcttcccccaaataagtaactttacaactccaataaaataaagttttatgaggattgcattctgctgaagtcactgatgtataaatattctcctcctgcagcatctcagacattaactttatgaaccaagtatttgaccacaaatgcaggcctcactaggggaatgactcattctcctgtaatataaagtagacaataccttatttaaatacctatttaacgttttttaaaaaagaaattttaccgtttagggagaggagtatagtatgccccttaactatccttgcatgttctacaaaagggagcataactcttactatgctaatattataaaatgggacatactttgaatgttaactccatattattttccctcaaagagtagcatttctagaaagcccagccaattgtatgtcaaatgaaaagccgtgagtagaattctgattcaacatgccataataggcccaccacaaagataaacttggttaaactacagtgttttcaccctgtttgtggttcttcataragattgcataggacttagttaagtactctttagattgattttgaaacatagaaattttcttaaagtaattagtgaatacacatcactatgagataaattatgactggctgcattctcaatacatttaatgagcaataaataggayttcccstccatttttattcctaaggaaataaaatcatttttacatgtaaaggatgatcgttttcttacttggctgacatattttaccttccatttccataaacattctactcattttaggacatataaaatgcattaaaattatgctattcaattaaatggaaagacagttaacttaaaatctgtttaataagatgaaatacaccaaataatataaatgaaataaatgtatcaatttcagttttattattcaggctgaatgattccattctccaacgctcgaaattcagtctcctctctagaaactatttatttaaggttcttcatacactagtgtgagaagagtattttcagcaactataccaaaaagtgaataggattctcttttttttttttttttttttgacaaagtctctctttattgcccaggctagattgcactggtgcaatctcggctcactgcaacctcacctctcaggttcaagtgattctcgtgcctcagcctcccgagtagctgggattacaggcgcctgtcaccaygccaggctgatttttgtattttagtagggaccgggtttcaccaggctggccaggctggtctcaaactcctgacctcaggtgatccacctgcctcggcctcctaaagtgctgggattacaggcgtgagccaccacgccaggccataaataggattcttaaatgtagcatatttgattctattagtagacttcatgttttgtgtaattttgctcccggcgagaacaacatttatatagaacaatgacacaaaaaacattggctcccggggcatcaataaatgcacagcagccactaagagttggacaattacaccagggtgtatgataataacctaagttgctatcctagtcacctcatcatgtggctttttggcatgtattttattttatccttttaaatttaattttaaactaaaactttagtttttaaaaatttttctgacttttattttcctaattatattaaactcttctttcaaaagggtgttaactccttgagaactatgtaagtgtaaatttttatcgatcaggtagagaatcattggcttaatagatgtcacaagtccaaatgtctatagatgtcaggaaataaatctaagagtgactggaggccattaacttaagtgaaacaagctagatgcagaaagataaatactgcatgttctcacttataagtgggagataaataatgtgtacacaaggatgtggagtgtggaatgatagacaatagagactcaaaagggtgaaggagtgggaaggtgtggaggaatagaaattacttatttgttacaatgtatgktatttgggttatggatacactaaaagccctgacttcaccactatgcaatctctgtgtgtaaagaatctgcacttgtaacgcatacatttatataaattaaaaaatgagaaaaaagagtgatgagagcttgaatggaacaggcaggatgtaatgcaacagagaggagatggcactgagggaactgggggttttgtgagtgaattactgttaaaaaggaatgtaaattcagtattgccagatcttctgtttgttcttttattttgagagaagacaaaatttagattctctttactctttctttttctttctttctttctttctttctttctttctttctttctttctttctttctttctttctttctgtctctctctctctctctctctctgtgagtgtgtgtgtgtgtgtttaaataaaaatctaattactaaatactggcaacaattcaaccatcatatagtgtgcattcacacacactcacacacaatttcagctgggatatatcttatagacagcctaatctgggactcagagagaaagtctaatgttaataaagaatcaacccaaataatgaaaattcatgaaaggcagagaagcaagtcccatttctttttaggccagttctattctatgccaggaaatgggtccagtattgggggctttgcccattgttctggctgtctattcttggtaacaaaccatctccatacagagtagcttaacgcaatgacaaatttcttttgctcacaagtctgaaatttggtggggacaactccaaagtgggtggttggaagaatatgaagccttgtttccttgaagttatggctggcagttgatgttggctcttggcagggaccttgcctggtgctgtggtaggatcatagcctctctgtgtggctgcttgactttgtcacagcatggtggcaggtcccaagagggaaccaagaggccaggtggcaactgtacagccttttatgacttagtctttcactgtggtcacaagcccactagattcaagagggaatgtagactctatctgaacatcacgtaagaagacagtcacatgggaattcagcagtgaagccccaagtcttggactttctatgttgggggagactttttattactgattcaatctcattactgattgttggtctattcaggttttttagttcttcttgattcagtcttggtaggttgtatgagtcaaggaatttatctatttcctctaggttttctagtttgtgagtgtattgttgttcataatagtccctgataatctgttgcatttctttgatatcagttatacttgtctattttttcatttttgattttatgtgggtattctctttttttcttggttattctagcaagttgtttatcaagtttgttaatcttttcaaaaaactaacttccttttattgatcctttgtattttttttgtctctgttttgtttagtgttgctctgatctttattatttcttttctcctactaattttgggtgtggtttttcttgttcttctagttttttttaggtgaattattagatcatttatttgaaatctttctactttttgatgtaggtgtttgttgctataaactttcctgttagcactgcttttactgtaccctataggttttgatatgttatgtttccattttatttcagaatttttttttcctctttaatttctttcttgacccattggtcattcaggagtatgttgtttaattttcatgtatttgcgcagtttccaaagttcctcttgttattggtttccagttttatttcattgtggtctgagaagatacttgatatgatttcgattttttaaaatttgttgagacttgttttgtgtcctcacatatgggctgtcctaaggaatgtttcatgtgctgatgagaggaatgtatattctgtagctgttggatgaaatgttctgtaaatgtctgttaggtccatttagtctaatgtgtaatttaaatccaatgtttctttgttaattttctgtttagatgacctgtctaatgctgagagtgggctattaacgttcctattactgtgttggagtctatcactccctttagatctaataataattgctttatagatctgggtgttttggtgttgagtgcatatgtatttagaattgttgtatttctaaatatatatgcagctcttgctgagttgatccctttattattacataatgacattctttgtcactttttagtgttttatacttaaggtatgtttcacctgatataagcatagccactcatgctcacttttgatttttgtttgcatggaagttcttttcccatcctttaatttcagttagtatatggctttacaggtgagatgagtatggtaagcagygtatagtcaggtcatgttttttaacccattcagccagtctgtatttttaagtgaaagttttaatttgtttacattccgggttattattgatatgtgagagcttattcttcttattttattaactgatttctagttgttttgtgtatcctctgttcctttcttactctcttattttttattattgtggttttgtggyttttctgtagtggtaaccttctagtcttttccttctttgtatgtttgctctagtagtttttatatttcatgtgttttaatgatattagatattgttctttcacttttgggtgtaggactcccttggcatttcttatagatctggtctagtggtgataaattccctcagcttttgcttgtctgggaaagacttcatttctctttcattttataaagaataacttttctgggtatggtatccttggttggcagttttttttcctttcagcatcttgaatatatcagcccattctttcctagtctataaggtttctgctgttagtctagtctgacagacgtacctttataagtgacttgatgcttttctcttgcttttttgagttttctctgtgtctttsacctctgatattttgactataatgtgctgagcagaagaactttttgaattgtatctatatggagaactttgagcctcttgtttctggatatctaaagttttttgcaagacttgggaagtttttatctattgttttgttaaataggttttctaactccttcattttctcttcaccttctcagatcctaaattcaaatacttggtcactttatgatgttatataggctttgctcattctttttttatccttttaatttatttttgtctgagttatttcaaaatacctctcttcaagttctgagattcttttgcttcatctagtctgttgttgaaactttagaatgtattttttatttaattcaatgaattcttcagttgtagaatttctgtttggtctctttttttatgacatctatctctttggtaaatttctcatttatttcctgaattgcttttctggtttctttgcattatttttcagtattctgttgtgtcttactgagcttctttaaaatcaatattttgaattcttttttggggggtatttcttaaatttctttttgatgagaatctgttgctggataattatggtgtgcctttggagataccatatttccttattttttcatgcttcttgtgtccttacattgatcatttgtgcatctgatataacagttgctccagttttttgaatttgctttcataggggatgacatttcttgaagatttatctacggtgttggctgggtagggcactttggccttgactctaggtgtgggtggttgtatagtctctgtgtaatttttccagctgtaaacagtgtcagtggtgtctgtgatttcctcagtggtttagggtgtgattattagtggaggttgtggtgaagttttgctgggaactaggacattaggtgggccagtctttgggcctcagtggtggcagcagtgggttgagcattagcctctccaggtgctgggaatatcatggtgggtcaggaggatgggcaggttatcatgcttctgggtagcaggtatgctgtggcaatggcagtagctgtggtgggacaactttctggaacccaagtggtcagtgctggtgttggtgatgtccatgatgaactgggcaagctggtcctcagtcctgcagatggcacatgaaaatgtatagctgcctttttgttggggtggcaaggtcacttccagtggctcctgcctcagcccaacagtggtgtctgtgggtgatgagtgtcagttgggctccagggatatggaggtgcaggggctcttgggcccccaggcagaacacattctggcaggggcggggctttcataatggcacagtgctgcagctgcttaggacttgggggtttgtaggactcagcatgagctccctgtctagaacaatgccattatgtgatctctaggcagttctctgtgagtctcagggcccatgagagtccaggggctctcctatggctagcattgtagaattctgtggcaggaatgtggaccacttggtgtctctcacttaccctttcctcacattaaggagcctctccgggctcccagctgatcccagctaagctggcttccttgcttccctctccttccttgctttcagtgcttcccatcacttctctgttgaattccagtattctctctcagatgatctattcaaaatgtgattatctaattgctattttagctcctctctctggaaaaggtgagtaccagatgcatttagtcagccatcttgaagcttcctgtctacatgcatcctttctctgttggcactactgaaattgggggcaatctttacttattctcctttccttttcccacccccttctctgtctgacacacacacacacacactcactccactcacaaggagttggaagcagttggtaatttttcaactgtcctcctattctataccctctccaccctagaaaaagacttctgaaattcagcaaccatatatttttcagtagctggcaatcattaattcagggttagatccaatgagactacctccagagggcagtgtgacatttacctgcagacctgtggagttaagaaatcagattttacttaaggccacaggccctttaaaactatatccagggacctggcatatggaaatttgcgctgcccattttaacctttttgactccttctggagatatttccgcaaagaggatattaacaggtatgatcaagatgggaaagaaaagagagaaatgtggttgtaaagtgaagcctatctcaacataatctattggataaattgttctggagcagctcatgcttgtggaaacatttcccttgaatgctgccgaggtcagtttctacaccatctttcacagaagtgtcagggtgaggtgggaagccatctccttttgcactggcttttcaaaacctcactattttgtctcagtgaatcagttcagctctcattgccctgatggattcatgtcctttccttgttctttgcccctttttgacacagagcaactccacccccgcccgaatcatttagcaactgtgagtgcccatttgaggcaagtaatgcagccgatgaatgctgagtttgtgtgaattagagaagagagcaacgttgttgaatatgcctgktgaatttgcatgaaaattgattcacccttcttatgggggtataaatcgctggtgaatggaggctgaaacatatgttatcatttcttacagccttgcttgcttgtctcaaaaactgaggcctgtgatgcgaagtgtcttcagcagcagggtaattgctgccgggccacttgctgaggaagtgcttggaactgatttgaaatcacagaaaacagtgagcattctttgtggttaacgatgtgcttcttttaagcacaccccagccaacggcgacaaagaaatgtttggaaagcaaattgaaaggctgtaagggagagatgaagagagtgtgcaaccctgacacagctcagctggtgctttgttaagagatatttataagtcttcagattatgccccccaatttccaggcaackaagagacytctccaagtgtcgtgctttgtgcattagtaataaggacacatgctccacagtaatgctggaacacaggatgatgctcttcagctgtgtgcttcttcctggcggagcagatgatttcataattagcctgaggaaacaggcagacctaacagccaaggaaacaatgcacctgaattgacaaacgaagttcaaggctttaggcaaccaatggcatatttctagagtgttggaaggagaggcaagagtctacttcaaagaaactgaatggtggtttattgatttttcatttgtaatagagccatattaaaataaagttactggtgaaggggatgaattcattacacattgtcatgtttctggaagtatttgatccatacgtaatacaaaaaaactgcgtatggatgactcacaatgctttttattgtaacttaaaaaaaactggtaaagaacttttaaacaggaaaaacatttctccaggaagcttcttctaaatctatttctttttaacttgttaaatttcagtagaaaaaaaaagctgttcataaggacaccatatagcatatacgcaaaaatgtctgcaaaaataatttcaaatggataatttttattaactgtaagctagggattgtatatctgagtatcatacaaataatgtatagatcagatttaatttattatgaaggtctatcttattcatctaatttagccaaacattgtgagaaaatcttgacgccattctttcttttatgagctaaatattgatttttgcatatttactcgctgcctcttaagagctcatatttcggttgattcccctcaaacctcctactcttccttgcctctcccctcaatgtttcaggtgagaaaactaaaccttaggtaactattaaatggcgtattgggccatacagatcagcagcctggatttattcctctgagtcccagtttggtactcttcttctcctgaaagcaaactgtagcttacataaaaacatatgttaattttcctcctaaatagtgaaagaacatgtataatcagatacattttaaacaaattgataaaatgaaatcatggcatttctcttactgcttttattccactataaatggcacactgacacatttccataatatgatttttatgatttttcattcatcatatgccataccttgtgataaktccttacagtgtgttctcatgcaattctcgtgatagtcctgtgaggtcaatatcttattactctcattttgtaggtgtataaatgtgggccttcatgtcacaaagcatggaaattgtctgtggctgtcatatgactgtttcaggaaagtactcagaatgtkggaatgttcatttactgaatattcactgaatgtttattgaacacttcgagatgctggggacacaacattgaatgagataaaaccattggtatcmcggagcccgtattgtggtggtgggggtagcattaaacaaataaataagcaagagaaacatcagaaagtactaagtgctaagtgctgtgcagataattaaaacggagtgatgtgataagcagtgtgtctgtgtggctatttgagatcaggatgctgatactcaaaacatgaaagaaaacaagtgtcccaagttttgaaggttgtctttcgacgttaaccatagtgtgtacaattcaaagcattatgtactatgaagaagatgatctggcataggcatcaaagaactcagtagaccttgaatacaggaaactacctacctggggaaaatataattaatgtttttttcaaatgtgtctgaaccgcatgagctctcttttctatttctgtggcattgttacacagatgtttagtaagctcagctagagtctttcaagctttgatctagagacttggtgattttatagaagtttctttcttartactaggygttgatgtatttctcttatattctgtattctttctcatcttcaataatattagagagctaaaggcctttgagaagacagatcaacaaaaatgtatgcctgaggaagatttccatctttcatgcaatttttaaactaaaactttgaaatctcaagtttcttaggaaaaactaaatgtctgccttttttttctatgaagtttatacattgaaacctcacttataaaaggaaactcatgacagatgtaaccaggtagacactaggcctcctggtacttggcagacccagatccttttggatagggccaagatgagttcatgctatggcagattgcagtccagtcatgagcaggccaagttaatrgagaagtgagaactgggaaagatactttttattcctatgtcaaaatttcaagttcatctgcacattagaatcacytggagatgttttaataattccagtgcccaggcaaccccatcccccaccagtcaaagcacaatccttgggaggtggacacaggcattaatatatttttcaagtttctccattgattccaatgtgggccaagttgagtaactactgaccttatatggttaggttgtttgataggaatcaggcaattcaacctgcagaagcatggaaaattgcagacataggacatggggatacaaagcaagattccatacacagccattcagagtgaccatctgatgttttaaacaagggctagcatgtgcttgcacatttaagattattttttaagataggaaaataagcttggttttcctggcatggaaacccttctgggataagcttaatgagtaagtattttctctaatttatatagtgagggctgggcacagtggctcatgcttataatcctagctactcaggaggttgaggcaggaggatcacttgaagccaggagtttgaggctgtagtgagctatgattgcaccactgcactccagcctgggcaacagagcaagactctgtcccccaaataataataataataatttatggactgacacagcaatcgttgaactgagggtagaggtgtgtttcaaaattttctgaactaggagcctttctttcatcctcatagccctctcccattcctacacaccttttgtcaaccggtaccagctgctgtatttctaagcaacacgaataactgcacacacagagtttaaaatttaacagttgtgtgtggtcacagggcgtcaaagcaatgttatttcatttcattagtaaatgaaagtcctaggtaattctaggcttgtatttaagccaagagaagtattcttctccaaagtcttttattagaattaacagtaacaaaatggaccccctttttattctgaaaaattctccagcgtctttccagttatgtaaatagatatcccttcccttccctttcctctccattctccaaggttactaataagcagtgaaatgccctcaagctatagttgcagaagggaggaggaggaagagtaacagcagtggtggataattagtatcttattagagtatggaaggaacatttgcaagttgatgactgtgtcaatgctgccaaatcttctagaggtaccaggaatgattccatgtgcttggcagatattcaataaatatctgctgagcggtaaagagcaggaaatcttctagacggggtgtgaatcccagcactgcttgctgcttattcattgtgtggcccttggcaaactccttaacctaagtgacagtttctttctgtgaagaagggagatcatatttaatgcatgggcttttgtgaggattaaatgaaataggcatgtaaaattcttaggagagtatgtgacacactgaaaacacttaataaatacaagatataatgaatcaatcgcttagtgtaatgagacgatggtcagaagaccacatgaagacaaatattccagcttttgaacttaggggaaaggtctccactaaatatataggtgggagagattatagtaatttttgaaaaaacttcgaagtcaaacttgaagtaattggtttgtgaacaccttgtaatcattaatgactagagaccagtatggtttcagtacacaaattatacaagactgcattttcttttgcatttgatttgctggacctgtagattagggtattaaatataagtgcatctgagtaatagtaaggtattttgcagggtttctcactatatccttgtagaggatgcactaataaagttgaattagttataatcctaaatattttaaacctatacccaaactcttttttttttttttttttttttttagatggagtttcacttttttgccagactggagtgcagtggcgcgatcttggctcactacaacctccgttccccaggttaaaatgattctcctgcctcagcctccggagtagctaggattacaggcgtgcaccaccatacccggctaatttttgtatttttagtagagatggagtttcaccttgttggccaggctggtctcaaactcctgacctcaagcgatccacctgcctcggcctcccaaagtggtgaaattacaggtgtgagctaccgtgctccaccccaaactcattattaatagactggctacattaggttacataatgaggacttaaaagatagcgatattcttaaataataaaaggaaactaaaagttaaaaattcattgggaatacaagtaaagttcaacaactctgttaaaaaatgatctgtgcatgtacacagtataaaattgtacttaactggaattcataggaaaaagctctacgtattagctatattgtattagctcaatacaatgtggctgccaaacagataaatgcaacattagcctaaaattctactgttcatatcaaaggaagtaatattgacatagcaccctatcttaggctgaccacaccagaggactccttctggaaatagcttttaatggacatatggataaactggagcatatcaaagaattacaaggatggttgaaaccttgggaaatctgagtacctgaggaamaaaaaacagctggcaatattttgcctggagaaagaacaatgagaaagacatgatcattgtctttggcgttgtagtgtacagtcttgctcaggaaaggtggattagtgcctacttattaagccccagaagaaagaagagaagacccaataaatataatgaaagagtagaagaatttagcttactataaggaatacatttctgacaagcagagatattaaaattgagtagattgccttgtaagattgtgagatcatgagcattgtcactggaagtattaaatactgtgtgatcatttcttaaaacatttttgagacaaattctcctttggtgggagctgggattaggtttccttcagcctgtcttccaacttacgtgtgatgctaaaattactttgcatttacactttcaggttattcaagaaatgaatggaagggaagacattagcaactataaaactgtctatattgctttttcacctgcctcaagaagtttgcctggtctctggatagatatgcattgaatcattatcatcacaatggttatgagattatttcatctcttttcccgttttttttttgttttttttttttgttttgttttgttttgtttkgttttgttttttgagacggagtctcgctctgtcgcccaggctgaagtgcagtggcgcgatctcggctcactgcaagctccgcctcccgggttcacgccattctcctgcctcagcctcccaagtagctgggactacaggcgcccgccacgaagcccggctaattttttgtatttttagtagagacggggtttcaccgtgttagccaggatggtcttgatttcctgacctcgtgatccgcccgcctcggcctcccaaagcgctgggattacaggcgtgagccaccgcgcctggccttttctttttttttttttgagacgcagtcttgccctgtcgcccaggctggagtgcagtggcgcgatctcggctcactgcaagctacgcctcctgggttcacgccattctcctgccgcagcctcccgagtagctgggactacaggcgcccgccaccacgcccagctaattttttgtacttttagtagagatagggtttaaccgtgttagccaggatggtctcgatctcctgacctcgtgatccgcccgcctcagcctcccagagggctgggatttacaggcgtgagccacctcgcccggcctcttttcctgtttttaatttcagtatattggttgggctcagtggctcacgcctgtaatcccagcactttgggaggccaaggcaggcagatcgcttgaggtcaggagttccagagttcgagaccagcctggccaacatggtgaaaccctgcctctactaataatacaaaaattagccaggcatggtggcaggcacctgtaatcccagttacttgggaggctgaggcatgagaatcgcttgaacccaggagatggagattgcagggagccaagattgtgccactgaacttcagcctgggtaatggagtgaaactgtgtctctaataataataataataataataataataataataataataatttcagtatattttgaattctctatagttgttatgtataagttttgaaatctgaaaaaataattaaaagagggaaaagaatgttttctgactggtatatactcaaaagaaggtggagggcttcaaaagcaaagctgagcgtgaagtttctgaggtcctgagcccctcccctggtggtacattactttgacctaagaacagtctacatgttctctgcctcctggccttccttctgggtaggcatcttaaacttaacctgactaaactccaacctgtttccttcccaggcttccccatctctacaaatggcacttcttgttagctttagctccagtcaaaaattagaagccatccttctttctgctccttccttcacccaatatataaaacccatcgtcaagttctattgactcttcctcgaaactaaatctaacacctgcccacctctctccagtgatactaccactcaagcttgaacctgcaggaccactgccaggctcctgagtgtcttccaactaccattcctattccttcttctcctcattcctcacatggaagccacagaaatacagagatacagatacagatacacattatgccacttgctgcttatagctccctacaatggcatgtaagttatcacagtgtttagggcctcatctgatctctgctgacctcagggacctctttgggcactgtaattcagtcccactggcttttatttgcttcatcccactggataacccaacctcctgtccaggcccttttcaatagctaatctcttcctggaaactactttctccacacattgcatggatggttcctaattgtggtttacttcttagcctaagtatcattgcctcagtggtgacttttctgatcactcaccctgaaatagccttctgatccccctgttatctctgttatatttttctgtaagtatttatctaaaaattgttggatattttattgtttaagtttctttagaaattgtctgtcccccccaactaaactataagttccattgtctactgtccagtatagtcatgtatcctcaaccctacataaggtctgaagaatagtaactcaataaagtatatgctggggaaagaaaggagagggaagaaggaggaaaaaaggaagaatgaaagggagggaggaaggaaggaggaaggaaggaaggaaggaaggaaggaagagagggagggaggaaggaaggaggaaggaaggaagagagggagggaggaaggaagagaggaagggagagaggaagaaagggagggaaggataaaggaaagaactagttttaacttcaaaatttattccttgcaaaaaatagacataaccagttaagataattcatttttttttgagacagaatcttgctctgccgcccaggctggactgcagtggatgatctcggctcactgcaacctccacctcccgggttcaagtgattctccagcctcagcctcccgagtagctgggattacaggcgccagccaccacaaccggctaatttttgtatttttagtagagatggggtttcactattttggccaggcttgcctcaaactcctaacctcaggtgatctgcccgccttggcctcccaaagtgctggaattacaggtgcgagccactgcacccagccatcatccaaattttttaaaaattaaggtgatgggataggatgaaggcaaagtagtatcttattcagatggtgtagtctgaaattgttttttccactgaaatwtattattccaaataaagagtcaaaattttgattttatgctgtatctttcatgattctataattatagcaaggtattacattatcctacgtgacaactgaaatgagacagttggcatgggagaaaattcaggatgttcatttttagaaggtgacacttaaagaacaaacaggttgctcaggtgggcctctttctcattggaacactagctacagggttcatattttggcattttagtaggtatttaacagatcccttattagacatagacagtttcagctttatctgaagtggtttctaaaaggtaagtgccttctattttgacattccacttaaatttctaagattactgaagaaataacttattaagatcagcttatattgaactctgaagattgtgtttatataatttgtttgtacagctctgtgattttttaggatcaaagattccctttaacacaaaatatttattattatactatcaatattattaaaccaccataacacttattgtagaaattgatattataaacaaatgtttgaagtaacgaggcttttgagatttagaaaaagaaaaactacaagcacctgttgaagaaaatgatgacagatggtaacatttttctcaagaatctccctgcagctgtgcttacattcagttttccaagctcaaccaaggtctattcatatcttttattatacccgtaagagtttttacttcctcctgtgtaacacagcaccagtcaaagattttatttgagagaaaaatagactgacaatgagtgagaaccaatttaacatctgtgtcatcatgcttttaaacaagaggtcatagcaaggtttttttggtatatgttatctcagtttgaaagtgacagcaagtactgaggctatcatgctaaataacagatgtcaacttactatcagcttctaatggcaatttctgttattgttgctacatagcattttgaaacctcaagtatatatttcatacatttttcaaagcacgaagtgttcaaaagaaaaaatatcttgtgacaacatgtttcaggagtaatagtctacggtacaactgaaaactagctttattattggaattgaattattaactcattttcaggtgtaacaagtaatttttatctaaaaatgtataaacaagctaaatacataatcaatataatccacaaaaccaaaaaaatcatacctcagtgatgattcatattgaaactgatctaaatcaaagtgtttgaattagaatatgactgagagccacataaagccatttatatagaataacattacctcaagtatatttcactttgcagatcattaatactgtataaatgtgagaatgacttctgtatatcagcttttatatttacattttaaaaaacatctacttttttccttaaattcttacaaaatttatacagaatcatgattctctgaatcctctctatccttcttacccacataaagtctaattttaatgattcttaattggagtgacttttatcaatattgtatatttatgatatgtgtatatgatatgttaaatacgtatattatacaattacatttttataatgactgtgatatcaggccatgacaacgagagtgcacagtgatcaatatttctatttttatttttcaaatcctggaatataaagcaccataggaagatagctgaggaatggcctttaccatgagtgcataatagagctgcatttgattctatttgctaaataaaatgaggagtgggtgaggatgtcatttggttctaattctaaaggtgaaatcagatgtagtgaaaatgatgtaggaagttttcttaagtatctgttaagtactatacagtatggttttgtgaatgtcaacttctaagtgactttacctgtattcaaactcttaattggtcaatgttttactgtgtctgtttcattctctagtatttttcctagaggatgatagtaacacaataacctatccattgattatccacttgaataacatttatccctttgtcagactgtcaggagacttaaattcatttaacactttttttcagtttaaccaatctgaatctcaagactgatggttttattgctgactgtgctttcagtggcttgctttttttttctccttctatttccctcttttcttttcggcttttcatcctctaggcaagaatagttgaatgctatgaagtttaggatcccaatttttttttgcctttttctcttcttttacttcatttaattgtgcttttaagattggccaatatgccacttctgttgtataatattgacagcattaaggctgtgtttgattacagtccatgtattttcttaatacagacagaagaaataaggtactactggggaatactttggtctcattaagttaaactatttctataccacaaagctgtgaatatcagatgataggttcttgtgttttatcttttattttcaaaattatctccttatttagatttaacagaaagaaaagcaggatgctccttttcaaatatatgcatgtatttcatgagcatcttcaatatgccagtcactttgttaggtactgaggatataaattaacatcagaaaaccttctgaaacatgacttctccctcttagatctatttttttcttatttatttaaaataggtaggggattatctccttgtgtaaaaggatttaaaatagttgttgcatgtataaacccttttttttctgaatactaatgtcggtctcctaagattcatgtgcgtgtaggggctaaaaggtcacaacaacattcccagatttcagtgccagatgtgtctgtatgacagatcatgcagacccaaactcattctagcatctggttaaacacaatccatatccggtcttaaccatgtgtaaatataattaagagcaaatgggaaaataattgtcttcccccctttttttgttccattgacaatgtaaataagtattctaaaggcacaaatttataactgaaatactaagattaacttttgaattctaggcaattatcacatggttgaaaagataaggcaatgcctaaaatagattgcatgctacatgggaatgtaaatagaggaataggaattcagagagggaatgatcacttctggttggaatgatcaaagaaaacttcataggggaaatagaatcatgagccttagcaggaaaaagagattcagtaggtggagttagtggagaagatatcttagttgaatgaagagagtagggggatagggaagaagaatgtgaacaaaagcaaagagctgggaaaaggcagagtaattgaagggagcaattagtacaggtcccgtggtgagattgataataggtaacctggaaagccaggttaggctcaatgtgaggaaacctggactctaaattatagactttgtactatatactgttgaataaaatgcaatgacacactgagggtgatttttcaaggaagactatgacagagtatgtaaacgtggagtgtgggagataggaacagtgaaaatgaaatagaactaaaaggtaggtttgttttcaaaggaagacttgatagaagcaggggctatgtgtggagatgtgagtcacaggaaagaagttaaagaaaactacaggccgggcatggtggcttacacctgtgatcccagaactgtgggaggctgaggcaggcagatcacttgagctcaagagtttgagaccagcctgggcaacgtggtgaaaactcatctctacaagaaataaaattgaacccaggaggatgaggctgcagtgagctgtgattccaccactgtactctagcctggatgamaaagtgagaccctgtctcaaaaaagaaaagaaaaataaagactacagttttgaatttagatagctaggagaatagtagtgtaattaaagaaattcaggaactcaagtaaaatatgaatacaattttggatccattgcatttgaaatgacaataagacttccaagtgaaaaatacttttgaatatgtgatactgaataaaggtgataatttgtaactattggagcagatgagattcccaaatggtgaaatatgaagacagaaatataattttaaggacagaactttgaagtccttagttagagaatgggaggtgaaaatagagtcagggaataacagaaataaactgttcaaggtggacaatcacctgtagggctttccacgtggagaatgtgccttgctttgtttcccggacttgttcctaaacttagggggaagaattcagtcttttatcattaagtatgttagctgtaggttttttataggtgccctttaaagggttgaagaagtgcccttctattgctagtttactgagggattctgcagtgaatkaatgttataaactgtttttttcttcatttattgggttcatcatatggtttttcttttttagacttttgatgtgctaaatcatattgattgattttctaatgttaagacaactctgcatgatcatgctatattattctttttttatgttgctggcttctatttgctaagaaatatttctatttctatttttaaggaaatacccatctaggtccatgagtgttgatggtgtgtagtttttttggtagtgtctttaattttggtaacaaagtartgctggtataaaaaaaggaattaggaacccaggaggcggaggttgcagtaaactgagatcgyaccaagctgacatcatgccattgcactccagcctgggcaacaagagtgaaactctgtcgcaaaaaaaaaaaaaaaaaaaaaaaaaaaaaaaaaagaggaagtgttctgtcctctttcattttccagaagaaattgtgaacagttggtattacctcttccttaaatatttggtaaaattccaagtgaaagcatcttggcctagaattttcttaggaaggtttttacccatgagtagattataaagctattcagagtacctctgtttttctgaatgactttggctggtttttgtcttgtaaggactttgtttctcatctaaaggatccaattatttggcttcaaggtaagcataatattattaaccttttagtgtctgtargatctattgtgatgtttctccatttcatttacatctattttctatttattccatctttgctttttttaatctttttctgctttcttttacaatcagtatttttattttgattccataaagtagatattttttaggatagaaagaatgaaaatgggagctctcatgcatcataactgaaattctctcaataaactgagatgtgtgatcataagctgagggtggggaaatttcggaatcttgcatagagaaggtttagamtatttgttttgggaggtgtcttcagaaaatagcaagagattaacatggatttccagccattagtgagggcccagctgaagtaaacatgttaaataataatattatttggatagctaaggtgtattatagtcaaatctgaagatctgcctccaaaataggacctcaaagttggaaaatatgaaaaaaaawttttttttttgagatggagtttctctcttgtcactcaggctggagtgcaatggcgcaaacttggttcactgcaacctccgcctcccaggttcaagcaattctcctgcctcagctcagcctcccrtgtagttgggattacaggcacctgccaccacgcgcggctagtttttgtatttttagtagagacggggtttcaccatgttggccaggctggtctcaaactcctaacctcaggtgatccaccccccttggcctcctaaattgctgggattacaggcatgagccactgcgcccagcctgtgaaaaaaattatagtggaattaccatggtggttaggttagttcatatttaaattttatttcaaataagatccaaccatattttccttcagtaaggttgaagatatgagcttcttttagacaactgcttcttttttccgggagttcagaactttgaaataattggcagctgtcttttctaaatattaagcactcacttggttacatagggcagatggcgcaaggggtcatcaacataagttgagtgaagtttctctcattttctaataactaagttatctgaaaagccagaaaaaggtggaatagctggaaggagttggtattgttgagtggaaatagaatgagtggaaaattggcaaaccagctggatattttgtggaaataatggttttggaaacatatttgcaagactcggataattattctactctttgaactgattacagtttgtattgtattgcaaaaactgcttggatcatgtaatgaaatatgagttcagtgaaaaggcacagttaactgatctaaatytctcattgtctacagacattgttatttcatttacatattgaaaatctatgtgatgaaaaatgggaaaatcacagactcacaggagtatttcatttaaattgctttcacaattgcaacccagttctcaaaataagaattttgacaaacctcaactttggcagaagaaaagtaacattttatgtgaaaaactgacatagctaatttctggagacagaaaaaaataaacaaaaataagcgtacccatcctatcccagcagtggccactacactgtagaagagtgaaaaaggatccagactctggggccagagtgccaaggtttgaatcctgcctttcggtttactagctgtaaatcctgggcaagtcgcttagcctctttgttctttgatgtcttcatctgtaaaatggaaaaatagttttatctgatagatgtgatttgaagattagtttagttaatacatgtaacaggtgtaaacagggcctggtgcatataagaagctgtagttggccgggcgcggtggctcacgcctgtaatcccagcactttgggaggccgaggcgggcggatcacgaggtcaggagatcgagaccatcctggctaaaacggtgaaaccccgtctctactaaaaatacaaaaaattagccgggcgtagtggcgggcgcctgtagtcccagctacttgggaggctgaggcaggagaatggcgtgaacccgggaggcggagcttgcagtgagccgagatcccgccactgcactccagcctgggcgacagagcgagactccgtytcaaaaaaaaaaaaaaaaaaaaaaaaaaaaaagaagctgtagttattgttaccattgtcaagaaaggtgagttagactctgcattgccaacaatttggggttttaacatactaaagaaaatctagatgtggtaccctggatgggaaacatatgcacacttataattaccatacaaagatgcttggaataaaaatgccaaatgccatctatttgagtatgacttttatagacaatgggaggttttatcttatatattacattttctcagtcaaacatagctataaattcttcaaatacaattttactgttagcaaaagtaattataattatgtttcagcatgtatattctaaatcaactgtrcaacttctcaaaaataaaatatcatcaggtactgaaaaaccagaaaggcagtaattaaggcaaattttgtgtcttttataagtgacaaaaattaatactktgatttggatgactcaacagagtaggcgaatggtaaaaggcataagaagatattttggggataaaaccaaactatggtgcaaaaaagaaaatatgtatcgaatgggcgctaaccatgtaggcagttatgaccccgcccaaaccatctcatttgtttatttttcaaaatctataaaataggtatgtattatccccattttagtaatgttaaaacttaagctttcagagttttacttcaacaattcttcaaggctgtttaggagtacagctgggagtcacatcctagtcattttcttccaaagcccatgttctctccactgcactggtctgcctcccagaagtgataggtacactggctgggcgcggtggctcacacctgtaatcccagcactttgggaggccgagatgggcagatcacgaggtcaggagatcgagaccatcctggctaacatggtgaaaccccatctctactaaaaatgcattagccaggcgtggtggtgggcacctgtggtcccaggtactcgggaggctgaggcaggagaatggcgtgaaccctgggaggtggagcttgtagtgagcagaggtcatgccattgcactccagcctgggcgacagagccagattccgtctcaaaaagaagtgataggtacaccgttgaacaaatttagtacaaaaattatggctaatcccccaaaacaaaacttccctagtttttcaatatcgtgtaattcaactagttttgtttctttgcatatttcccattgcattttattttaataaggatatgccattaaaagtcatattgaaacaacctataatccgcacttgcccacggatctctttgcttttatgaatggtgaagtggggctccaccaggagttgtaatggaaagagtgatgaccttagggctgattctggctttgctgctaactagttatcaaactttttttgtataaatgcaaactttgcggtaagacatttcatagtgctatagtccctcttttaatttttccaaggaaggaaaggcacacaatggtatcaaatgttcattcattccatctcttgatgctctacgatattatcagtctacactatgctttcctgaaaggccagaagttcaaagatggactagtttcccagggacctgattccccagttggaatactccagccccttggaaattcccgggatttatanaataactctagacaacaagactttgtctttaaaggtcctatgaattcttttctctctgtatttaggtatcctgatttttcttttccatattttccacaggattattttacaaatgcaaatagagagttgaaaaaagatgctcagcaagattaccatctagaatatgccatggaaaatagcacacacacaataattgaatttaccagagagctgcatacatgtgacataaatgacaagagtataayggtaaggcatctatgagtgaatgcatgcatgaacaaattgtatatttacacttgtgaagcactttaaagaataagagaaacaagtcatatagtcttttttctaatatttttgaaatcttttttgattttttttagttttttttttagttttttcttttttacttttttagaagccaaaaatgtgtaagaccaaaaatttcaataawatccatttttgtgtgagtttaacattttgaagatccctttaaaatttgtatgatttagccataaatacattttactttcttctccataaagtttgaaaatacacaacagataaatgtttgaagaaatgtattacacaagaaagaattatgaatctgaatattaggatataattcatctgatttgtaatggactcatctttgtaaatttctaaaatcaagatgaataggtggctgattataattgcctattggyatattaaatgagatttcttattttcagacttcatgcaaaaattaatatctttatgtgcattcaaattaaatatttagaagatatgtaatacttcagaaatttccatgaattgtttggattaattttattttgtgtagaccaatacgattacctttttattttgtaaatcaaagcttcaaaaatgggaatgtaaaaaatatgaagcagttctgattaacattcagcataaagagtgaacgaggcagaaaaaatgcatgcaaagagagggattactttttaatgcaatatacagtgcaattatactttaattggaataataattatagtcatttgacttattaagaaagaatatagcaaagagaacatttaaaatacttttgcgttattatttattttcaaagttcttattacaaagatctggcaaaaacacctttatctgtgagaggattgaacaatttctttacaccccagcaaaccctccccaacccatagccctttgggcaatctctcctggttgctcaatggaaaccgatttcatctgacagtactttccatagttgcggtaaaccagtccctaggaaattcccaggattcataaaatgactgtagattaactgtagtatgatttaaaaactcagaatcagaaatccttctatatttatattttctgtaaatgtatacgtgtgactaggctagtgcctaggaaaacatctactgtaaaaggaaaagtattaggtaattttaatttttattgtattaatttttccctaaaatcttccatggcatttaattttccaaagtctctgctgctgaacaagaatatttgtttagaagctaccagttgcaaggttaaagttttggcgtgacaatgatttattgttgtcatatacttcaaagtgtaattactgagtcaattgtccttcagtatgttttggaacacataatcttgcatgctgagagatgattccttccaaaaagtaactcatatatttggatccttaatgacttaatcaaatttgtgcaattaatattagagaccatgttgataactccaaatgtcattattgtcttttcttcacttctatatcttgtttacaatagagttctttaaactcaactcagtggtaaggaaagtgctctcatgagacctaatcatgcccatgtctgatccccaggatagcactgtgagagtgatctgggcctaccaccatgaagatgcaggagaagctggtcccaagtaccatgactccaataggggcaccaagagtttgcggttattgaatcctgagaaaactagtgtgctatctacagccttaccatactttgatctggtaaatcaggacgtaagtgttttcaggttttatgattgtagggatgggcttattgaaagtgtatacgagcatttttgcttacattattgtattcaggagcatgttaagagaaggtgactttgtgtcttcctcccctttttattaagacaggtccccatcccaaacaaagatacaacatattggtgccaaatgtttaagattcctgtgttccaagaaaagcatcatgtaataaaggtatgtgactcattcataggctaaaattaattttcatgagtggaaaaataaattgatgttaatataatgaaaacagtaaaagtatagaaatgtttttcaattatttgaaagttttttagagaaaaaagaactggcttggctgacctgcatactttttcaagagtctgaaagcttggattatatctaatattttggttatctcctaattttacatgtcaaaggtacaagttttggtatgcacatgaacaccgctaattattattttaggcaacatttctacaattggaattactggaattgcaatttaaaatagtatgtttacgtattgataaattatacccatgaaggttacattcctcaccaatagtgtttgagaacatctgcttcattgaaaacactggatattgtcataaaaaaacagttataataattttttgaaaatagaaaaaagaaaattagtgaatttctacagaaataaagaaatacagaattgggtagtaaataaacccaatttgcctgtrcaatacaattattttccacccttctggaatgggcctcccagaacttttgcatctacttagcgaatgaacaaatatttttaaaaagttacaagtccttggctccgtgctagtaattgttaattccacagaggccaaaggtatgatccatgctctcaaagaacttacagtgagattggggagacatggccaagacacaagaaagaataagatagaattaaatagtgcatacagaatactgtaaacattcagaaggccagatgttgctgcctttctgtcagttcccagactatgtaatgaagcgatgtggataaggaatgaattgccagactctggaatctagagggaaatacatgggtttgagaatcataagtccaccctttaattaaactatgtgctctcaggtaagtcactctggggtaatgctgtagccttaggttttctcatctgtaaaagatggacagccataacacttttcctatcaacctcaagacattttagcagagatagaaacactgagcacattctataagtttattcgtggctaaaatttgttaatttctaatatatttccctagttttcttttgtttacaaatatttttgtttacagttctgcctttggtttacaaaatgattcataactacatacagaggcaaagggagtggctttagggaatgttattgagttaatatgtagtcctaaatatttataggttatttttgcaaacaggagactgtgactgcaggtgaatcatttacctctgtgcaataagttattttctactttgtgtatggaaaaggggaatgcaaattctaattttgtataattaataccatgcccaagtccttcccttgtaccaatgaaaagtattcctcaggaaagagaatgtttcatttatatgtactgtatgtcatttgcagtaaatttaactggaaccaggcttaagaggcaaatgtaaaactgtagattcagaaatagaaacaaatgtttcaaacaaccggtcctttatccactttctggcaaacattaattgtaaatttcttaaccacttactgtgaatgcatttttattcttgccattgttaatgctaataattgagttgaatgaaataaaataattatgtatgtttcagggaggtcagtgtatgtttcaaccctctatgtaggatatttgcttggtacctcatctttcttcactaactttcctatatgaagcatattaaatgatactcagataaactttcctataagaagcgtatcaagtaattctcagacacatgaacttagaattaagtacttttgggaatacatagctgtcttcactagacatttgcattaacatgaaaggcattggagcattttttgcaatgtttggaggtcttctagacaacaaaagttatttaccttgagcaaaagggatttgagggaasgacagtaggtcataagggagtgctcatacaaacttttgttgttacaggggacagaggtttggtggctagaatttaaaatcctattattatgtgagaataccacttataggatagattccttatcttgctaaaccttaaaatattttaaagtttattaagtattatgaaacattttccttgaaaattaactaaaataggatattattcaaaaaataaagaaaactctactgaaaaaataaattcaaaatatttagtaatatgtaagtggttttaaggcagcctttcaaaaccagttttcatttkcaacttattcaagatttcaacaaaattttaatgatgtagaattcataaatctaggacttgccttaagttgtctgatttccatgctcttttttctagtagagaggatttctaataatttaagaaaagtgtatattctttccataaaatcaaagactcctatgttttgaaaagccatcagttaagagcttctccttatttttcattttatgttccataaatcactgtatcaaaaagcctcagtccttttcttctgcaaacaaaaagtactttcacagaaatgagaagattgattttatatcatattgtgtggtgtgtcatttgcagtgagttttaagaatatcgatcacagttgaattgtgagaagtcagtttcattttctggtgtctaattcgcacaaagaatttgtttgtatttgcagtttaaatgttgatagtgcctagacccacttatctgtggttccatgggttaagttgcccatggtcaactgtgatctgaaaatattaaatggaagattccagaaataaacaattcataaattttaagttgcatgccattttgagtagcttgatgaaatcttgcactgtcctgcttcattccagctgggacgtgaatcattcctttgtccagcatattcacactggaaacgctgcccatccgttagtcacttagtagccatctcagttattagacttactcttgcagttatcagattgtcatggtatcagagttcttgtgttgaagtcacccttattttctttaacaatgcaccccaaagcacaagagtaatgatgctagctagcaattcagatatgcccgggagaagccatcaagtgcttctgtaagtgaaaaggagaaagctctcaacttcataaaaaaaaaatgataaggttgttaagacctatgctaagaatgaatcttctctctgtgaaattgtgaagaaggaaaaagaaattcatgccaattttgctgtctcacttcagactgcaaaagttatggccacagtgcatgataagtgcttagttgaaatggaaaaggcattaaatctgtgggtagaagacatgaacagaaacgttttccgattgacagcaacgtgccgcactagaaagcattgagcctatacaaagacttcaacaagggattgcctgaaatgagtgacaccaagccatttactgcaagtggggaatagttgcagagattcaggaatatagattctgatcagtagtagcctaatactatgtcacaatacctacgttatycattatgctccatctcattatgtagggattgtatcatctcgcatcacaggaagggtgagtacagtatgataagatattttgagagagagagagaccacattcacgtaactttaattacagcatattgttataattgttttgctttattattagttattgttattaagctcttacaagaaagtatttggaaatctcctaatttataaattaagctttaatgcatgtataggaagaagcatagtatgtgtagagtttgtagtttctgccatccactggggattttgcaatgttttcccctcagatgagggaagactactgcatacatttcatacttataataactataagactaagcaaagaaaatatatcagtagtttgataagaatgactaaatttaaaaatatttattacatttaaaatttaaattttaaccatgtaaaaattatttgcttctaaaattataaaataaggtaaataatctctaaaatgactaaaatataaaataaacataaatgattttatctctagaaaagataggattataatacaattattggctgttgaaactcgtttgtgatctcaatttattgatttgtattttgattcttaacaaaatgttgaaaattgtggcttgaaaatgtgggtattatcagatgacagcatatcacattgcaggtgaatatggaaattgtagaaaagaatattcttggtaatttatatttaaactgtacttctcatgtgagrtcatctctttgtcaggtactcgagaccactctgcagcccacctctccatatttcagcatgactctttttaagctttattttagatgtgactttaccgtaaatttaaaattttttaaagacggttgattctaccactctctttagtcaacagtaatggcattgccatgactattagtcgtggttggatatactttgctagaaatgggggttattgaattggcttaacacgctgctttttttgaggtgcttttattgtcctggaattctcatagatgaactacactcctaatatatctgtttaaatgtgatgtgtctcattccatttaatagaaaatttgctgatggcctattatggcaaaggggagaaaaaaagaaaaacagccagccaaaatcatcatcccttagtcctctctccttaaaggactagctccctaaatagggaggcagtacacctcatactacggtaggtgggttccgtgactggatggatagttcaggtttgaattccttctttccatttattagtcatgtaacttacagaaaagttgttagccacacacagttcagtattttcatttaaatggaaatggtgcctcctaatggaattgcttacattaaggatcaaacaggagttgttgttttttaagcacttagcacagtatctgacacttacaaaactattaataaactcaactattatgatcaggcaactatttattttcaatgttgctccctgaatgacttttcattgaaaactcccatttagtgagaaggcccggaaaaggatgcagtatcaggcttaaaggctgaccattgctgggttttaagagaggattatacttactagttgtgtgaccttaggcaaatcaatttacctctctgtgcctcagtttcctcctctggaaaatggtgataataatagttcttacctaacaagattgctatgagtattaagtgaatcaaatgagtttaatatttataaagtatttataacagtgctgggaacataatttctgttaaacaaggtaagtaaattcaataaaattttgtagatcactagcaacactcaattgctaatctgttgatcatcttgttaggtttctggattacagagggatcccaaacaagtcaaccctttctaggcagtcagagttccaaagaaaacctagtttgtccatcacttcatttagggaggtcaccttgaaaattttcagctttggagaaatgtgaagttgaggtaaaacactgtcatcatcctcttcatcatcaattgctacaggaagagaaatgctatgctttattacttgatactgaacagaacatcttttttctcccatgaaatatccatgcttctgttctcttctattggtagcactcataaatctcaatgatttcatttggggagtgtttcctagaacatgaaaatttaagaataattgacattgaatagccrtggaatgtccttgaagccagattactgtagagccatgaaatagccactcgaaaattgattttcctatagtaggcacctaacatgaacgttaggcttaatacaacatgtcaaatggacattgctgcctgtttttctactgtgctcacttaaaaagacacagtcaaatggaaaaccttatcattaacacgtttctgaaatgttaagtgcgatagagggtttctattttctgagaatgtgtaagtctttggggttaaatttagtaaactgtgggaatttaagcattctcaatgtcaaactacatgcttttatggctgtcagaattagctcttctctgacagtatatctctttccttctttcctgaaataatatttcaagacatattttaattgatgcagtttttcccccgatggaaacagcattttggtttgttgtcagcctgcatttgcacagactgccccgtctagttctcattgtttttttatgtgttcaccttctgtttcactttttcatatgggagactaggtgtttgctgttaactactgacttaatggttatttgtgtttttaacccatatccattccaactctagaattttttcttcttacttattgatgtttcccttctatcttttcttatttaactctatttattttctaaaggcaaatctttggatttttagctagattcatgttgaaataaattaactttcataatctatcttacgtgaaaatactttccatttctcttaaatattttgcaacactctatttggttattaaattattaacaccartggattacccctgcacctctgggttttgtcatcaattgataaaatagatgattcttgatcttctagagaaaaagttatgctataaaaatcaagaatcttttcctttaataatttgtgttacaatgtttatggatgccaaaaattattcctcatttctaagtgtattgtaagttttatctattttttatctactagacaagagatgaaaatactggggcatttactgtggctgaaactgtaactttgtacagaaaaaaagttggtaggaacacttcccctaaaagtaatgatttgactcaaattagtgcatttgaaagactgctgacttagattgttcaatgttgtaaagttcattcaagatcctcttgagttacatctacttcatggaaacactggagatcgtctagctacatgggtgttcttattagtcacttgagagtacaaggtaattaaatttgctttgaaagcatgtcttttcatggaagtgatttattgctaactctgtcactaattagctttctgaccctagagaaagtacttaaccttgcctggtcctcaaattccttgtctgtaagataaagggattggaccagatgacctcaataggctctttctacttctaaatatctgtgatttgacgaaaacaaaaagaaaagtctgtgctggggtttggctgctgcyctgtggtctgagttcctgacatgcatgcttttcagtcacagggcatgctgaggtgaaaatactgagtacgccactgcctcccttgaagttaaaaggcccctttctttagcacctcgagcatggacttggaggataagtttggaggcatcttagtcctttctagagcatgccaaagtgccccagaatccccaggagaatccagaatgtctagagacatgtgtggctgcttggtctgttgacagaaatacttgattttttaaaaagaggctcatagactttcttatttctgggctatmcaacactcacttttttatctttaaattcccatgcacttaactaaacttgttactgatattatttaatggctattaagttttgggaacagctggttctaaacacagaaaggctgcaaatgtaaagtattcacaacaaatcaaattctgaaaccacaaatctttataatatccgtattatctagtggttgtaccatggcctacagggtcagagcaactggtttgaatcttggctcctcagcctactagtgtggaatccagggcaagcaatttaacttccttgagccttaggttccrtctgtacatagggctgataaccgtatttgcctcgtatgttagctgtcatcaaatgaaggcagtatctgtagagtgcttatatgtttggcaatgtattagatagctcaataagtactggctatattcccaatttgcttcagttttcagatacctcttaagtcacagagataatgtcattttaaaataaagataaaaattaggagtgccagggtgagcaagactttactgagataagttggtgcagtgtacaagaattggctctggaggtagttagcagttgtgttcaaactctctttctcattcactggataaccttgggaagactaaatgctcatagcttgcatcttgacttgcaaagtgaggaaaataattttcagcaaagatgaaatgaaaacaagtgaaaacacctgttgcataataggctcgtcattgcttgttttcttcccttgaagggaattatagagatgaatgactaaaacttcatctagtgttttctcattcttggagtcagggctgcactgaaacaatggtaggcagtaagtctctattttattttgaagaaaagattccctgggaattagatttcatagcttgcttccattactctaacccaaatgaaatttaagctaatttcctcctgttcttgtctaagtaaggataaaaaccaactggtgactatcctctgggaaataatctttgacattcttaagtcacccattagtcttccattctatggccttaaaataatgccattttcaactgacatgaaacaatttttttttattttttartttttcttctaccaaccaagtctactccaaccttgtatatctttttcaggtagtacaaaagtttagatgagaaaattgaatagcactagcacatttcttggtaattattcattataaaaattagtaaataatttaattaacagcactttattgaaagaatactaagatatttatgttgaattctagatgttgatagcacaatgggattaagaggtgtggtaacattaaattatgaatgacttttacttacatgcaaggaagtatgtaggtaaaatactttcttgtttttttgatactttaaatacattatttcactaggttttcacagcctcccacaaagtaagttgaataaccaccactttccatatgaacacactgagacacagcaagcttatgtagcttgctcaacattacacaaattaggtgaagtagagccaagacttgaatgcagatcttctgagcaatactaatggggctttttccatacaattttgctagccttctacttctaaatatctatccaggccttattatttttttcaagatgcataagttacaatgaaaaataatttgcgtggaagaagtctgatagcttatatccagccatgagttctttaagtaaacttgtcagaacctgagctactttttattttttgacagctttgttgaggtataacagatatacaaagaactgcacagttatagtgtgtaccatttgatgagcttggaaatatgcagacacttatagtgacatcaccaaccaaggtaatagacatattcatcacctcccttgtttccttgagtctctwtggttttttttttttgttttttattgtggtaagaacatttgacatgagatctacactcaacaaatttggaagtgcaaaatactatattctgctggactacttttgagtcctacggaattaatgcatagacacaggacacaggactgtgtgagcagaccccaccagaatcttccagagacatcagtccagagatcctggaaagtgacttagatctagtcacatatgagtacacagagactgggtgatttcacccttggggattacaaatgctcattaacaatggatgacacatacgaagtttcatttgtgatttaggaagtckttwaagtaagattagagtaagatgattaggctaaagattatggctgcaaaaaggcttcatgttaaatcttggagatgatattagggagaaaggaattggaaataatttccgtggaaagaagttagtgagactgctaatcttattggacacgtcttgtagcataaagattgctggaagcaagccaaaagctttctgtttaagctgagctaagatcttctttggagttaagtgaaattaatggtaatggactgtttgattcccctttgctataacgatctgtaaaaagctactcatgagaagaaatactaacatttttcacttggcagttaaatttatgacaaaatacctaaagtgctctaaaacacgaagagatatatgttgttggagagaaaactagaagtgttggcatctcagaaaagacctaagaaccagactgacagtctgggttctaatcttactttaacctttggtcagctgaaaattaatgtgactgcaccacaatgcctctcaagagaccaaattcatgttaataacaactcaaagactataaatctgtataactgagaagttgttctaagtgatctttaacccttaaaattctgtgacttctttcattgtattattggaattgacaaagttggaaatttatagaataagtgtataaatatatacgaataaaattataataaaagattttcttaaaattttgaaaggaattcagataatttttgtgtgttgccataggatatcacaggtcaattttatttttttgttttctattttcaatggaaacaattgtatacttatcaaaacaggaagatatctgttgccctatgatacaacaatgaaatttttaatagtttttataaatggagcttttagtgattagcaggaaaaattatatgtggaaactcacttttgataagtgagatattttatattcaagtttataaaactcataaatcagaggatactttttcacacctttactgagttatcaataccttctttaaggtatcaagactttctttgggtcatttaacatgaatgtatttgtgcatcaaaaattcagattatatataagagcttaatagtatatctcttttatgaagaaaaatactacactaacatatcaaaaatgttatagttgagatttgcttcattgagctattattgtatttttcttgattcataacctagggtgcatgttagaatcagaatctttagggagggagtccaggcttttgtgatgatagtggttgttgctgtgttttgggaaaagttccccaagtgactctgatataaaccctctgtttgaaaataactgttttatatatattaaaatttcccaggagattgcatttgtcaagttacattttatggcacctagtaaaatgcccttcatattaagtagcagtaatacatcttattatagtaataaagtattttattcaacaaatattgtaaagggtgaacacatattgaatgtctatcgaaatatactatgttagttgcatgcacatgaagaagagttaagcagtttatggttttgagatagtttattccttgatgcattgcttgctgtttttttttttttggtgaaaatggagaggcaaaaacaccagctgtttcctgtaaccacagctgagttttatgaactaattcagatagaaggggtaatttcttctaagacagaaaaaagatttatgctctagtgaaatatatacatggaggttaatgctatacattcatgtttataatgtaatgggtccattttaggaaccatacactgaaaaccacctcactgactttaaaatgcatctcattaccaataaagagagatctttgcaccactgaaatctcactgaattgctctgtgtggaattataaaaattagtgaaggcaagaccatgtaagtaactgttaataatgctcccatagcctcttggtctttagcttgtcctgaggaaatgttgaaaatataggagagacactttggtttatggtatgtttcagaaatcagatgtatactcgatatgcccactatatattttaatcagctggaaacattccttcacactacacctgtaaatcgtgaggaagaatcagagtatctagtgagtgtctgctttggacagcattcagtgctatgtcttgtatatagagcaatataacacrtagtttttcagcccaaagacctcacagtctggatgggaggaagagatgtacacataaatattagagagcccccaaagctgccgaatgaacattcatgtcaagctatgtgatagtggcagtaaaggagaagaagaaaggagaaagcagtgattgtttgggcacagtcccatgccatatggaaagaataatttggggaaagcacagagtagatgaattttaggtaggtggaagtagtggtgtggtgagcatgactgcagaggcataaacagaggcaacctctgttgatgtgcttaagcatcaagataaaattagatgataagaaccaacatttattgagagaactgtccaatttggggattgtcagtcctcataaacaacctatgatgtaggcagtgttactatcttcattttacagatgaggaaactgacgcccagaaaggttaagtaatttgcccattgctggggaagatgatctatttaaaaagtaaacagacataaacacttttgctggtttagcctccaaacgtgactgttaggtctacagaaaacagcattcattgactaaaaaaataggacgctgacttcaacattaacattctgaagtattacacattggtctctgaggaagctccacttggtcccacatgtggcaaagaatacttgatacaaccaacatctgcccatactaaagccagctaacagctgctggctaaactttaaacccatagtctaatacatcaaattagaatgcagaatccctgcagttacttgttgtcaggataaatggattttttgatcagagaataccttaaccataccaaagtccccattttgtaatattgaagggaggactgaagtctgaggcctttaatacctaaatggggtcactaattttatcttgagtattactcctgtgtggctttaacaaattttatttattgttaaaactctgggccgggcgcggtggctcacgcctgtaatcccagcactttgggaggcagaggcgggcggatcatgaggtcaggagatggagaccatcctggctaacacagtgaaaccccgcctctactaaaaatacaaaaaattagccgggcttcgtggcgggcgcctgtagtcccagctactcgggaggctgaggcaggagaatggtgtgaacccgggaggcggagcttgcagtgagccgagatcgcgccactgcactccagcctgggcgacagagcgagactccgtctcaaaaaaaaaaaaaaaagaaaaagaaaaaaaaaactctggcaatttgtatcatattctctaaaatagaaataaaaccarcctcttaattgcacacatgtgcatgtaaccatttagttctttaaagtgaagctaggcagatgcagtggctttcacctgtcatcccagcatcttgggaggagaattcgagaccaccctgggtaatggagggagttcttgtctctaaagaaaaatttaaaaaatttagctggtaccagctagttgggaggccgaaatgagaggatcacttgagcccaggagtttggggctgcagtgagccgttttctcaccactgcactccagtctgggagacagagcaagatcctgcctcagaaaaaaaaaaaaaaggaaagctgcaggcagttcctaagaggacgatggcctttcagttcttgtggaaatgacaaggtcttccctagagccagtgacttcacagtggagtttgttagagccatgtccatttccatcgctaatgtcagctgtgttttcttaataatttaaatgtatgtgatatatgtgggtttttttatagaaaaggtttgtctcattttgctttctattttactgaagcatgggcctaaagaaagttctcaaggaattatttatttatttaccaagctttgaaaaaatactgctttaaggtcatcctccaaagatgtatgtttgtttctcttagtyatcacaatcttccatagtctttataaaattacctttattaataaaattgggtattttctccataatagctgattttagcctcataccttcaatgtaaaattggtcctttaggatggaaactaaacacagggtttttsaatatgcccctttacttttcccttaacttttatgattttggtgttagtatatacccatatataacataaaaataacaattcatatcttctcaagattactttgaaaatgcttttaaaatattgaattttagaagacaagtatttatggattgctcatcatgtaccaaacactgtgctttacttactacctctgccattttctagatgagaaaacaggctcagaaaaatgtaatgtcatctctaatgtcatggagcgagatgtggtaaacatagagtgggaacctagccttgtttaattctaatgcctgagatctgaattactgtgttgaactcttttcagtgcaaatgtgctacacacataggtgttattagtacgtgtattatgaacaccatttatttagtctagtagggggagctttaacactttatttaacctatatgaacctaagcttgaagggcccttcctgtctttctggtcacatagacctgatttcaaatccgggctctaccatttaccacttatatgaccttgagtaatttacagaacttttctgaatccgttttcccattgrcaaaatggagatatgacctatcacaatactactgtaaagttatttggaaaatgtttatggaacacctgaggcacaatagatgtgaaatattgtcattttatagtaatccttctttcctctaacagtctaaaccttctgtttgcttttgtcaacattttatttcatggttgcagaaaatgaagtccagaggaaaaaactgcctttctcatccagttaattaattgaaattgagattgaaatttaggtcataaatttttattacttatctctatctctccttcaaaatatgaaatataaaacaatttcaaagcaaaaaatacacctaagatttatatctccattttatcatctcttaactatctataattaaataatttttaaagcttttcaaaaagctctaaattacttggatattattatccagtaatttagaacagctggacactcactttgatttcattgacttttctgagacatttaaaagagggaaaaattgaaatatttatatttaactagatttttatatggtatattagttcctttataacttggaattcattacttttactatctttcctttttatttctatacttccttttaagataaagtttagttcctttaagaactggactgccagatgaacctgatttgtttagtaaggcaaactcttattgtaagtgtttgtaagattcacagttgaattacatttacaaggttagagaactaagttcttttttcagtggtaaacaggaaatgtcagtactctgagtaatattttccactcatatagcaaatagaattttccaaaagattgttagttcagtcacatttttttcaaactatatttactccaagtgctaagagatattttatgggataatttatttcttcttcagcttgaattaataatcagataaaattcatatgtgatatgatgtgcttctggactggcttttaacaatcttgcaaagaggtcacaactgttgagtttttatctctcatcatttgaaagattaaggagtttttttctctagagaacactttattttctaatatgagaatattttctaacgtgtatttgtttcatttccagtgtaatatatacttctcataataagtaaaaaagtaaaaaatatataaaataaaaagtagtagtgccctctttctccaaattctactttcctgaggtgactaatgctaacagatttatttgtatttttctaaaactttatgctgaagaaaacatttacaacatttatataggatttttttgggttaatctcttttatttgtaaacaaattaggatcactctatatctattactttgaattttgcttttcaaattaatgccctcatcattactggacaaaatattataacacattatttttaatgtttacataatttaatctcctattatgtataaaccataatttttgcagccatacacttttgatgcacattcaagatgttgtaagctttttgctaccataaacattgcttcagtaaatgttcttgtaagtatatcgttatgtattggtggtttcattcctatacgctagattgctaaatggattgaatcaagattacatgtatttcaaactttaatatatttgtcagattactttataaaattcacacactagctgtatgtgaatattttctcatcccttcttgagcactggatattttagtcttttaaatttattgcctgttaatggatgaaaactaatatttctgattgctttggcttgctttccttagactactagtgaggcttatgctctttttatgctctcttctgtcagtttgctgttcaaccctttaccgatttctttttaaaacattcttttattgaattgcctagataaaagtgcacaaacagtataaaactcattgaattttcataaggtgaactgactcatgaaaccagaatcaagatcaagaatagagtatcaactcagaagcgtcctttgcgtcccctcccaggtactgtctgtccccagaggtcaccagtttgctgacttaaatcactctttactaattttgcctgttgtgaaytttttgtaggtagacagaaacgctagtgctcttctgtgtctggctttttttgccgaacgggatgtgcaagttggccatgttgtttgtagaaaataatgtgttcattttcatctttgaatttcattttctgaacataccagaattttttattcatttttattggttagctatttctgtgaaccaaaccaacccraagttcaacaactttaaataagctttaaatgaagaagcacatgttatagtttacaagtcagcttggtggttcttctgtttgtagctgggctacaaacaggtatgtaaccagcttgggttgggtatgcagctttctaatagtgcctgggctctctcttcttgttgggagtcagctggttgtaagcaggtctaggaggcctcagctgaacaagtgggctctcctttatagtatcttgttctstagaagtctagactgggcttgttcaaatggtgatggcacagttccaaaagagagagtagaaactgtaaggccacttgaggcttggtttgggattagcacgccattgctcctgccataagaagcaggcccagcctacataccggagaatggtgatagactccaacccctgaaggtctagtttgtgggagaactttctgaccttacctggagttgagtcaatttagagagctgagcaaaatacagggatagaggaagcagtgggaaaggacctgggagctcactgggtccctaagcatgccatccctgcttggtaccacagggatcttttgggagggtgaccagaggcacagggtaaaatgccacagggagaaggaagtccccagctgaactttgtaacaatttgaatccagcaagaagcctcctggccagaacctggggaagggcaygaatctggtgtgcagactccacgggtgagggaagaaccaaatcctttttcttctgcacctgggaagtggctagtctggggcaagttctcaagccgtgctcatctactgcctggaaacaggatgttgggggaggggcatgatgggagggagaccagcccttcagattgtgtgggagctgagtgaggcctgtgactgttggttttcccctacttccctggcaacctgcatgactcagcagaagcagccatgatcctcctaggtagatgactccattgacctgggaacctcacccccattccccacagcagctgcagcaagacccttccaaggagagtctgagctcagacacacctagccctgcccccacctgatgggccttccctacccaccctggtagctgaagacaaacgctatatactcttgggagttctagggccccgcccaccaccacttcctcttcgtaccaccacagctgatgctctctggaaagtgccacctcctggcaggacgccaaccagcacaaaaatagaactttaaatcaccaaaggtaagaaccctcacagagcccatttcatctccctgccacctccactggaacaggtgctggtatcaatggctgagaggcccatagacagttcacatcacagggctctgtgcagacaaaccccagtaccagcctggagcctggtagacttgctgggtggctacacccagaagagatataacaatcactgcagcttatctcacaggaagccacatccatagaaaaaaggggagagtactatattaagggaacatcccctgggacaaaataatctgaacagtagccttcacccgtagacttttcctctgacagagcctacccaaatgagaaggaaccagaaaaccaactctggtgatatgacaaaacaaggctctttaacacccccaaaaaatcacactagctcaccagcaatcgatccaaaccaagaagaaatccctgattaacctgaagaagaattcaggaggttacttattaagctaatcagggagacaccagcgaaaggcaagaaaatccaaaaaacaatacaagaagtgaaggaagaaatatttaaggaaatagattgttaaagaacaaacaatcaaaacttcaggaaaccttggacactcttatagaaatgcaaaatgttctggaaagtctcagcaatagaattgaacaagtagaagaaagaaattcggagctcaaagacaaggtcttcaaattaacccaatccaacaaagacaaagaaaaaataagaaaatataaacaaggcctccaagaagtctggaattatggtaaatgaccaaacctaagaataaggaagaggtattcctgaggaagaaaaggaatctaaaagtttggaaacatatttggggagataatcaaggaaaatttccttggcctagctagagacctcgacatccaaatacaagaagcacaaagaagatctgggaaattcatcacagaaagataatcacctaggcacatcatcatcaggttatgatgaagttaagatgaaggaaagaagtgtaagacctacgagacaaaagcaccagttaacttataaaggaaaacctatgagattaacagcagatttctcagcagaaaccctacaagcgagaaggaattgaggctttatcttcagaatcctcaaacaaaacaattatcagccaagaattttgtatccagtgaaactgagcatcatatatgaaggaaagatatagtcttttttagacaaacaaatgctgagagaattcgccactattaaggaagcaccacaagagctgctataaggagctctaaatcttgaaacaaatccagaaacacatcaaaacagaacctcttgaaagcataaatcacataggacctataaaacaaaaatacaatttaaaaagcaaaaacaaaaaacaaaaaatccaaggtacacaggcaacaaatagcacaatgaatgcaatgataccttacatctcaatactacattgaatgtaaatcgcctaagtgctccacttaaaagatatagaactgcagaatggataagaacttaccaatcaactatctgctgccttcaggagactcacctaacacgtaaggactcacataaacttaaagtaaaggggtggagaaaggcatttcatgcaaatggacgtcaaaagcaagcaggggtagctattcttacatcagacaaaacagactttaaagcaacaagcaacagcagttaaaagagaaaaagagggatattaaataatgttaaaaggccttgtccagcaggaaaatatcacaatcctaaacatacatgcacgtaacattggagctctcaaaattgtaaaacagttactaatagaactaagaattgagatagacagcaacacaataataatgagggacttcaatactccactgacagcactagamaggtcatcaagacaaagtcaacaaagaaacaatggattaaaactataccatggaacaaatggacttaacagatatatacagaacatttcatccaacaactgcagaatgcacattcttttcaacagtgcatggaaccttctccaagacaggacacgtgataggccataaaacaagcctcaataaatttaagaaaattgaaattatatcaagcactttctcagaccacagtggaataaaactagaaatcaactctaaacagaaccttcaaaactatgcaaatacatggaaattaaataacctgctcctgagtgagcattgggtcaaaaatgaaatcaagatagaaatttaaaaattctttgaactgaatgacaataatgacacaacctatcaaaatctgtgggatacagcaaaggtggtgttaagaggaaagttcacggccctaaatgcctacatcaaaaggactgaaagagcacaaactgacattctaaggtcacacttcaaggaactagagaaacaagaacaaactaaaccgaaacccagcagaagaaaggaaataacccggatcagacctgaactaaaagaaatggaaacaaacaaacaaaaaacaatacaaaacattaatgaaacaaaaagctgattctttgaaaagataaataaagttgatagaccattaacaagattaacctagaagagagaaaatccaaataacctcattaagaaacaaaatgggagatattgcaactgataactgaaacacaaaagatcattcaaggctactttgaacacctttatacacataaactagaaaacctagaagagatggataaatttctggaaaaatacaactctcctagcttaaatcaggaaaaattagataccttgaacagaccaatagcaagcagtgagattgaaaggataattaaaaaattaccaacaataaaaaagtccggggccagacggattcacagcaggcattcaaagaagaattggtaccaatctttttgacattattccacaagatagagaaagggagaaccctccctaattcattctatgaaaccagcatcaccctaatacccaaaccaggaaagggcataaccaaaagagaaaactactgaccgatataaccaatgaacttagatgctaaaatccctaataaaatgctagctagccaaatccaacaacatatcaaaaagataatctaccatgatcaagtgggtttcataccagggatgcaggaatggttaagcataggcaagtcagtaaatgtgatacagcacataaacagaattaaaaacaaaaatcacctgatcatctcaatagatgcagaaaaagcatccaacaaaatctggcatccctttacgattaaaactcttagcaaagtcggcatacaaggaacatacctcaatataataaaagccatctaygacaaacccacaaccagcataataatgaatgaggaaaagttgcaagcattccctctgagaactggaacaagacaaggatgcccaatctcaccacccctcttcagcatagtactggaagtcctagccagagcaatcagacaagagaaagaaataaagggcatccaaatcagtaaagagaaagtcaaactgtccctgtttgctgttgatatcatttaccttgaaaaccccaaagacgactccagaaagctcctagaactgatagaagaatttggcaaagtttctggatacaatattaaggtatagaaatcagtagctcttctatacttcaacagtgaccaagcagagaatcaaatcaagaattcaaccccttttacaatagctgcaaacaaacaaacaaacaaaaacaaaaacaaaaaacttagaaatatacctaaccaaagaggccaaggacctctacaaggaaagctacaaaacactgctgaaagaaatcacagatgacacaaacaaatggaaacacatcccatgcttatggatgggtagaatcaatattgtgaaaatgactgtactgtcaaaagcaatctacaaattcaattcagtccccgtcaaaataccaccatcattctttcttcacagaattagaaaaaacaattctaaaattcatatggaaccaaaaaagagcctgcatagccaaagcaagactaagcaaaaagaacaaatctggaggcatcacaccacttgatttcaaactataagaccatagtcaccaaaacagcatggtactggtataaaaataggcacatagaccaatggaacagaatagagaacacagaaataaacccaaatacttacagccaactgttcttcgacaaagcaaacaaagacataaagtgggtaaatgacacccttttcaacaaatggtgctgagataataagctagccacatgtaggagagtgaaactggatcctcatctctcaccttatacaaaaattaattcaagatggattaaggacttaaatctaagacctgaagctataaaaattctagaagataacattggaaaaacttttctagacattggcttaggcaaggatttcatgaccaagaacccaaaagcaaatgcaataaaaacaaagataaatagttgggacctaattaaactaaagagcttttgcacctcaaaaggaatagtcagcagagtaaacagacaacccacagagtgggggaaaattttcacaatctatacgtctgacaaaggactaatatccagaattgacaacaaactcaaacaaatcagtaagaaaacaaacaaacaatcccatcaaaaagtaggctaaggacatgaatagacaattctcaaaggaagatatacaaatagccaacaagcatttgaaaaaacgctcaacatcactaatgatcagggaartgcaaatcaaaaccacagtgcaataccaccttactcctgcaagaatggccataatcaaaaaatcaaaaaacaggagatgttggtgtggatgcggtgatcagggaacacttctacactgctggtgggaatgtaaactagtaaggccactatggcaaacagtgtggagattccttaaagaactaaaagtagaactaccatttgatctggtggtctcactactgggtatctacccagaggaaagtaagtcattatatgaaaaagatacttgcccacgaatgtttatagcggcacatttcgcaattgcaaaatcatggatccaacccaaatgcccatcaatcaatgagtggataaagaaactgtggtatatatatatatgtatatatatatatatgtatatatatatatgtatatatatatatatgtatatatatatatgtatatatatatatatgtatatatatgtgtatatatatatacatgtatatatatatatgatggaatatatctatatatatgatggaatactactaagccatgaaaaggaatgaattatcagcacttgtagcaacctggatgagactggagactattattctaagtcaagtaactcaggaatggaagaccaaatattgtatgttctcactgatatataggagctaagctatgaggacgcaaaggcataagaatgatacaatggactttggggacttgggggaaagggtgggggtgggcaagggataaaaagactacaaataaggtgcagtgtatactgctcaggtgatgggtgcaccaaagtctcacaaatcaccaccaaagaacttacttatgtaaccaaatactacctgtgcccccgtaacccttggaaaaataaaaaataaaataaaataaaaataaataaggagagaatacacacaagggttactgtgcaggtagaagatgaaagacttggcaccttctttgatgttaggggttaggactttagtaaaaatccaaaaagaaatgctggtttagcggggagtgaagacaatgcagtcttttttggaaccattatcataacttgatttatatgctcttttgttagatttcttcctttatctgccaagaaaagagattggccacattcctgaaactgtaaatttttctttgaaaacttatgcaggttgtgaattacaacatttagattaagtgtggtttttatacaatatggaataaatcacccgtgttttttatatgttttcttcatatgtacatccattttaatgtagtttttatggctgcatacctgagaatatttaaactctgacaaaaagtattaattgcaaaagttattttaggcttaacttaaaggagatgttgacaagtttagggaaaaaaacaaatcagacttgtaagactaatgacccttgcgtttgtccttgggacccaccttgatctttgagtttggcaggtcacttcaacatttgagtacccagtgggaacactgaagtgcactgaaatgtactggattaagttagggtgaagataaatagcaaagtaaaaattacagaatcctgggtggttgttatatgaatgatgttacattattttttctgttaactttgcaaattaaataaaatgcaaacaatcaaataaacccaaagattaataagacagttgccttcctctcaagaaacctacatctataggaaaatactttcttatgcagtatctggaaagcaacaggagatttaggacctttgaaaaagtgagttcagtgtgaacctctttactaagataaacagacttcctggagtcgggggtatctacctaggatggagattcacccacggacatgaaggccagtgtttatttaatgcagccatagcctgagtttagtttgttttctctttttcatggaactgttctataaatgagaactttttaaatgggggcctcatgttcaaacacatggagaataagaaaaaaaaaagagagaagagtgagaactaaaaaagtcatccactcctattcatttatttgtttaactttcatgacttataaaagactgtatttcttcattgtagcaatggttcaccacaaattctgcaagaagttaagcatagtcttttaaatatttttgctatcccttttccaactagagggcaacactccataaaataaatcaaataatttttttttttttgagacaggatcacactctgtcgcacaggctggagtgcagtggtacaatcttggctcactacaacctccaccttcggagttcaagcgattctcctgcctcagcctctcaagtagctgggattacaggcacccaccaacacacctggctaatttttgtatttttggtagagatggggtttcactatgttggccaggctggtctctaacttctgacctcaagtgatctgtctgcctcggcctcccaaagtgctgggattacagatgtgagccactacacccagcccaaatgacattttgaaacagtcctacaaaattaaagtacaaaattattttgaaccttattttaattccttttctgaccatagctccctcccttgtatctccactgtatcctgtacagataagaaaggtagacaatcagtcacccggagaatgaaacttgaaccagttggaccagggtgcaaatctaagcctgccactaagaatacgtgttaatttcttcagtttacttaattgtgcctcaattttcttggttgcaaaatgaagacagtaataccagtctcagtgtcgtataaagattaaatgtgataacttgtgtaatgtccttggtacatataaacactcacaaacgatagctattattgtatattagcaccttttttagtggaatttatcttttacgtgatcataaaactttaactccttgacaattgatccaattgtggcttagatctgcagccttgggtacagtttcttatagcgtttagtaaatgcttgttggatgagagactcaaatctagactcaagccaataatggggagttgtaaacaatgttcaaaaaatttattttgttcctgggacaaatgcattttgaatgggtggcactgtggattatgcatctagttaatcaaaaaacagctctgctgtgctacttgcagatcgtacatggaaggggcaaaaaaatatgatttaaagacctggacttattatcggttctaaagcaaatttattttgtaccttagagaccacttatcataaatttctcctgctttcattaccagatagaacagaacttactttgcaggcatttaaaaggccagtgaattctagacctttggataaaaaccaacatagaattctgcatgaagcaatattattaatttgtattgcctacaattagatttagcctttagactatgctcagagaaataaaaaatgtcattgatgttattcccctgctgctagaaaaaaaagatgggccatttattacattttttcattaaataaaatccttaaattatgatgaataagtgctaaaataatatactttatttaaaattgccaaaaccatgacaaattacatataaacacaggtactagaagtttcaggatatgaaaacttttattaaaaggaagttagtttaaagacatgcatatttaaattggttatttttatatgtaagttatattttactaagtaaaaacctaagtttttttctttcttctaatttgggctctggtattttatcatgagaatcatgtgttagtaattaagttctgccctttcttggatagaattattaggccttgaaatcattaaaaaaaatccccccatcccccacaacaacaacacaacaacaaaaaaacagacccacaactataacttcaaaggagaccaaaaaagcaaaatgtaatccagagaaacagaaaatgtttgatacagaaccaaagaagggtcttggtgtctttgctgggatccccccatcaggagatgtaactggttggaggtaaagccacatgtactggcatctgtcatttggtctgtcaatcttgacagcagatttaggttaaagaaaaaaaaaagactcctttagttattctaaaggcctaaaaactcagaggatataattgggtttacagaagaaaactccgttgttctagaaacacagctcaaaatccttcctagtcagttattactctaaatacaaattttacattaaaaaataagaggagataaattatgttgcattgactcagtaatagggaagtaaatattttcaaaggcttttggagactattatctaattaagtatgatagcttaccacaaatataaaatgaatgtagttttcaaggaaatattatagacagataatggatggagattatgagaactaacattttgagaactaataggataaatgctttatatataccctgcactgtatggaattcttttcttttctattctttttttttagaagaggaagaaaaacttaccaatttattctgtgaggccagcattaagcagataatatagatagacaaaatcatcacaaaaaagaacctacagaccattattcctcataaatgtagacacagaaattctcaaaaacactataacactgaatccaacaacatgatagtatttttctatgttatctgctacaaatattattttaggcttttacatttaaacctaaaatttacctggaattgacattttatagtttatagtgtggggtaggaaatgacacaagatgtttttcgatgccactttgcaagccagaaaattctgtggccgatggaacctctgctcatttgttcccattgccccactctggaccgtggcccctgggttggcctggctctgctgctggttcctgtcacatagggcagctggttcctgtcacatagctccttttgcacctgctgtttggcgggtcctgggttcttgtcccatgtccaagaagaatgagattacttggacaactgaagagtcagcagggtggagagttttactgagtgatgaaacagctttcagcagagagtgagacacgagttgggcagcctatttacccaaagttgggtagtgctctcaactcaaaggtggtcagtcccccagtgtggctgagtctgggactttcatgagttcagaataggagaatgtgtgtggattggtttgtgagtatgcaaaaaaggctaaaataaagacaccactcaaaggtggtacaacagcgtaaaacaccaattagggaagggtagatatgtgttaaataggtgaagggtggggatcaatcaaaggaatgtgygccaaatgggaacagaggttctcaatccagtctgtggatttatccaagacttgtggcttggttttcaggctttaaattgtctttagtttgaaggtcaggtttcaccagggacccgcccctatctgcctaggaatttgtctgcctcctgccgctatcagagtcaagattgatttttttccccccatatgaataaccagctgacctcaggtcatttactgagaagactttcttctcctgtgtgggattttttatctcatgcaatcctcatgatcaccttgtgtggtaggaaacagagactcatacagttaattaagttgtcaagttgtcatgggccattcagttagtaagcaatgaaaccagaatttttaaaaatacactgtaaaattaatatttgcttactgtaaaaactcaaatataaaagattgtaaagtgaaaagtaaaatgccctaacttctattaatactactcaagtgtcactgcttataaagccatcataaatgttttcttgtatttttctgaaattgtctatacatatgaaatcaatacctttatgtctatttctgtttatattttcattcctttctcttaatagatatagaaaaaacttcatatatcttatatgtatatatgactttcttgttttaacttttagatcctgataggataacactatgtattttgacacttgcttttaatatttgacagtaccttttgaaaaatgttccccttcagtatgtatagatccattttattattgtatgaatatctgaatttaatataatttaaataacaatattaaattatttccggttttatgctattatattctttctattcaaatcgcctattgacagactttttaaatgttgccaaactgataggtgaatattgccaatctgataggtatgtcattgttgttttcatttcagtatattgaattcaatatatttatttaacacctttttctctgtttgtaaccatgtggatctcttttccatggactttttttttttgatacagggtctcactctgttgaccaggctggagtgcagtggtgcaatttcggctcactgcaacctctgccttctgggttcaagtgactctcctgcctcagcctcctgagtagctgatattacaggtgtgcaccaccatgcccagctaatttttgtatttttagtagaaacggggtttcaccatgttagccaggctggtcttgaactcccaacctctggtggtccgcccacctcagtctcccaaagtgatgggattacaggcatgagccactgtgcccagacttccatgaagttttgattcatgtattttgcccattttcaccattttgttttttgacttgttttatcagaactttttatattaagggaattaagccttttgtttgatataagtgttgcaaataatttctccattattttggtaatttaatgtttacttatctttccttagtttaatgttgctttgaatttcttctgttaatctttacttccccaggataggaggatgggtcacataaaataaagttgtagtactcaagcatttttttagtgcatagttctgtctcctttgtcgttctgtgatgtggagttatgttcctgtatattgcccatttctgcagtttttcatcctccataaaacatgttagtacatgtgcatctatctatcctgcataggactggcagaaattcagatatactcacccctttgatgtattgctgaattgaagcgcatgtattgactgaaagaaacaaacgaaaccaccaaaaaactattggaaaagttctctgaatcattttttctgcagcatgaaaaagcaaaattatatatatctactctgtatgaactgtatgtgcatttgactctgtgaaatgctggaatttgaaatacaggttaaactaaaaaacaattcatgtatcatttaaaaacagctcatacctatagagatgtatgcaatagcatgtcaaagaatagcaagatctaatcttcatgttgtgttttcttaattacacacacacagacactcatacacaaataacaaaggctttaaaaaaagtcagccccatgtaatgaattggcagcaagtagtaaaacaatgaactgttactccaactaaggagaaaaaatttgcatatgaaataattgcattcagtaaaaaagttacatatgtgataaattgtacagaactgagtatagttttaaactaatgtttacaacaaattatgtgctagacacatttctcctttagtttttgtaatagattaaaagttgatttgggccaggcgtggtggctcacgcctgtaatcctggcactttgggaggctgaggcaggcagatcatgaggtcaggagtttgagaccagcctggccaacatggtgaaaccccatctctactaaaaatacaaaattagctgggtgttgtggcacatgcctctaatcccagctacttgagaggctgaggcaggagaattgcttgaatccgggaggtggagtttgcagtgagccgagatcacacctctgaactccagcttgggcaacagagcgagactccatctcaaagaaaaaaaaaaagctgatttgtatttctattttataactaaagtaactgagtttcagtaaggttaagtaatttgcctcaggtcacacaactagtaaggggcagaccttggattccaaaccaagtctttggctttaagctaccacatagtactgcctcctgaaagaagttctgagcaacagggcaaatgtgagccaaaataatcacataagcatccagggaaaacaaaacttgagctttcaaaaatgaataggatttaaataagcaaagttgcataagggggacttattggatggggaaaacagcacgaatgaaatcgtaagtgtaagaatgaacatagtgcataaagggaagggatttctatgactggaattcatgcatatgggaccatgggggtaacatgcagctaatgacagtgagccctgaatgtcagaaaaagaagtactgactttatcagctacaggacgggcagtgtggagccattgaatatgattggtcagattaacaaggtgaaaagtgcgatttgggaagatcatctgcttgggaaatagagtgttctccaaaaggcaagttactaaacatgtcttagtctgtgttgctataacaaaatactttagactgggcaatgtataaagaacacaaaygtatttcttacagttctggaggctgggaagttcaaggtcaaggcactgtcattggtgtctgctgtctggtgaaagctattgtccgattccaagatggcaccttgttgctgtgtcctcacatggtacaaagtagaagggcatgagaatgaacccagtctttcaaacccttttgtaatagccttaatcccatccatgtaatcacctcttaaagaccctacctcttaataccatcacattgatgattaaatttcaacatgagaatttttgggggacacattcagaccaatagcaacatccaagaagataagtagatgactattgttataactcctataggattaatgagagatgtggattaggatgatagctatgactaaaaagcaacttagaggacactttgaagatgaaaaatgggaaataagatgagtcttgccgggcgcagtggctcacgcctgtaatcccagcacgttgggaggccgaggcgggcggatcacgaggtcaggagatcgagaccattctggctaacacgatgaaaccccgtctctactaaaaatacaaaaaattagccgggcgcggtggcgggcgcctgtagtcccagctactccagaggctgaagcaggagaatggcgtgaacccgggaggcggagcttgcagtgagcagagatcgcgccactgcactccagcctgggtgacagagcgagactccggctcaaaaaaaaaaaaaaaaaaaaaaaaaatgagtcttgttgttttagcatgttgtaaatactcattgttctcttaaaaaagtgtttttcaagcacattatagaaccaggcttagctattagttattttgggaatgctttgttttatatgtatatttttccagatagccgaattaaaatttccaccttaacctatttcccatttagaaaaaaaaaaaaaaaaaaaagaaagtgttgcttgctgccagtgctcatttctcagagcaaacaagaaatgggttaatccagatttgagtagtcacctcagccttcgttgcttgtctgaagacgggaagaaacaaataaagggtgattgaagaaaataattgtcattgacagttattatcatcatcaaacccatttttatttcaactgaatgttgcttggatttatttgaagcaaatcccttagcctagaggttcatgatatttcaagagctgtagctttggccaggcgcggtggctcgcacctgtaatcccaacactttgagaggctgaggcaggcggatcacaaggtcaggagtttgagaccagccagtttgagaccagcctggccaacacggtgaaaccccgtctctactaaaaatacaaaaattatccaggtgtggtggtgcatgcctgtaatcccagctattcggtaggctgagccaggagaattacttgaaccggggaggcaaaggttgcagtgagctgagatcataccactgcactctagcctgggtgacggagtgagactccatcacagaaaaaaaaaaaaaaaaaagagctgtagcttcattttgagcttgcccttaacattgtattatcttcatccttaggctattttgcctcatggtagagaaatggcagcacagacttctgatgtagcacagtttctctttcacatccaggggaaaggagaggatagcttttagctaccatgtaaaagtctacagattccttgtgattggatcaatttcagctcatatcaaggatgggattacataagtgggcttaggccacccaaggaagttggggatcattcttagccaaaagatgtagctcggaagttcaggattcctgataggaaaatattggggaattgatgctggaaagcaacagaaaatgattattatatagctttagcttctctactgttctagaatttgatccataagactgtcagattcatgtgtgatgcatcattatttcctccctcagcacctaacgaagagcacatagtatgtagatataggtggggcttttgttggtgggtggggagttgtcatttgagtccaagaatgaacattcattcataggaacatctcttgaacgaaaacatttttaaatcaaagtgataaggaaaatttatacttaaaactatatataaacatacacaagtgaatgtaaataagttgcctttgataaaagagggatgccatatttcagaaaaagatctctgtagagaaaatatagctaagtcttatacataaaaattagaaaatcaaatccttaatatattgagatggcactcacaaatatatatttcatgattacatagtttgcaatatcattaatatttatggaaatatttttgcctgaatatttgtgacatacaagccttaaaattagattttgaaatattggaacttgtgaatggattacttgtatagacttacttgttgtctgtgagtgtaaaatgttaaaattgcatttaaaaactcaggatccaacttaagatagtaatactagtactattgtttgagcacctacaaggtatttgttgcttcacatggaccagccattgaatgcttaaataatcttataagtaagcctcattatcactaatttactgctaaaggaaccgagttggtgagaagttaaacaaagaaatagagatagaaaataataaagcaagaatcaaacccaataaaatgtgttccaaaaaaatgttccaccattatgctgcttgtcttatttgaaatgtatccccttgagacatggatttatgtgcaattgatttactaaggaagtgccaggagaaaacactgggtcgggggttggctggtggggagagtaaggcaagggaagaagaagctgagcaagagtgtgattctgttgcagttccagcctcaacccaaacccatggagaacatgtcccatctgggcaaggttgctggacatccccatctccatacctttcacctgccccaggggaatgtatattttgtggcactagttctctgcaaggtagtcctccgaggaaagttgcagatacaagtgattagaaatgaggaacctagaacagaaccaggtggtaggtgcactgaaaaggctccagggatctgaagtgttcttggtagagcactgatgctgtcccatccgtgaccctgctaataaagatacgagtatatcacgtggtggtcaggagcacattcttgatccagaccgccagagtcaaatctgcgctgtgacacttgggcaagtttcttaacttatatgtgcttcatcttctgtatctgtaaaatgtggaataattcttttacctaaacacataaggttgctttgaggattaaatgaatatatatattcatctagtctgtacatagactagagctggattggaagcagagctattatcatgtgacttacttatggcatgtcccacagctggttagtcgcacagccaagatgggacctctgggacactcctacttcttgctggccatatacgtatgaatttaaaattaactacttcttgttggccatagatatgttaatttcaaattttcataaagttctaggtgatctctgctgtattgaatatctcaagtaattgataattactatatatgctaatataggtacagaaggtaccttacagttcatgagtaatctattaaaaattcaaacaacaatatatacactaagcatgctgtgttataaactgwcttaaaagtaatgttctgttttgtttgtttttatattcttgaagtgtttggccaaaggacctaattcattcatatttaaaaataaatgactgtaaatcataacatgttacctctttcatcaagtcaaatagccttaatcctaagtgcctaggtggaaattcagaaatcaataagcaagggagaaagatattggtatgtagtagaggtatgtagtagaggaagtgattctctcccaacatattactcttcaagggcatttactgaagtaactatttttaacttaygcaggtccaattaagaatagtaaataaactggaagagtaaaacaaaagcaaagtattttatgtggcaatgttccaatgtgaagaaaaaaatttcaggtagcacatgcatgattgcacatacatattaatgaattgatgatttatacttatttgtgtttgattattaatcaggacttttatttgcaagtaatagaaacccaagctgaactagtttcagaaaaagaaaggaatgtatcgattcatttattaagaggaaaacttgagtaaataaaccacagttggtagagatgcaactggtttcaggaacagcttcagtgaagtgttcgaactctgccaaacctgtcttatcttgtctctggtacctctctgtgtgcttgcttgatggtatctcactgaatgctggcttctttcatgtgctgagaaacatcatccctggaggttgctgaacctcacagctcatattcagcttctagagggggttgaattctttttcgtcgtttgaaaagttccaagataggctgggcacccttccctgaacttaccaattgtggctggcagggcaaggttgtgtttgaagatggtagacgcatgagaattcgggattacagtaaggggtgagttatttcccagaagcctcctcgccctcatttcttctctttttccttccttttcttcatctctttcccacttcatctcttcttgccatcacctcatgtgctttagctgacaggtccattcatgctgtggccccttgactgtggccccttgacaccacatcagcaagtcaggatttgcattgcacccttaccttcttcagagtggagtgtctgtggtgcaaagatgccatttccttgttaattctggttgtctctcatacctgggatacattgtcaggctaaaagagccgttcctgttagggatgaggatacggcaggagacatggagagagaggggcagatacctctgtgctcccattgtcacatgagcatgtcagcatgatcatatgctcatccatctacatggttagttctggctgaaatgttcccataggcagcatcactttaggagctagctgacctcttgataactttttccagagatggattacgggcttttatgtgggcagcaacttgtgcctcaggtgggtatgtaaagctgggtgccaggaacaagaacaggcaggaagaaaagtgatgggaatttacaaaatttccagctcattacagattacacccatcgcctctctccttttgttttagttttgaatttatcgagttgcaagttgtttttgaagagctgtgttccactcgtcctctcatgttttaacaagcaaggagccacaggttaaatgggtagagttggaagaatgagtacaggaaaattgttcaaaagggcgctagtaacctccctgtgtttctcacatattgctgagtataatcagacaagacaagaaaggtactttctcccgctttacccccaaaattaatagctaaagcatgacacacatatatttagctataaataaaaaaacctatttagcttcagtcatgtatgagaaatgtgtatttgtgatgagttgatgagttcgtgtcacaaacaatgacagggacaatcatgacctaggtagaaatgtacaaatctccaaatttttagtttgtggtagaaaattgaggatgtatgaatttcctagggctgctgtaataaatgactgcaagctggatagcttcaaacagcagaaatttattctctcacagctctggagatcaggagtctgaaatcaagatataggcagggccaggttccttccaaaaactccccttccttgcctcttccagcttctggtagcttctggcattcctgggcttgtggcagcatcactccaatctctgcctccatcttcatgcctccatcttctctctgtaygtatctatgtctgaatctctctctcctttctctcataaagacacatgtcattggatttagatcccaccytaatccagtatgatctcctctcaaccaattacatctgcaaaaaccctattttcaaataaggtccccttctgaggttcaaggtaaacatgaattttcaggagacgctgttcaacccagcacagggaaataaagcaaaaaaaaaaaatatgtttctttcagccagcattattgtttaggtaattggctatttgaagcctccaaaaccatacggatttttttttttccaatactcggtgtctttcacaaaaagccctttttgaactgaatctgttttcagggtaggtgctggtgaagagagatcagcaggtaggcacagttttgtcaaagatctcattctttcagtcactgaagggaaatatacatttcccctaagattttcttgcctcaaattctgaaacattttcttcgttctaagttctagggaattctgcaacacatagaattttttggtattatctctgtacccagtcacttggtcttaggttctctatgtctcatcccactctgtatagctcaagttaagtagaataagatgccaccaagtgtagattctttgaatcgtttcattactttctacattgtaaaaaatgaatatataaaatgggttcctgatatttaagattttttcaatcatattgtgtcctttgcatcaaattctatccccccagctctgccctcaggcagctacagagtggatagaaacgctttcctctctcatcaaaataatgaagacatttgctgagagctgattaggaggtgtgcataaattgggaaaggttttaggatagccacttcagggagctgaacagaatgcagagcaaaaccaaagaaagattgacrttctgaggcaaaagtgtgagttatgaactttgaagtctcatgcgaatacttgtataaagtttatctccagtgtccttagtggaggatgagaaggagcagatgacaggagtgattcaccatttgagcatttgggtcagttgtgagtgctggtgagtgatgagttcagtgacctyccaggagaaaatggctggctgagcaactggaaaagtgtgaaagagctaacaggaaaggaaagaggcacagaaagagaatttcagaggtagtgtactcatgggcagggtgtgacaatgggattcagtagctgaagtgggatgcagtatagtggagataatcaagaaactaagaggcaaatgaatttaatgattcagcctcattgatgttggcttcatggaaagggtagtattcattttatttcaattcaataaatagttattaagcactctttgtgctgcaggggctatgtgaggcatatttgacctggataaagtgcgtaagaagagatgatgagattaggaaaaacggtcgttgtcaaggtcagctttatggtcagtgttaatttccaccttggttttggctactcttgagcaactgtttattgttgttctctgcttttcttgctaagatatctcaagtgtatctgaaagctcccgttacttgatctaatggaagagactgttttcctctttcaggttgaagtctttccctttctgtctgtgttctggtttctgggctgttcctttaatacacacagtagttaataaataacccacggctgccaggccctccttgcctggtctgttttgccatcagaaggtaagctcacgggcctgtcacsattctgggtctgtacaccccacctttgtacaagaatgtgggatcaataacatagtttratgtcatcaggggaatttccatgtttgtgtcttgcctccacttccatatgcactgctttgtatttctttttatttatttcttctgccatcatacagccaggctacaagcaagattaaattaaatgttcattccagtgtcaggaataccaatatatctatattcgtatactttctatggtcatgactttctttaataattcgtacaattttaatatttttgaatagaggcaactcttggcattccccctgtgattgtgataataatgtgaatgtgtgaagtaaccagaataaggaacactttttaaatgctactctgatacattacagggtcagtatttttttttttttttttttttgagacggagtctcactctgtagcccaggctggagtgcagtggggcgatctcagctcactgccagctctgcctcccgggttcacgccattctcctgcctcagtctcccgagtagctgggactacaggtgcccgctaccacgcctggctaattttttgtatttttagtagagacrgrgtttcaccttgttagccaggatggtctygatctcctgaccttgtgatctgcccgcctcggcctcccaaagtgctgggattacaggcgtgagccacagcgcccggcccagcctcagtatttttaattaaaaaatgtataactctgtcatcattacaartaatataataatgcaaaaacaaaagtcttgtcttttccgtggacagttacccagcacatcagaaagtcgggttaatgcagcattcagccaacaagcaggaaggggcatggagctctgtgtgtgcctcactctgcttcctcagatggtgccttggctaaagaagaatagcataacatagtttaaaacacaagtttgttgactgcttaaaatgtttgtagaacttgttgtgggagcagaaaataacgagcagcctccatcaggggattggtagcagtgccctggcttgatcaggctttgtaagcatggcgtgaagcattgtgggaaatcctatcctgtgctaagcatttgagccaatggccctgtcctgcactgatcaaagtactcccatttcctcaagttgtaccctccactaaacaagttatgtccatccttaaggaacattcttggtgtctcacttaatatccccatggtggtctgaaaatttcctctctagaaattattcttctatttttcaggagtttgatagtcaggtaattttttctcccatattatcagtttcttaatttatatttatccttacatgtcatttccaagcacttctttttctttctttttttccctgtctttgctcacatcctttctattttgccaagggcttgcttcttccaagcctttttatcctctcctcccgtgatcagtacccaagtttgcagcaaggttccttgttgttttatgggttggtgtttttgcttaggaaatcctcatgttttaggctgcaccctcaatctgtaatctgaaggtcagattacagtttaattcttcttgaagccctcatcaagtttcaaagagaagccttgttatttgccctttgtaagaaggaacaccttgaaaggccatgggtctgtcttctcatcctagaggccaaggggcactgggactggagtggcagggaggccatgagccccctccccaggtgtaagactcccagtctggcactgcacctctgagggcatctgcatgtggtggtccctgctagtggcttccagaagtaccttctggcattggctcctgaggtcatcacccttgttgatgacagctgtcggcaacttgccttactgaagcctttcatcctccctcccaccggcagcaacttccagggtccttgatgcatctccaacacgcttcctacaataatgtgtagccgtaggaaagtacagactttggggtcacactagcctggtttaaaatcccatcaccctttcccagctgtggtactttgggcttgttgtctaatctctgagtttcagtaaatctgtaagataaggattataacatctttcttatagatttgttgtaaatattaaatgaaatacatagaatgattcatatgtggctagtagatagtaggtctaaataaaagacagatgttattattattccagggataaattggtagctttgcagtttggtgttagttttagcacttcctatgaagacaaaaaaaaaagcacttgctcttaaaagtttctttcaagctgtttatttgaagctccccaaagtcaagcaccacccagcatcacacacccttcactccctcttcctctacttcaatgaaggccactagtttctgaaactgtcgtgacagtaaccaactctcctttgccctaatggcttcttcccaagatctaccttacagagctcagtacaaccttaaggttctgcctgaatttatgaggtatttagcaaaaatctcacatgtgcctgaatattttactgttgacatcttagcagtgccctgtcccccttggaggaccgaggaacccaaaaacgtcaagtctcagacagaagctcaaactagacataaaaatgaaattcttatagaaattctgggttttacttctgtgcaatcattgttactatgcaaccatgcttgaacgataactacccttttcaagcaaaatagaaaagtttctgccttcaggccacacgaccttttagagacaaaacaagtgcaaacaaaaccrtgtgcaatgttttttccatgaatgtgatgttgaaaatgtacctgaggcttaggtgtggcatgactcgctatgtaacacagaagaaaactggatttaaaaactggaatttcttggctgcccattcagacacgacccactacataccatttccccccttgcttagatttccctacagaaaagagaaaamctgtggagaaaatggaaamcaaagccataggagaaaagagctgaaaacacttcatgtaaatgtgcatgctgaaagtagagagcaagcaaggattttaaaatgcggtgcctgaatttgagtagttaggactaaacacagaagtgttgatgaactctaaggctaaactcttggatatttagcaacacgccagggctactttatcagctgaacaaagattccaagaactctgaggggaaagaaaaaagaaccctgtaactcagcggtctccagcctttttggtaacagggaactggtttcatggaagacagtttttccacggactggaggatgggggagatggttttgagatgaaactgttccacctcagatcatcaggcattagttagaatctcataaagagcacgcagcctagatctctcacatgcacagttagttcataataagattcgcactcctatgagaacctaatgccactgctgatctgacaggaggtggatctcaggaggtaatgtgagtgttggggagcagccataaatacagatgaagctttgctcacttgcccactgctcacctcctgctgtgcggcctagttcctaacaggccacggaccagtactggattggggacccctgctctaactgatgcaacacctacagcccacctacaccaagtacaaggctccatttggtctgcatatagaatctctgggatgctagggtgtgcttcactcattctgagttgattcctaggttcttggactaaagtgggcaagtgttatgaagggaactaacagagcaaacagtggaaggaccacattcatgtggatcacgctttccacattaggaccaatttcactgcccattctacttgtttctagttttcctcttttaatttgagcagtgtcacaagcgcacatagctaacaatgttttttttctcttccaaattctaataataaaattgttattggcttttgatcttaatcattaaaataaaaataaaatgtgcaaggaaacttgcagyaagtttccttgttgtttcatgggtggattttttttcttaggaaatcctcatattttaggctataccctcaatttgtaatctggaggtcagattacaatttaattcttcttgaatttcattgatgataaaatcaccagtaaaaatgattgagccctagccttcttctcagcaccatgcatttatagagataaatgagatctcacctctcaccactggtagggatgggtaaagataacattttgaggtggaagagagggagactaagagcgtttgtgcccacagccttgacttctttttttctatgtgaaaaaaaaatgctataaagacacatgcacatgtatgtttattccggcactgttcacaatagcaaagacttggaacaaacccaaatgtccatcagtgatagactggattaagaaaatgtggcacatatacaccatggaatactatgcagccataaaaacggatgagttcgtgttcgtgtcctttgtagggacatggatgaagctggaaaccawcattctcagcaaactatcgccaaggacagaaaaccaaacaccgcrtgttctcactcataggtgggaattgaacaatgagaacacttggacacagggtggagaacatcacacaccagggcctgtcgtggggtggggagagtggggagggatagcattaggagatatacctcatgtaaatgacgagttaatgggtgcagcaaaccaacatggcacatgtatacatatgtaacaaacctccacgttgtgcacatgtaccctagaacttaaagtataataataaaaatttaaaaaaaagtgagaggcaggaggaggaagagcaaacctggaaaaaagcaagcaattttcaaaacaattgctctgcagaatgggcaaaggacaggacagtgaattaacaaccaaaaaaaaagccgattagtaaagtcctgtttcttggattaaatggttatctcatctttgttgttgccgttgtcatcatcatatctttaccattgtcactgtctccagaacaaattagacttgaactacacaaccttgacataattgagaagaatatccctttgagaaactgacagtaatttatgctagtttcacgtttgttgtgggatgttgtagggtggtcttatttattgtgtcctccctctcatttatgttcgtgtaggttgagccagtgatacagagaggccatgagagtctggtgcaccacatcctgctctatcagtgcagcaacaactttaacgacagcgttctggagtccggccacgagtgctatcaccccaacatgcccgatgcattcctcacctgtgaaactgtgatttttgcctgggctattggtggagaggtggggctaatgattactgagatgtaacacaattaactgatcatatttcccgccacaaatatgattctaattaatacttagaagtaaagctttaacgctacttttgatatgaaggtggcttaactccattttcgtaggaagggattctttctttaagtcatttttattttatttcatcaattgtagatgaatggggttccagagggttgaaatatccttgaagatggctgvtttttgagtggaatagagctctcagggactttcataggacattgtctcatggcattttccatatttagggcttttcttatccacctcatgttggattatcccttggcactccattagatccgcattatgtgctcctagaagtccattatgataatcccacttatgaggaaggtgagtttattattcatatgttttacctatgatttttataaaaagttttgtaccttgtaagtctttaacagagttgaaacaaaatagcagccagtgttagaaggaattaacctatatatttgtcattcaaattaggatactttttaaagtgaaagtgggtactatttataattatactgtaacagcaggcattaaccagcaccaaaccaggtaaatgagcacacgcagtcactaatcttacaaaaaaaacacttgcatgctacctaccaggaagtagaataatagacttttcctttgtgatgtagattagtcccaatacatggtgtttatggaacattttctttctaactgcacgtaagaaaaagttaccatttattatactaaaaagtgtaagcattttgttgtgtggtaagcaaaccatagatgtactcaaaaagtacttatgcagtgacaccgtgtaatatgatattgaagtaaagaaatgtaaggatgtacattttgtttctgaaatcatttgtatgatattccaaatcctaacattgatagatttaacacgaaattatcaacagaagtaactccaagttattattttatattgactcatgcaatttttcagcaaatactgagctccaactatgtgccagatctgtgcttgaggatatagagtgagtgaaaaacagatgctgttctcacccttacagaaattatagcccaatgtgaaaaagaaacaatcaatttttcatagcaatcatatgaaattatatgtatgccaattggtccaaagaagatacctaacactatgagagtatttaattggtgacctaatccagccaggagtgtgtattggtggggatgggctaaaaagtcttcattaaagaatcaaactgttcatctgggtgactggagatgctgaagggttagggtgcagtgaagaaagatgctgatgaacctgcagaggaaggctgaagcagaccatctaagatcttgtaggacccattaaggatttttaccctgaagacaatgagaagcaattgaagagtttgatacagtggagtcaaatattgagatctgtattttgaaaagaccactctggctgcagcagcatgaataatagattttgaagagaggacacgtggtatgatatttaaagagtgatgtttctataaaagtaggtgtcaagctattctatttgtgagcaagccaataaagtatctttttttaccctaaagtaattaataggaaatagtttctctctgaattcactttaatttccacccaccaattatatcccatactctgaaccatgaatctatgttaaaagtttaaaactttcataaaccaagcaaaataacctattaataaattctaaaagttagattttccgtgaaatcatatgtgactataaaacataaaaattgtcatcacaataacaatgggattaattattgaatatgtcttatattgcaacttttaaaaattttttacatttttgattttaaattattaatagaataaatattctatacaatgtataatacttctccaattggaaattctatgtgaactacttcttccttttagtctttattacaaaagtagaaggcttaatttatttgccttctctgttgtcaattaagttgactttctcatagtttcaatgtaaaaatgaaacataagcttattttcctaacaggttaatagagaactcaggatttttagtactttctatttttattcatgtacataattagaccaaattttagattatagtaattttatttttataaatataacataatacgaatttgtttccagaaaagttttttaataatcattttatatgtgcttaagaaattattactttatttactagattatctattaatgctccaaacagctaatgcaactaatgaacctaactatacaaaatgcaactggaatttctacttatattttttccctgtcaaacttataaggaagtagatgccaaaaatataaaatacaaaacaaaattttgcaagatatgtccagagaaaattctaaggtcagtatagatattctacattatcatgcttatttgtatctgcactgataataacacaaaaggagaattgatttttatgatttatttgtttaacaattgattgaaaccctggtagatgtgtgaccactgtacgtgtgactagctgccatttattgagcacctcatttgtgccaaacactgttcttagaacttggtgtttaagccacacatcacacttatgaggtagtagtgctactattatggccattttccatactggaaaactgaagcacagattaggtaactttatgtcttcatctgttctgtgctgctataagagaataccacagactgggtaatttataatgaacagaaatttattcctcacagttctggatgctgagaagtacaagtacaaggtactggcatctgatgagggccttcttacgggtcataacatggcagtaggcttcacatggtggaagggtaaagacagcaagagagaacaaagccacttctgaaataatggcattaatcgattcacaggggccaagccctcatgacctagacacctcttaaagctctcaccattcaatatcatcacaatggccattaattttcaacaacattcaaacctactttttggaggagatagacatttaaccatagcatttgccccaggtgacataactcatatgcagcagagctgggatttgcatccaggttggtcagctccagagtcagtgtccttaattgtcacatcacagtgcttccttgtgatgaccctgaatatctgaagaagctggagtcaacaaacacatagcaaatattttatgttcacaattacaaactcatgaagcaggaaagtaaagcttggatttttttccaaggctgttagggaggttgagaggtaagaatttcctgggataattattgaaatacttaattttaacaacttattacatctgaaaaaaattaaaagtaatggatatcttctaagtatgtgtgtgtgtgtgtgtgtgtgtgtgtgtgtgtgtttgtgagtgaagggtatataacatgcaatgaggaatatttgatatagagaccttgtgtttaaaaatgattgactagaaatagattaagctgattgatttaaatgagacaagaaaggaaactgaggggaaggaatcaatctgttagttactgcagaaggaagtcaattaatttccaagttaatgaaatgaatttatgaaatgtttggggctcatactctccctccctgtaatgaatatttcataacgacaagtgtgtcttattcatctctcatccccacaatgcctaatggagtgccatttacataatggattcttaatgactgtgtgttgattgaatggctgttgaatgaagaagaaaatggtgacaaactttaaagaaataaagtgaatctttagtagtttttttcttcagcagatggtttctaaactaaggaggttttacctcaaagtaaatgttattgaacttcatctcgaaacaatataaaataaaagttttattaagttatttattctatattctaatgaatgactttagaatcttcattctgtcttcatgttagataattgtggaatataacagccagataacggaaacatttctcttgtagtatgctgtgtgagtccacaaaggttgcaggcaatatggctactcatcttttaactcttgtttgtgaaactgaatgttgtctgccactaatctctgcttgaatccctttccctcatgacagtttatggaaaataaataaacctatttcaacagaatatgaaaactttaaaaaattcaaaccaagaattttcttgggaatgaaaacattttaagaaccaaaaatcactttaattatgtgcttttgttctaggcttaatagataattctggactgaggytattttacacaatgratataaggaaatatgatgctggggtgattgaggctggcctctgggtgagcctcttccataccatccctccagggatgcctgagttccagtctgagggtcactgcactttggagtgcctggaagaggtatgcagcatctgagtctgagctgctctctgcagattcatcaatgctcttagaaactgtggtgtgaaaaattccgcacatgtttattatcgattcctttmttgttgacacactgtgaaacccttatcgcaattttagtaggacttttgactgcttttttaaatcttgaagctacaggagtagaactctaaagacagaagtagttggcagggtgtttttcttcttactcctaccttttttgtttgttgcatgttgcatgctgtatatcatcttttacaatttcaacctttgtttgtgtagtctttttcttttctctagtttaccttttatccatattgatttttccatcatttattttcatttttctctgccttatagtttccttccctttcttcaccacagagcaaaaataactaatataaaaaaatatataggatagaagaaaagtatatttagtaatgacaattttcacttcaagttttttaatgaaaatatttcaacatggatcatactctttatgaattatatgatattgtggttgaggacagtatggcagactggtgaagtggaaagattatgctcttctgagttatttaggccatagttcataattcaaattgccatgacctcatttacaagctgtaggaccatgggcgattcatttaattccattgacccactttcgctttcttatctggaaaagtgggaataatatttccttttaagaatttgggttttcaggttactaacatactgraatctttttgctaagaatgtttattgcctcttatcctcctaaaagaaggaaaaaggaggataacatgtagaaatggtctgggaggccccttataagcatcagctcccctacttttctcccggcaaatgttgcttcacaaggagaacactgaacaatccgaattcaaactctttttcagttcaagcattcatttaaattgctttagctttttatctcagttgtccctccaagtgtgtttgaatgtaawctgtctgaacatgcattaatgtgggctaatngggtcttcctcggtgtctcctgtaggctctggaagccgaaaagccaagtggaattcatgtgtttgctgttcttctccatgctcacctggctggcagaggcatcaggctgcgtcattttcgaaaagggaaggaaatgaaattacttgcctatgatgatgattttgacttcaatttccaggagtttcagtatctaaaggaagaacaaacaatcttaccagtatgcatgtttttgttctttttcattgactgttatgaaagtcatgagacatatctgctgagatgtggcaaggtttctactagtgaaatgaatttttccttgcatctgtattcttaacaccacccactgtgggtgttgtacaacccagatggaatgtgtttgatctgttttccaaaattgaaactcatttttcttataattcccaggagcaattcaagttgttgactgaaaaataaaaacaaccccaaacaaaaatctcaggttctgaggactaaacattactctttttttatacttgacattccagttagtgattctttgggttgcaattcctgcagtggtaaaatagaggtgtctttatgctatgttgaaragataggatatttttagaagtttcattttagtaaaaaggaatgtaaggataattcttttatctgataaagctatgtgaatatagctaattaaactatgctgtgtgatccagcttgacataatacttggggttatggtgaaggagagaagagaatgaaggctttaaaaaggttayaatgctttgttttctcaaatttttattccatgaccatcaagctcacttgtagtataattttctacccttattttacttttaaaagtcagatccctataccatttacgaaatgagagtaatggcaatatcttttctacgtgatgctggagacagkgtttttagatgggatgaactgtcagggagaagacatggcacaataggatgtaaaaggaaagctgaaaaaacagaagaaagtgataaagaggaaagggatcttctttttactaatagctatcccttaaatccatagctttggatcttagaaattctttgatacatccggagagtagaaagaagtttgagaaatggtgatcttgtcaaggttcttaaggactacactctattttattatgatgtctctggggttttccaaacagtgttatctcagagtttcctaactgacgcaccatgattatggcataagtgcgatgagatactgttctctgggccctctgagtggcrtgcagggaggtcaaatttaagagcaaaagcccagagattacggcctcaggtctatgaatagcttcatctgcttaccttaaaggggaaacataaaaatgttatcattttccrtatgtattgtaatgtacaaaaggatggaaaacactagaacaataaacttctattaatttgcctcacgattctattgtaaggaaataaaggcatgactagagacctttaaagaaaataatgtaaatgaagaggtgatcacaataactactatctatgtctgaggtttattaaatgttcatttgttgctaatgcctatgtgttatgtcatttaatctcctcgtaacagctgtgaaaaaaataaggactttttttttttgagatggagtctcactctgtcaccccggctggagtacagtggtgcgatctcggctcactgcaacctccacctcctgggttcaagcaattctctgcctcagcttcctgagaagctggaattaaaggtgcccgcaaccacgcctggctaatttttgtatttttagtagagacgcggtttcaccatcttggccaggctggtcttgaactcctgacctcgtgatccacctgccttgccctcccaaagtgctgggattacaggcgtgagccaccgtgccagggccaaaaataagaacaatttttatctttaggttttaaatgaacaaattgtgcctgggttatatgtagttcatccagctagaatgttgtggagtctggtggaaacacagagagtcctatttatttgcttgcttgttatatcagcaaacctagaattaaacagatcaggggtcttctgctgaatgaaattacttggcgcatccattcatacagcaaatattaactgttgacgtacaaatntatttgataaataagccagcataaaacttcaatctgaaagcttttgcttttatgtttcagggagataacctaattactgagtgtcgctacaacacgaaagatagagctgagatgacttgggtawgaaaacttttattattattaaagttcrtttayggagagaaagaaataaacttgattttagaagaaaaaggtaaaaaccatttccatttngaaagaaaagttctaaaaatcttgagtatcaagtatcataaaagtgacatcagagatgtttttarcattttctaagacttcaaattaactratgatattatagtattaaataatacttggagtgtaattaattgactccttcatgaaaagctatccttagtcttttaatttttctcatctaatatttttaaaagaactgtggtcattaattgactgtctgcttgagtctggcttagataaatacagacttccaaatgaagaatgaatttcatgaccttgaggcctctgactcaaagagaaatctggtcccaacagatttactgggggaattccaccaagcrttcaagaaatagataattcatgtcttactcaatctctttcaggaacactaaaagagggaacacctcccaccaagtcataaaatgtagttwacataatcttaaaactaaaacttcacaaggatagtataaaaggggccagtagtatgcacctgatggaaataacttggacaagagtttgacaaaccaaatccttttttatatacaaatctaatgataagaccaacttgagtttagctaaggaatataaaattgatttaaattagaaaatatatttattgaaagaaaaagatatwtaatcacctcaacagaggtagagaaagcattcattaaattcaagtttattgttgacaggggagacatttagcaagcctggaataacagggaattgtcttaactaggtagaagttagctatgaaaaagctatagcaaatattaaattaaatgaaataccgttttttttttcaagttaggaagaatataagggtatttgttatcactacttgtattcaacattgtactggaaaagaaatgaaaatgagatataaggatcagaaagaaagaagtgaagaagcaaaacacattactcacagatactgtaattttctgcatcaaaccctcctccaaattgatactatctaaaattaattgcatttgagtatataagaaattatctcaagaaaatacaatttaaaataaaaattaaacagaaataaaatctaacactagatgtgtttgatctctgtgaaaaaattataaatctttattgggaaacattaaaagaatgcctaaagacagtaagagataccgtgttcatggatagaaaggctcagtaaaataaagaaaatacttctattcatattggctcataaatttgatattattctagtaaaaaaatttcagagaaattttacgatttgaggttttggtattctagctaagaaatcttcaccagaccaaggctgcaaatattttcatgtattttttwatttatataaacattttgctgttttagctttyacatggagcaagttgattctaaaatttacacagaagagcaaaaggttaaaaataggcaggacaaaactgaaaagaacaagatagaaaacaatctactagataagaaggcttattttaaaactggcgattaatacaatatgctttgagtcccaagttagaagacttggagcagaagaggcatctcagaaacagacctacaaattctacagatggaaacttggtttatgatagacatagcatttagataaatggaaaaggataaactttttattaaaggatgctggcaytaatggctatccatatgacataaataaaactgagtcttaatttcacacaatgcataaaaatcaatgccagatgtattaaatatttaaatgtgaacagcaaaaatttaaaaccrctggaagaaaaaatacctgaatatatcttcatgactttggagtagttaagaattttttaagcaaagcataaaagcacaaactgtaaattaaagattaacaaatttgactacgtcaaagcttttgcttaccaaaataaaacactatgaagaaactaagaagagttttaaactgggaaaaatatttgcaatacatagattaacaggacattagtatctagcttataaaacaaagtccataagtcagtaacagaagagaagcatacaataaaagaggataagacaaaagcatttcaaagaaataacaacccatataatagatactataaatatatgaaaagatgctcaattttgtttaaaaccaaatataaaccagagtgagatgttttgaactaaccagtttggcaaaattttaaatagcatttccgttatgctgaaactggaacacttatacactgttagtagtgacttaaatttgtaaaaccatcttggggaaaagtatggcattatctagtaaaattagagattcatatatactytactcaattccattcctatgtagatttaaccttggaattacttttgcagaatgtgtttcaggagagaaatatgtaaactattcatagtaacatataataatataggaaagaaaaaattctggaaatctctcaaatacccatcaaaaggagaacaaataaatgtggtattatttaatgaaacagtgtaaagttatgaaaattaatgaatgaaagctgcctatattaacttgagtgtatctgaagaacaaataatgttgattgaaaagagcaagcttgtagcagaatatatatagtgtgatattatgtatgtaaagttcaggaaaattaaacaatatattgtttagggatacatacttcaatatactgaatgtaaagtgtaatgaaaaacaacagaaagataaaatattaagatagtaatcacctttggttgaaatgggaagaagagggatagaagctggacacacatggagtagtcaatgtactggtgttggttttatttttttctcatgccttatgtataatttttgttgttgaaatattattttactaaagacataataaatgagttattattatagtgggtattttggtgcactgtcttgataccctcttcagggccaacacaaccaaacctcagccactgggaatgtcagatgataatatgatagctcacagctgtgtacctcactggacattccccttggtattagaaaataacttcttaaaattttactccctacagtaggagagccagcagtcaatgactagttgataagatgctgcaaaggcccagctttccttctacaatttggtacaactctgaacagccatcctaacttaaggataaattaaatacaatatttactgaggcatcaaatgcaacttcatttgcasatcagcatcttcctttgcctaatcctgccttgctcatcaagtgcaaaacatcatgtttttgcaattagtaaaatcattgtatattagcccctaggttaatttagaatataaacaatattaagtttttcacctttgttttcgaaagctggattttgctggatacagaattcttggttggcagttgctttgtttcctttgcaacacttgtgaatatataattcaatatctttttgttatttccatcatttatgatgaaatgtcagctgtcaattgtattcttgttcacctatatatgatgtgtcatttttctcttgctcctttcaagattttttcttatctttggttttcagcagtatgactgtgatgtgtctaggtatggctctttttgtatttacatttggtttttgttgagcttcttgggtctgtaagttaatgtttttcattaaattggggattatttcaggcattattcctttgaatattttttctacctttttgtcttcttcctctcattctagaactccagttacatgtatttaacatacatgaaaacatatatgttagacataaatgctagaacatttaatgttgtcccatagatctctgaagtattttcacttttctttagtcttttatctctctgttatttgaataggacaatttctattgattaatcttcaagttcactgatattttccttgctcatttgaaacttgctgttgagcttatcctgtgaagtttttatttcgttttggtacctctcagctctagaatttctatttttaaaattgttcttctttcctaatgtcattcctttttctgttcactcatttttgagacatttgcctttaactacttgagcatgtttttctttaactctttgaacactttgtaaaacggctttattgaacatatttttatctgttttcaagtcattgtctgataaatccagcacatcaatcttacaatccatttctactgacttttctccattgaaggtagataataatttcctgtttcttttcccacttaataatttttggttgaaattagacatattagataatatgttgtagtaactctggattctgttcttttgaaggtctttaatctttttccaaattttagtagataattaactacctagattcaaaatatgaaatctttctcccctgtcgtatgcagctgctaatgtttatacacatgaagacaagattctagaaaattcaattaaatcagaaaaatttcctgcaaaaattcctgattgattggtattatgctaaccaaacatccttatgattctctgaaatgttcactgtgttgagaagtttacatcccatccgcagaatttattagkttrtttaagaaaggcaaatttttaaagtggaaataattctattaatttttaattgtgtcactacctttctaaaaagccagttttttaacttttcagctttaagatgtattaaattttaatattggaaggaactgtatgacattaatgacttgtgtgctttaaatgtcaaagttggtagaacacatactttgctaaataaactatctgttttcagggaggactaagcaccaggagtgaaatgtgtctctcataccttctttattacccaagaattaatcttactcgatgtgcaagtattccagacattatgsaacaacttcagttcattggggttaaggagatctacagaccagtcacrtaagtagtaaatgtattttatgatggggtaacgtatttcagagaaagatgggctttattgtcatactggatccattaccacattatagaaatttttatgcwctgtttgttctatttgattacttttaactggggagaccaagtaacctttttgattactatgtccagagtccccaagaccaccctcaggttctgtgatttgcaaggagtacytacagtactcagcaaatagttgtattcatggaaaacatgaatatggtgaaagcatgcaaagcagaaagaacaaaaggaaaagctacatgaagcaaagtctagaggaaaccaggcgcaagcttccaagagccctcttccagtggagtcacacagaatgcaccaaattacaccatcatcaaattgtgacaacatgtatggaatgttgtctattggagaagctcatcacagattcagtgcccagagttttttggaggaactagtcatataggtggtctctgcctaccacttactaaaattccatacttccagatggaaagcagttgttcagcataaactgcattgtttgcacagtataggcacaatgagtcactcttatcattagagaaagtttatgtcaatataggaaatcgtttactatttaagtttccaggcacctgccaaggattatccttgcaagcaggcctttctgaggtgggcctattatgttaactctttaggtataattgttctctttcggtacaattataggagctatttaagatataataaacaagattcatattttccttgccctcttgagattgtattctggagtgagggagaggtaataaacaaaaaaagatattttaaatagtaatagatgttatgaagacaaaacagtgaaggaagtatgtagttgttgtcaacaggataaagaaagcctctctgggttggtgatatctgagcagcgacctccgtgataaggagccagctatagagatatgcaaattctgcacaggaaagagccagtgtaatgaatgaccctgtggttagtctgaacctaccrtgtttgtggagcagcaagagagtgcatttggctgcagaagagtgaagtatggtagagaataagtgaggacacatgagagcaggtgggaccagatgatttaggactttatgggcaacataaggccttggggctttaagtgcaaagggaagcaattaaaggatataaataaagtcaatttggctactataytgggaaaggactctaggagggctagactggaaggaatatcaatcaggaaactattgtgattgtctagttgagggatgaaggtcacttgtgccaaggtggtgacaccaagttgatgagacacattccattcaggttactttttgaaaggarcaccyacaggcttgttgatcmatggcatctcatggaggcagtgagggatagagcagagtaaaggctcagtgatggtgtgaatggtgttaggggaacatgctgaggatgatattgagaattctgttttggatatattaaggttgatgtatctattcttactgatgtcagtgagaagaattagaatggctggtggaaatttggggatggctgaatttgttttaatatagagaagaattttctaatgatcactactattcaaaatgaaagggactgaygtaattatgtaattagagaaaatatacacatagargttttgtttttgtttttgtttttgtttttttgagacagagtttcgctcttgtcacccaggctggagtgcagtgacgcgatctcagctcactgcaacctctgcctcctgggttcaagtgattctcctgcctcagcctcccaagtagctgggattacaggcgctcgccaccacgcccagctaatattttgtatttttagtagagacggggtttctccatgttgggcaggctggtctcgaactcctgacctcaggtgatccacccgcctcggcctcccaaagtgctgggattacaggcatgaaccaccatgcctagccacacatagagttttgagacatgtatttaaggagagagtgaaaaaacattcagtgaggatatggtaaaatgcagatgatgaaggagaatagaaatatggtcaagtttttgtgcctaaatattacaggattataaattatgaactgagacccactcctctttttgaattaaatttatgattcatagataggttttactgaatttttttgcaaacagcaaaatgaccactagaagaaatgcctatatctaataaaatacaaataacaaaatgcttacataaattggtttatagtttactaagtattttcatatgcatgattttataattcatttttacacaattccaacaggtagagcaagacatgcaatcccggttttataggggaggaaatagaaaccaagagattaagaaattattcaacattatatagtacataataaaagggagagttggggtttgcatctagtctctgatctctttctccccatacaacatgcacatataggccaatatataaatatacataaatatataacaagtaaataattacatatgtaaacaaattaaaacaacaaaaatccaagcatcacataaaatatcattttaaaaacactaggatgtagtcttggttttcaaatattgatgttatattgttccttacttagccttgagtagtctttttctcatttagaatattttttacatattgaatggaaattttctaatcgatggttaatttgagagaatgttaaaaacaaatggatattaaaagctgtatgtttgcaagatgatttaaatgcattctatggcctattttttttttttaagtttaaatggtatgaagcctctaaaaatgttcggctctcctgtttcccaatgagctccaccagtgtccatacctttggtctccctcaggaaatactcaagttgggttttcataatttggaaagacagggagaattgctttacagaacaaggctagttttgagatgtcattctcccctgccaaaaaaaagaaaaaagaaaaaaaaaaaggacaaaacccatttaacttcatggttaaatttattcctcaaaaatatgagcacaaaagagcctctatttaaaaatacatgtttagactttaaattagacattaaatctagttcatcaccacagtgacataagtgatagtgaaggccaaactaacaaggtgctggctcaaacatcagaacaaaaaatggcttaggtgctttttttctgttttgcttagaagaatattaccaattggtattcagcatataatactaaaaaggaatatcatataacatatgaacaaaactcttctattctgtgcttttcatataatgattaatcaggttctatattttattttaaacattctatagcaatcctaggaaggattgatagaaaaaatgagacaactatgtcttgtctcaattttattgtctgttctcgggggtgctatttctgtctgcctcctacagatctggcaagtcttaaggaaaaacaaaaaactcacaaagatcaaacaacaaaatagataatgagtttagataaattgtgtattccctgttgtaccataaatcaagactgaatatgcaggtctggtgagatgtaagtaatggatagttcctgtgttattggttctgttcctaaaaaagcatcaatagctgtttctcttcctctttgcagaaaaatcactttatgtttttcctatttaaaactcacacgtgcttattataaagagttcaggtaatgcagaacaagttgttataaagaaggcaaaagcaaccacctcaaattctactcaacataaacattgctaacatgttgaatgaatgttattataaacatcttaatatgtatatatttatataaaatgaattgattaaatactgttacaagattacaatttatgcactatttttgaaaaaccattgaattttaattttgttttaacttattagaaagaaactaaagtaaaactgaacatttgttgaagttcaaataaatgttgttggtgttgttttaagcacaagaaataatattttatgaagagggtctcgaatgttgacaaaatagatcataaaatcatcaagttgttagattcactgtatgtttcaattttaggtcatgaaagatggagacgtttatactttcatatttttcccacttctgctttctaaaccaccaagtatttattatttatattataattattatattttcaagatttttaatgtttacacttaattatgaaactataattcccagaatatttaacatgacttgattagataaatcaattcaatgataaccctaatctttatgatttctacattaatgagtttttaaatttgagtcattaggattttatcttcaagttgtttaatcagtaagggcttctgagtgccttatgcctcaagttctttcaatttgggaatttctactcttttatttggatagcagtttggctggatatgatattttagggtcatatttctttcccttgggagatctctctggacgaatggaggaatttttcctttacttgtaggattcataagttcaattgaatacactttagtgttgagcatctgaattaagttttcctggaacacaaagtgtttttatttatttatttattctaaacaaacaaacaaacaaaaaacgggatacatgtgcagaatgtgcagctttgttacataggtatacgartgccatggtggtttgctgcacttattggcccatcttctatattccctcccttcaccccccatcccccaacaggccctggtgtgtgttgctcccctctctgtgtccrtgcgttctcattgttcaactcccacttacgagtgacagtatgtggtgtttggttttctgttcctgtgtcagttcactgaggacattggcttccatcttcatccatgtcccttcaaaggacatgatctcattcctttttgtggcatcatagtattccatagtgtatatgtaccacattttctgtatccagtctattactgatgggcatttgggttggttccatggctttgctattgtaaatagtgctgcaataaacatacaagtgcatgtgtctttatagtagaatgatttatattcttttgggtatataccaagaatgggatattgctgggtcaaatggtatttctggttctagatccttgaagaattgccatactgtcttccgtagtggtggaaataatttacattccgaccaacagtgtaaaagcattcctatttctccacagactcgccagcatctgttgttacctgactttttaataattgccattctgactggaatgagatggtatctctttgtggttttggtttgcatttctccgatgatcagtgatgttgagttttttcatatttcttggccacataaatgtcttcttttgagaagtgtctgttcatatcctttgctgactttttaatgggattgtttttttcttgtaaatttgtttaagttccttgtaagttctggatattagayctttgttggatgggtagattacaaaaattttctcccattcwgtaggttgtctctttgatctgatgatagtttcttttgctgtgcagaagttctttagtttaattagatcccatttgtcaattttggcatttgttgcaattgcttttggcgtttttgtcatgaagtctttgcccatgcctatgtcctgaatggtattgcctaggttttcttctagggtttctatggtttgcagttttacacttaagtctttaatccatctgagttaatttgtgtataaggtgtaaggaaggggttcagttttggttttcagcctatggctaagcagttttcccagcaccatttagttaataggagatcctttccccattgcttgtttttgtcaagtttgttaatggttgtagatgtgtggtgttatttctgaggtctttgttctgctccatgtctgtttttgcaccagtatcatgctgttttagttactgtagccttgtagtatagtttgaagtcaggtagtgtgatgcctccagctttgttctttttgcttaggattgtcttagctatacagagtcttctttgattccatatgaaatttaaaatagttgttgctaattctgtaaagaatgtcaatggtagtttgatggaaatagcgttgaatctataaattacgttggrcagtatgaccattttcatgatattgattctacctatccatgaaaatggaatgtttttccatttatttttgtactcttttatttccttgagcagtggttgatagttctccttaaagaggtccttcacatcccttgttagctgtattcctaggtattttattctctttgtagcaattgtgaatggaagttcattcatgatttggctctctgcttgtctattgttggtgtaaaggaatgcttgtgatttttgcacattgattttgtatcctgagactttgctgaagatgcttatcagtttaagaagtcttggggctgagatgatggggttttctaaatataaaattatgtcatctgcaaacagagataatttgacttcctctcttcctatttaaatactctttgtttctttctattgcctgattgccctggccaaaatatccaatactatgttgaacaggagtggtgagagagggcatccttgtcttgtaccagttttcaaagggaatgcttccagcttttgcccattcaatatggtactggctgtggcattgacataaatagctcttattattttgagatatttccatcaataccttgtttattgagagttttcaacatgaagggatgttgaattttatcaaaggccttttgtgcgtctattgagataatcatgtggtttttgactttgattctgtttatgtgatggattatgtttattgatttgcatgggttgaacctgccttgtatcccagggatgaagccgacttgattgtggtggataagttttttgatgtgctgctggatttggtttgccagtattttattgtgtattttcgcatcgatgttcataaggaatattggcctgaagttttctttttttgttgtgtctcttcccggttttggtatcaagatgatgctggcttcataaaatgagttagggaggagtccctctttttcaattatttggaatagtttcagaaggaatggtaacagttcctctttgtatttctggtagaattcagctgtgaatccatctgttcctgggcttctttttgttagtaggctattaattactgcctcaacttcagaacttgttattggtctattcagggattcaacttcttcctggtttagtcttgggaaggtgtatgtgtccaggaacttacccatttcttctagattttctagtttatttgcatagaggtgtttatattctctgatggtagtttgtatttctgtggggccattggtgacatcccctttgtcatttttttattgtgtctatttgattcttctctcttttcctctttattttctagctagtgatctatctattttgttattttttttttttcaaaaaaccacttcctggattcattgatttttttgagagtttttcctgtttctatctccatcaattcttttctgattttagttatttcttgtcttctgctagcttttggattagttttctcttgcctctctatctcttttaactgtgatgttaaggtgttgatttgagatctttctagctttctgatgtggggatttagtgctataaatttccttcttgacactgctttagctgtgtcccagagattctggtacgttgtctctttgttctcattggtttcaaagaacttgatttctgtcttaatttcattatttactcaggagtcattcaggaccaggttgttcgatttccattaattgtatggttttgagtgagtttgttaatcctgagttctaatttgactgcactgtggtctgagagactgtttgtttaatgacttcagttcttttgcatttgccgagaagtgttttacttccaattatgtggtcgattttagaataagtgccatgtggcactgagaagaatgtatgttttgttgatttcaggtagacagttcggtagacgtctactaggtccacttgatccagagctgatttcaagtcctgaatatccttgttaattttctgtcttgtttttctgtctaatactgacattggggtgttaaagtctcccactattattgtgtgggagtctaagtctctttgtaggtctctaagaacttgttttatgaatctgggtgctcctgtattgagtgcatatatatttagaatagttagctcttcttgttgaatttttccccttaccattacgtaatgccattctttgtcttttttgatctctgttggtctaaagtctattttgtcagagactasgattgcaacccctgctttttttttctttcaatttgcttggtaaattttcttctatccctttattttgagcctatgtgtgtctctgcacgtgagatgcgtctcctgaatatagcacactgatgggtcttgactctatccagcttgccaatctgtgtcttttaattggggcctttagcccatttacatttaaggttagtattgttatgtgtgaatttgataatttgatcctgtcatcatgctgctatttgatgatttygcacactagttgatgcagtttcttcatagtgtcattggtctttacaatttggtatgtttttgcagtggctggtacgagtttttcctttccatatttagtgcttctttcaggagctcttccagggcaggcctggtagtatcaaaatccctcagcatttgcttgtctgaaaaggattttatttctccttcacttaaaaagcttagttttgctggatatgaaattctgggttgaaaattcttttctttaagaatgttgaatattggcccccaatctcttctggcttgtagagtttctgctgagaggtccactgttagtctgatgggcttccctttgtaggtgacctggcctttctctctggctgcccttaacagtttgtcctccattttgaccttggagaatctgattattatgtgtcttggggttgatcttctcgtggagtatcttaatggtgttctctgtatttcctgatttgcatgttggcctgtcttttaggttggggaagttctcccggataatatcccgaagcatgttttccagcttgtttccattttccccatctccttctggtactccaatgagtcataggttaggtctttttatgaagtcctatatttcttggaggctttgttcattccttttcattcttttttctctagtcttgtctgcatgccttatttcagcaaggtggccttcaaactctgatatcttttcttctgcttggttgattcggctgttgatatttgtgtatgcttcatgaaattctcgtgctgtatttttcagcttcatcaagtcattaatattcctctctaaactgattattcttgttagcagttcctcaaccttttatgaagkttcttagcttctttgcattgggttagaacatgcttctttagcccagcatagtttttattacccatcttctgaagcctgcttctgtcaattcatccatctgatcctccatctagttctgcacccttgatggagcgatgttgcaatcatttggaggagaagaggcactctgaccttttggattttcagcatatttttattgattctttctcatcttcatgagtttgtccagttttggtattcaaggctgctgacccttggatggggtttttgtgagtgctttttttgttgtcattgatgctgttgttgttgcttcctgcttgtttttctttcaacagtcaggtccctcttctgtagggctgctgcastttgctgggtgttcacttcaggccctattcatctgattatttcccacacctggagatgacactccaggaggctagagaacagcaaagatgagtgcctactccttcttctgggacctctgacctcaaggagcaccaacctgatgctagtaggattattcctgtacaacccctattgaagggtctcacccatttggctggcatagggaacaggactcattttacaaagcactttgtcccttggtggagggtgtgtgccttgttgggagaaaacccactcatctgggctgcctggattcctcagagctaccaggaggaaaggcgaagcctgctggtccacagaggctgcagccacccctccccttaggggcttaggactagggagatccagcttctgtccctgagcctctagttggagtcattggagttcctccagggaagccccacccagtgaggaaggatgggtcagggtcaagcctgaagaggcattctggtggaagactgccacagccagtgtgttgggctgtggggaacaagtcttgtgaccaagccatccagcctctctggctccagcaggggaaaagcacagtctggagctatagagatggatgctgcccttccctcgcccagggagcttagtacgttaggcagttgcgagtcctagtgctggctgctgctcctctcccaaggagctcaaacagcttagacagtaggcagctgcggygctgatcgaccctgccctcgggagtttggtaggcttaagcagattccagttgagagactgttggctaagtttatgtttactccatagactctcaaaatgttcttaaaataatatatttttcattcttaccagtgatgtgtaagaactcctgttactcaatattcttggcagtattttgtattttcagtattttgcattttatccattttaatgtgtatctagtgatattttcttgtggctttattttccattttccttgtgactaatgatactgagcctctttcacatgtttattggttattgtaaagcaggttcgctgtgcaggttgtctgagtccagtaagaaaaatcatacttatacacaacaagttacattaaatgggtttattgcttacagataggcagcgaaaacaacagaatcctagaatttattgtaagccagttttccaaggctcaggaaatctgcctggaatagatggagcctctactgtacatgtcccagttgcatggcagctgaaagaccttgacaagcagcccattcttggttttatatcccagggcaatgtgagattcaaggctaaagcattgaaggactctctgtttccaggggagtctcttagttggcttggggtgggataacaaaatagcttagactgggtaatttataaactacagaaaattattgcttattgttgtgaagatggggaagtccaaaatcaaggcaccagcagtttcagtgtcttctgagggcttgctctccacttccargatggcaccttcttgctgtgttctcacaagtagaaggtacaattggaaggttccctcaagtctcttttgtaagggtactaattccattcatgagcatggaaccctcttgacctaatcacctcctcaaggccccacctcttaatacactgcagtggagatgagatttcaacatgagttttggagggacatgaacattcaaaccctattgggggtactggaacagaacctgggctattccagtcagtcccttcctatctcaagattttctgtttccagcacattatatagttattcttgagaactacaagcaaaaatgagaatggattggattggtccagggccacccagagaattgtcctaaggttttatgtgtgtatrtatatatatatatatatatatatatatatatatatatatatatacacacacacacacacacacacacacacaygtgtgtgtatatatgtatatatgtgtatatatgtatgtatatatatatatatgtacatgtgtataaataaatgtgtgtgtgtgtgtgtgtgtgtgtgtatgtatacagtcagccctctgctttcccagatgcagaacatggattctgcatccatggattcaaccaacttcagataaaaaatgtttgaaaaaattgcatctatattgaacatgcacagaatatttttattgtcatcattccttaacaatacagcataataaccatctacatagcacttacattgtattaggtattataagtaatctggagataatttaaagtagctaggagcatgtgcataagttatatgtaactactacaccattttatataagtgtcttgaacatcacagattttgctatcctcagtcccccatggataccaaggggcaactgtgtatttctttttaattatttgttagaatttttgttcattgttcattgaattacttgttttcttattactgagttgtaagaattctttatactttggatgtaagttctctgttggatgcctgtttacagacaatttctcccagtctgtggcttgactttcattttataaaagctgtatttattgaagtttgtttcatcatttttttggtttgttttgtgcttttcatatcctgcttaaaaaatctttgcctactcaagggaagactttctcttgttttccccctgaaaagttcacagttttagcttttacatttaggtggatccattttgaacacatttttgtgtgtagtgtaaggtaaatccaacgttctttgtttttcatatagatatcaagttgtgcaagaaccatttgatgaaagaaaactacctttttactattgaattactttggaatatttgttggaaaatcatttgtccatatattggttctttctggattttctattctgtttcattgctctatatgtttagccttactctaaaaccacatttaattattatagttttataggaagtcttaaatgtaggtctccaaaactttgtcattttttcccaaaattattttgatagtctaggtttattctattttcatacatatatttaaatcaacttgtcaatttcatttttaaaaaggacctgctgggatttgattgggattatactgaatttctagacaatttgagagaattgataccttaacaatattgagtcttctaatctatgaacatggtatgcctcttcacttatttactgttctttcatttctctaagcacttttttgtggttttcaatatagaagttttgcgcatgttttgttaataatatgttttttttaagttttagttatccttgtctgctaattctttaatctctgtcatttcaagatcttggagtattgactgattttttcttctagtttagattcacatttacatacttgttgatgtgtttaataattttttgactagacatagacaacaggacattatgcacattctgttaattagtactaggttgtttttatttctttaaagaaccttgttagcgtgagtctagaatagatgtttactccgtgtagtcaacagagacattccactctggctagtttgagctcaaatgtctgctagctctatacaggctctgggaattgtttaggtcacaatcttctagttgttcattgcccagtcttgtggattttaccctaaatatagttggcttattgcttagttactgactcagaggatccttatacaaatttttcctctgcartagtctaccttgaatatgtaagcttcttcagactcccttaactctggtyttcatctccttaacttattgagatcgtcattttctgtttcgaaattccctttcctgcattctggtycagagaatgcttctaggcagaaagctgggatgaacataatattcaaacaccttatttgtttccttccttttggggatcatagttctgtgctattttccaatgtccaaaccagctgtttcatatggtttgtcgaattttgagttttttacaggaagttagtgtcagttactccaacatggccaaaagtggaagtctgttaatgaatttttgttccttttgctagtttttgatcacatgtttacttgcttgatggatggagagtgtgtaatatagttcatttagctataagtacatggactttgtttcttggttaaatcttccatctctcttccttccttctccttctctaccccgagaaagacattagcaataaaacttttaaaacaggagtccagagaggctcagataagaaatgtaaccacagattatttttctccatctgcttttcaatttatatagaacagagggaccaagtataaaaatcattaaacttttaaaatttccattgatcagtttgaatttataagaataaatagctttatgttccacttaaaaatttaaaaaattactctaccatggtgtattgcagtcaactttgctatcttcttagaaaaacatgtctcagagtttagatggaatttacaaaggaaaattacccatcaatattaaagcataataataacactgttttttattgactacagtaatatatatatatatatatatatataataccattcgtttacatgtatgtatggagagacatttacacactgacaagatatgcagaaatgtaactttttatttctgtaacattcccaattatttccaactaatccctaatcccagtaaaagcagaaatacttgctactttaaggttacctggtttaaagcttagtctttttgaaaaaaagtattcaggataaatattcactttttctgtctgctcttttctctaggaaataatttggaagtgtgtaggataggctagaaaggttagagatgacaagtaggatgtttattagtataaagttattatagaacaggggcctaaaccaagttagtgggagtggaaaggagatgataaatatgagacaaagatgccatctcagaaaggttgatgaccacatccccaggtcacccagcctcagtcattctgtctccaacatacgcgccattgggcttggcctttctacatatctgttctaaaaactgacaaatggggttacacctcttctgtcactttatgttggacaatctcaataataggcaatttagtaaattattatagcagcaaagctttttaagatttcatctgtgtataatggtcacactattcactcttaacagcggggcaccagaggctttaggcaacctaagcaccatagtaaagctgtcgtgccaccttgtggtgtttcagatggttacagactgatgawtttcccctagcatttatctggttataaaattgattttctctttttcaaattaggcattttatctttttgaaaagtaaattttatttttaataattgacttaaaatgatcaatagctgtagcttttagtgcttttaaaaggacattgtatgcaaatataataacttctttcaagtcaagtttttgcttgatactaattctggattgtgtctctacaaaattgtcacaatatgtttaattttcaaatgctatagattttaggccattgctaggtatgtttatgtaatgcaatgctgattgctcttactttatggggcttcactttaaggtctttgtayaaaataatgcatttaaaactcaacaaagatatatattgattctaattaaaggaaattatgaaaaatgtaaagatctatatatattacctattttcctcattgtctcacttattagatatggaagaaatatttcaaatttagacataaaaaattatctttataactccaagaaattaataaggaacttttaatttacttaaaaagatgatattcaatgtgcctgagtgggttatgtatgttaaragagagagagagagagagagagggagagagaaatgacataaataaattttaaaaatrtgaagattaatgtatattcttcagctgagattatttgataattatagaaattactgtaacatcttgggatgttatgagtgccagatactttctagtcaccatgataatttcctgcaasgtccatggattaatgtaaaattttgtgacaygccagcacttacacttttcccttttwcaggaatcaataatataaaacttatatttaatgaaagacaacacctgaaaactatcttttcaagcaagttatgtcattcactttttcacttcactttttctgtcacttyttctgtctgctcatgtcattcttgtgatttctttttcctttcttgaatatttggcatgtgatttttggagtggcaggtgaaggcagagtgtattctatatagggtattttttttctcagtacatttttaaaatttcaacttttattttaggttcaagggatgcaygtttaggtttgttacaatggtatattgtgtgaaactgaggtttagagtatgaatgattccatcacccaggtagtgagccaggcacccaacaggtagttttttcattcttgtctccctctctccctctctctctagtagttcccagtgtctgtttttcccatctttatgtctatgtgtattcaatgattagatcccacttatatgtgagaacacgcggtttttggttttctgttcctgtgtaattcacttaggatgatggcctccagatgcacccatgctgctgcaaaggacatgatttctttctttttttgtgtggctacatagtattccatggtgtatatgtaccacattttctttatctagtccacctttgatggacaccttggttgattccatgtctttgctattgtgaatagtgctatgatgaacatacaaatgcatgtggtctttttggtagaactatttattttcctttgggtgtatagctagtaataggattactgggttgaatggtagttctgttytaagttctttgagaaatctacaaactgcttccacagttggctgaactaatttacatccccaccaacaatgtataagcattgtcttttctctgcaaccttgccaatatcagttgttgtttttttttgcattttaataatagcccttctgactggtgagatggtatctcactctggtttttatttgcatttttctgatgattattagtgatgtggagcattttttcatgttttttggccttatgtatgtcttcttttgagaaatgagtaaaatttttgaagcattgatcaaatcacattttttgttgtatttgtcttctcacttagctaagccaaaacagatcagccagcaggggtcaggcttttatagtgtatgggtttgaactttccatctctcacagtatcttttargaacctgcaggtttcttgattacaccattagcattgtacttttcaraaatgaatgcttaccagttaattttttaactagaaccaaaccaaattaatgtagaattgtgagactctgtagaagctttctgagacaaaattatttgtttaaattttgaccgggcatggtggctcacacctataatcccagcactttgagtggtggaggtgggagggttgcttgcgcctgggagttccagaccaacctgggcaacatagcaagaccccatmtctattaaaaaatataaaattaaaaataaaattaatgccaatctgctactaaaaaataaatatcwttctttaaaaatcttttatktggtatttcttctagtaatcactgatgagctcatcaacattttgcattaggttatctatgtgtatgaaaatgaataagtgtgagatctattttaggatgctgaaaagtaaaggaaacatgtaatgcatttgttctgaatatgactaactgtgtcttttaaattcaggacctggcctttcattatcaaaagtcccaagcaatataaaaacctttctttcatggatgctatgaataagtttaaatggactaaaaaggaaggtctctccttcaacaagctggtcctcagcctgccagtgaatgtgagatgttccaagacagacaatgctgagtggtcggtaagctctttttaacctctgacaacccagatgacacattttatctgaatctattacaggaaaacctaaggagaagacaaatatccataaatccaggggtccagttgccttctaatgtctgataatttttgttcaatgattacttggattgactgaaaactcctcattctaccccctttcaagagaaaaattagttctaaaactaaggttgggatagagcaggaacaggccggaatgagtgctgcaaaaagcaatagagcctgctttgtattcttttccaaaggagtgcctggccctcttttctgtttcctccttaaccstaggtttctgactcscccagtgtgtgactcctttggtaaccactcctgccccctttatsccctgcagaagtgtgggcagctgagcggyctggtcactgtgctgccttaaatcagatgttcatttgcattgtttrtgcttccattttcagattcaaggaatgacagcattacctccagatatagaaagaccctataaagcagaacctttggtgtgtggcacgtcttcttcctcttccctgcacagagatttctccatcaacttgcttgtttgccttctgctactcagctgcacgctgagcaccaagagcttgtgatcaaaattctgttggacttgacaatgttttctatgatctgaacctgtcatttgaagtacaggttaaagactgtgtccactttgggcatgaagagtgtggagacttttcttccccattttccctccctcctttttcctttccatgttacatgagagacatcaatcaggttctcttctctttcttagaaatatctgatgttatatatacatggtcaataaaataaaactggcctgacttaagataaccattttaaaaaattgggctgtcatgtgggaataaaagaattctttctttcctactacattctgttttatttaaatactcattgttgctatttcactttttgacttgacttttatatttctttaaaaaattccttccttttaaaaaatataaaagggactactgttcattccagttttcttcttctttgttgttcttctagtgtgacttttcaagtgtaacagccattcttcctgactttaatattgtccagttctggtcttttctgtgaattaccactgggccccttacctcaatgctttttgttgatgcccactctggttcccttgtttatctgagtctgttggtaccccaaatgaccccacacccatcttaaagtactttttttcaccttccctgtttagtactggccagatgagttttttctagagctctgtcactatctgaaaagaaagaggctatgggaaacatagaaatggtatgtattaataactgatcataggctgaggagaaaaaatgtagctggctgcaaacccagtgctgtgaggtgacttatatgaggttccagatcaaagacagrccgtgtgagccagtccaggagggtgtaagttctgaatggttccttgctgactttgggtgacacatgtaccacatactggctcagtttaagtcatsgttctattgtagatttatttttatattagttaataaatgactttaaattgtcaccaattgaaaatcttgtcactcttttggttttctttatatagctcagccaaatcttgttttatgtcctgtcctcatctcttaagctaaatctgtttggatcatattaataaactaaatgaaattacacttttgtgtggtattttatacattgtttaagaaaagtaagtgattcagtactagtattaacagtaaaagtcaattcagaatgttgcattttccattccattttgaagccctttttgccccataatgtcttcaacacaaaacgtattgccttttaaataaatatgtttcagagtatttccttcttgattcttagaacttgtacatttgatgaaatgtttttaatatttttgaggcatatttttgagtttactttctttttattttataagtgctatttcacattctatgattttccattcaaatatttatatgagaaatataattccaaatgctccctatttgaaattttatgttgatttttacttcagaatttctgaatttgaggtatcaaagtcaaatgatttcctcctgagattctgtaatattatatttgttcttaccaagaacaaatattctgtaatattatatttgttcttggtaaggaaggtgaacataccagctagacgagggtaaacagctttggaagcttaatttatggagccaggccagggaatctcttccattgatgttactaagaagaaagttgacattattcttctggaaattctcatgaatatatgtgatttcaaggaatagactctatttcaaattgggataggttatctgttgtaagttctatagaattctgattgtattctaagttatttggtcttatgttgagcacaccttcctgaacagccgggctttttattactcctttttcagagaggcttttaattgctttcctagattaaatagcatcacctgacacctaggctgtcaggcacaagtccccgagactttggggagaatggggtctccatgtatgatggtctctggttggatccttaggttcagagagtgtggagaagacatacctggtgaaaccaacattcatcagtgccatgtaaaattgagggtatcctgggtgatctttttttttttctgaagggggctcaggcagaatcaaaggagtcctagcagtgataagagtgatgtagtcaatagaggtagacatattaagagcttcagactttgtcctaatggctccagaggccaatgatgggtggcaaacaaaaggacatttggaagcagtatgtaaaggctattgctcagccaaactcattattgggtgtaaaagtcatttcaatttttaatataagtattggtgatttaacaactttgaaattaaaacttttttatatccctaagtattttcttacatctaggtcataataagtggaattacagaaataatcattgcgtatttcaagaattttgatgaaatattgtcagataactttaactttttctcaaatggtttggaaaaattatctatccatctatctatctatcatctatctatctatgtggtatctggctatgtatctacagagagagacatgtaaaatgataataatgggtgagtctggttggagaacataagatttctttgtactattgttgcaattttttaagtttgaaattatttcagaataaaaagctagaaatgcagaaaacatcatgaagaatccagctacagcacagtgatccaggtaggttttcttccctttgcagtattcctacattttgaggtggtaaagagagaaactagatggtgcttactcctcagatacccctgagagagggcagagatgactgcaagtttgtcagttctgactaaagataggatgtgcttccagtttggaaggaaaaaaaaaagaaaaaaggaaccacaaaacaaaaaacagagggcttgagggacccagggagtgaggaaaaatccaaaaaactaaaaaaaaaaaaaaaaaaaaaaaggaagaggtcttgcaggctggaaatcacttaaaaataatatatttattttgctctccccctgattataaacctaatgtgtaatgcccatttgctaaagaaaacttagaaaagtatgataattttttaaataataaaatctgttaatcctattgaccaaagaataaataaaacctgttaataaataaaatctgttaattctatttcccacttctaacttttacattgcatatgcttctagtatatgtctgcaaaggtgtatatctgtgtatattcatatatagatggagatacagatgttaggtaacactagcttctgaaacaaattccaaaatatcaatactttaacacaatgaagtttatttttcatcaattaattgctcaatgtgtgttcatctggtcattggctttccttcttgtggtgattccgggacccaggatcctgtggccttatcattcctagggctcagggtcatttgcattccgcctgctaatggagaaggacctgacctagaaggggcagaaatcacttccactttcaccacgttggttaaaataagtcacatggcctcattgaaatgcaagaggggctaagaatgtcatctatctttgggtacctggagaatgacaacactacagaaaggaagacatctctgctgcaatatatgtttttagtaaaattgactttcatctactcaaatgattccaagatttttgagttttaaaaacaatgatcaaaccaacatagggttgtcaacttatgtttggcaaaataggatactaaacagaatggttactatttatttaataaattaacaaattgtattgagcctatgttgagccatgctctgtactacagcgttgggcttacaattgtgatgaagcccatagctgagtacattaaacctcttatcaccaacatttcattttacaaattggaagcattcaaaataaatatcagttcttcaaattgaataaatttagctttacagaaagcttacatcatcatcatggaccatcctttctccatagattatgtggactatgaacatagtttatatcatattgaacatcttagccctacaagattttaattgacagttgtatctaaatccaacatagtcagactggtactttatgagtagaaaatggtcagttgaacaggctcatggcagcatccattactgcccaggccagagctgtgatccatggaaactatgaagagtcatggaacattgttacaacttaaaacaggcttattgcataacgtctctgtcttaaatataataatgtgcatttgaaagtccaagaagagttatatagtatgaaacatttctcaaactcatttcaccaaacccctgttgtggtggagcaatgttcccaaaggaacaaactctggggcacacaactttctgagcagagcatgtccaggtttctttaacaggttcttggaaacttccaaactgttcatgggcaactgtaaaacagtccaacagacataagcctttcacttgggttcatggtctattccttatttgccgtgttattttgccaataaacaaacacaccctcattttttttttttttttttgagagagagagaaatcctcccaccacagccgcctgagtagctgggaccacaggtgcgcaccaccatgtttggctatttttatttttttctgtttttggtaaagacagggtctcaccatgttgcccaggcttgtctcaaactcctgagctcaagcaatctatcctctttggcctcccaaagtgctgggattataggcttgagccattgtgcccggccctctgttttttattaatctagagtggtacaacttacagaaaaaatgaaaaacaatttaccattttctcagggaatatgctaaaatgaattatttgacatcaataaggtatttcagaaatgttgacaaagctgcatatctttggaacatttcagacctatagatagagactacctttatttcctaagtaattttattccttaagagaatgctaaatttcaaaatcctgccttatttcccaacaatgaaagcagaaaaattaaaaaacaaaattcatcagatgagttataagtgactctctttgaccagtcacagcttttgccctttctaaaggttttccatcacaaagagcaaaatatttccagtgacttttttggtcatcatgatgttgctaaattgctttaccataaggaaaaccttacgttaaaaaggcaacttttaatgaaagttgttttatagagttcccttcattgtcctttgattaacaatagcatgaggactctgtggcctcaatctaaggtttatttaataaagacatttcttttccaacttctttaatatttgttgtggaattgatataatgtgaaaaaaggaatttggggggaataatatacaaatgtagaatgaaagcctgaattacccaagtttccctcttattttttactaatccattaaatattactaatcaaaataatgccatacatttttataatgttttggaatttgcaaagtgttttcacaatattctcattaatgcttaaaactgcttttacaagtgaatagttatattcagaaaaggtaagtagacagcatgttgtactgtggtaattatgggagacctaatttccaattgctttactttaaactatgtggacataaactatatccaaaatgacttagtaaatttctcttttcccatcagtaaagtagtgataataatttctaatcttaagaagttgcttgtggattaaatatggtaataaagatacagcatctgacacattgagctcactcaatatcagttttcttctttcctttgcaagaccccatgtttaggatgcacaattcctggcaacagaggcaggtttcctattttattttctataccattttccggatataatcaattgaaatttggttttaactgaatcagtttttcaaagtgaatgacacttaatcaaatgaatattaggtctgagtgaatttggcaatcattctcaaaaagaaaaaaaaatcaatgactagctacttgtcatttctcatgtttgtcaaaaggaaagacattattctttgctctttttcctcctggaaataatctgctgtcatgaaactaataaagttaaaatgaaccaatctacctttctcgtgttttttatgatttgcaaaaatggagttctagttttttatgaggaaagctttacaattttggcctatttttccttgcttcatgagacttttccttccacatttggttcatgtgtcttcacctcactttgactatttcataagttgtcttctcttcttagaatatatttaaaagacagactttttgaaataaatctatcaaataaaactatattactattaactgaaaataaggaataatatgggaaataaagggaagagggggattttgtgtattaaacaaaggatgtgtttctcccctaaagccattagatggcttactgcatatctggtataaatcctgccaatgttggcttggaggtattagacttctcaaagaacctgccctggcccttcccagcctacatacttatttccctattgcctttattttcttgctaattctaaattcaaattaccttaagcttcttaaagatttttaaatcctccatttttaaggttaacacagatttcctaatgtctgctctttgcttaagtgacatgtggttgtacagatgggttctgcaggaagtccatatgcagcctttaaataattttaaaataattcttattgagggttaagctctaagatcaaccttaagtctcctaaccttttactgtaatgattctgagtctcttttgaaattttccaaattgttagtttgttgtagcttgcattttatacttcaccttctgttttgagattactgtatttaaatctttaacttcttgttcttttatcttcaattttttgtttttaaatttaatttccatccttaattctaatctaatcagtttaagcattttttgctaatcttttaattgtttagcccattagttattttaagaagatatacttctttattttaataacagcttgaggaagtgcctaagccaattgtgagcagtggtgagaatgcactttgtagacagaaaaa

SEQ ID NO: 95027 - DNA, 23521 bp, Homo sapiens
agcctgtgaaaggagccaagtgggaagctgtaccatgcagagccacaagggtggagctgcccaagaccatgggaacccacctcttgcatcagcatgacccagatgcaagacatggagtcaaaggagataattttggagctttaagtttgactgccctgctggattttggacttgcatggggcctataacccctttgttttggccaatttctcccatttggaatggcggtatttacccaatgcctgtaaccccattgtatctaggaagtaacttgcttttgactttacaggctcataggcagaagggacttgccttgttttggatgagaatttaaactggggacttctgagttaatgctgaaattagttaagactttggggaactgttaggaaggcatgattggtttgaaatgtgaggacatgagatttgggaggggccaggggcagaatgatatgggttggctgtatccccacccaaatctcatcttgaattgtaactcccacaattccacacgtgatggaaggaacccaatgggaggtgactgaatcatggaagcaggtctttcctgcactgttctcatgatactgaatgagtctcacgagatctgatggttttaaaaatgagagtttcctgcacaagctctctttttgcctgccaccatcaacataagatgtgacttgctcctccttgccttctgccatgattgtgaggcctccccagccatgtggaactataagtccattaaacctctttcctgtataaatcacccagtttcaggtatatctttaccagcatcatgaaaacgaactattacgatgataaagaaaagcagtggagagattatcagccccactcactgaaggttgacaggactgccttaatgatatgtacaggttactgtgcccaagctttctttatttctgaaaagacaatcaaatctaacaagaaagtttatagagttgaaaaaaaacacaatctcaccatcctaacattaattttagttttatatgtctcctcccattggtacagggatttttacctagctctaattacagtcatgcatcacttaacgatggggatatgttctgagaaatgtgtcattaggcaattttgtcattgtgtgaacattatggagtgcacttacacaaacctagatggtatagtctactacatacctaggctacatggtatagcttattgctcctacacctcaaacctgcacagcacattactatactgaatactgtaggcaattataacaccatggtaaatatggctcaagcctgtaatcccagccctttgggaggctaaggtgggaggactacttaagcccaggaatttcagaccagcctgggcaacacaggttaggaagaccccgtctctaccaaaaataaaacaattgcccaggtatggtggcatgtgcctgtagtcccagctactcaggaggctgaagtgagaggactgcttgagcccaggagcttgaggctgcagtgagctatgatcacaccactgcactccagcctgggtgacagagcaaggccctgtcttaaaaaaaaaaaatgaaaaaaaaaaggataaaaaatggtacacctatatagggcatttaccatgaatatagcttgcaggactggaagttgccatgggtgagacagtgagtgagtggtgaatgaatgtactgtagactttataaacactgtacacttaggctacactaaattcatgtgtaaaaatttctttcttcaataacaaattaaccttaccttactataacttttttactttataaactttaaaattgttttaatgttttgactcttctgtaataacacttagcttaaaacacaaacacattgtatagctatacaaaatactgtattttcttttttatattcttattctataagcttttttataattctaaaaggttattgtcttttgaaactttttaaacttaaaaacaaagacataaatgcacacattagcctagggcttcacagggtcaggatcctcaagacatcactatgcgaaaggaatttttcagctccattatcatcttatgagaccaccgtagtatatgtggtccaatgttgtatcacatgactgtataactagagacatcttgctcttttactcccagctgtggacaaacaagaaactttgctgttgtggctgcaggaaggcgacccaatgtttctctaatactttgtacaacgtagtcctcatgcccactatgtgtaacaggtcacaaatattcattaataaaatatagtcaaacctttaggagttcacaatctagtgagagagacaggcatcatggtgcactgttgtttttccaaatgcccattgctaatctgttcattttattcttctgtcaaagcagtaaagacagaagagaagatgtgagtcatcccagagtcacagccctctggaaatgcctgaaatccattctttcctgtccctcagattactgtaaggacttcaaggttctctccgacccttatagctgtatgaaaacactttttctgataggagagcctccaccctctctctaaggaaagtaaatcctttcttagtcaagctctcccttttccacactccggtctttccctggaatgtctcctctgtccttcctcccctcctcctttcccattatacatctcactaaccctcaggaaaatagctttaaaattttccctctggaatggggcccagtccacagagcacctacctttggtataagtcagatgttaaactcaattacctacgaaggccaggcagaacagcgttcttctgactttgtttgcatattaagttcatggaacattctctactttcacaaagaaacatgatcatttttttcttgaaatatacagcccttagttaagctttcatttgcacagttttgacagataagaatgcaagaactatttctttttcctcccaattctactctaatgttagtaactggcagaggaccttctgagtaacagagaacattgccctctaaaaggctactcagcagccactgtttgccagatggaacatgggcctggtgttgctgtgttgctagatcttctgacctttcaggagacaaaaatccagatacttttatgaaaaatcatgttttcaaaatgctgatgtggacgaaagaaagagagatcagactgttactgttgtctatgcagaaagaagaagacataagaaactccattttgttctgaactaagaaaaattcttctgcctttagatgatgttaatctgtaaccctagccccaaccctgtgctggcagaaacatgtgttgtgttgactcaaggtttaatggatttagggctacgcagggtgtgctttgttaaaaatgtgtttgcaggcagtatgcttggtaaaagtcaccgccattttccagtctcaagtacccagggacacaatgcactgcggaaggccgcagggacctctgcccaagaaagcctgggtattgtccaaggtttctccccactgagacagcctgagatatggcctcgtgggaaggtaaagacctgaccgtctcccagcctgacaccagtaaagggtctgtgctgaggaggattagtgaaagaggaaggcctctttgcagttgagataagaggacggcatctgtctcctgctcatccctgggaatggaatgtctcggtgtaaaacccgacgtacattctatttactaagatggaaaaaaccgccttatggctggaggtgagacatgctggaggcaatactgctctttactgcactgagatgtttgtgtaaagtcaaacataaatctggcctatgtgcacatcgaggcatagaacctttccttaaacttatttacgacacagagacctttgctcacatgttttcctgctgaccctctccccaccattatcctatagtcctgccacatccccctcaccgagatagtagagatagtgatcagtaaatactgagggaactcagagaccagtgccgggtcctccgtatgctaagcgccgtcccccgggcccactgttctttctctatacttcatctctgtgtcttatttctttcctcagtctctcatcccacctgacgagaaacacccacaggcgtggaggggctggcccccttcagtggacagctaattcaagacaatttaaaatgctccaaagtctaaagcaaacaagttcacagagtgcagaagcattgccagtgtacagcttctggcaccgtaaattctaatgagtattttattatatttgcttaatttacaacagacaataatataattatgcctttgacagacatcaataatctgtttctgtattcattctccatatttatagagtattgtgttttctagctgatttccacaacatattgttaacagtgccttaggccaaactactcttctttcccaattattctctttcttccctacaaagggagttaaaacaaggagctgttaaaacttggagccaaattagagattaaattacattagctttaaacggttttgtgaagtggctagaaatttttaccagtaatcttactgcaagtcctgggtcactgaagaactcggtaaatatgattagcatgcacgcaccaacacatcactgtgatgaaaacgcaaatcacagtatgtgagtcactactctcaatattgccatgcccctgccttaaacctgccagccccatccagaggatttttctcatctctgaactccaatcatttacaccttcccccatcagaatttaccctacattttattataattgcatataaatatgccttccctgtaacagcagggactgtgtttctccactgtatggcctggcacagtgtccagcacacagcaggcaaagcaagagttactgcatgagccagtgtcatcatccaaacgatagctaccatttccagagcacctaccgtgagctgactagtttacctacattatcctggtggctttcccagaccagaccacccaaaccaaagcagccccccagtcaccctctaggcacataaccctattttagttctctgaatacgactgattgctgtctaacatattttggtttgtgtgcttattgtctgtcaccggtttcccttcacaagaaggaaagctccaagaggacaggcatcttatctaccttgtacttggctcatagcaaataaatgaatctaagccgcccacctccctgggtgacagagttgacctgcacacagtaggtctcaaagagtatgttttaaattttatatttagatttcaagataattgtgttgaatattttatggttcataacaaacagaaaggggagggcagaataaaaataaataaaagtttagttacattaccctagcactgacattggtacgggaatttttgctgcaataagaaagccacttcctctgacataaggtcacccatacttctgggtcttgccacatcctcttagacagttcatcgtagctgggctggctggggcggtcaggactccagacgctcacactaaaagaggggtggtagtcgagcagtcactccactcctctgtagggagctggccgcgagtgggtgcgcagcagggtgcgcgcggacccgtgcagcgcccagggcggctgtgcgaagccgccgcagcctgcgcgcccaggcgattctccaccttggggctcgccttcctgccgcgttcctcttccttccatccctaaagcgcgtacgccctgcagagtcaaacctggcgcatcctcaagcttccagggggcaacgtgaccgagccccgcatcacgtgtgcagagacggcctatagtgtctgaaggatgccacctagtcgcaggcccggcggcgccaccaacagcgaccgcggtagtccagctcgcgccgcgtcccggccccagcccggcccggcccagccccgccccgcgcccagccccgccccgccccgcgcccagcccagcccccgcggcccggcccccagcggccggcctcccgcggccccgcccccgccgccccagtccccgcccctcgcgccttcgtttattcctccgcgcgctgggacaggctgcttcttcgccagaaccaaccggttgcttgctgtcccagcggcgccccctcatcaccgtcgccatgcccggaggtctgcttctcggggacgtggctcccaactttgaggccaataccaccgtcggccgcatccgtttccacgactttctgggagactcgtaagtggccaccgcgtagccctgtcctggcctcggttgcgccggactcggaggtgccttccctgtttcttctccctgccgtcctcccggccgctcagccccctgcgccgccctcgccttcccccgcactggttccggcgcgcgccaggccgtgtggcctctgctcagcgtcggctgcgctgctgggagctggcacccgttcggcctgccctgcgcgggccactcgatccctcctggcctccccgcctccggcgtggctgggcaaggccacgccaaggtggggggtggggaggataaaattgtgttctgcgggttctggaaactcaccgcccgcgggagggtttgttgtccatttaactcgtcttagtaaactgtgcaggtagcgtggtcaggccgagggcgcaggggcggggcggcattgacgatcacttccccggactagtgcccagggtcgcaccgccctcccaccctccgttctggaatttgctccctggggaggatgggtgtctaaagccaaagtcggaggacacagctgctggctataggttacaggaaggccaacgtatcatctgagggtgcagtggtatttgcaggcttctgggcacaaaatgtgaaatttaaaaccactagctgccaagtaggtggccgaaagactttttgtccagagccgcctccaatggccaagatatgatttgataacagctttaggaagagccaagaacactctgcgtaggtgtgccttcagagattccagaacttgcaacacttggagggaaggactttctgacgctgttccgctggagtggcctattcttgctagtgatggccgttccaggctccaggacacgtgtactccccaactttgagactctcttgttttccagtggcttgcccctcactgtcccctccgctttctaccttgcttctagcacatgagcttgctgatgatagccaaattgatgacctgtgatctgacttggcagttttaccattatggataggagtagtaaatcggtgttgcccttttttttttttaacagctcctgaatcagcaaactggaagttgcttagttttcatcagaagcattccaggcatgtctagttatattatggttctggagtactagtggtcccactacactgtggggctccaaggcttgacaacagttcttccccagattatatcctttttatatacagtatccagggagacaggcttatgaaattaatcagtgattggacagggctgtgcagagaaccagggacagattcttacacatcatatgcctatccaaccctttataacctcttaagtcccttttccagccactgaatagggaaaagttaagctttgtgaaagataggactaggccagaaaaaggttgagaaatggaatattcaaaccttgaatgcagaaaaatactttagaaatacagcttatggccattcttatacttaggatctaggtagtaatatttctccagcaatccttgggatttttagagttgtgttccttcccatttctacctgcagccctcatcccccatccccatgaaacataaactatttccagaactcttagcttgtatagattaaatattagcataaaacgtatttactgtgccaacarttataaatgctgtcactttttaagctaaccatacttttttggggttttgttaatgtttattggcctctagatccatctagatttgatcaaaagtggtactttatcagggagccatagttaggaacacggtagaaatatctgcatttattaactaatatacaagtctgcctaggatcaggtatagtattccctaccttaccgggaagagaagtttgagccttttatatgtttatracacrtggatttttgcctgatttttccaattttctattctgtatatgatcccaaatcagactgtcaatttttgatccaggtatttttgagaagaaaaaattaaaatgtatttctctaccttacccctgatcattgtaaacaactaaagaggttgggtgctacattgggtgagtttaccttatcgctgtttctttaagtggtagaagcagcttcttcatagtacatcttcactaagcaaaatatgtgttttccaggggtcttctggggcttagtaagtgggaaccattctcttgaaggaggaaaccttttgtcttttgaaaatgggtaagaaaatgggagcatgtcactgaattactcttaagtgcagcagtaggaagacttggaggggaaggaaggccaaggtaagacattcttggagtttatcctatttgtagccatgaggtaaactggagtttcacttctgagggagggaaggacgtgaactggcttaaaaccagttccttttgcatgattcagcaaaacagtctttatggactcacartggaaaaagaactcctaacttttctaatttatcctccttttaacgatagaggaggaaacgccctgttccatttcttctcaacttctggagaccttctgttaagtctcatctaaccattaaatagatcgttttccatagaatctaaggcctagattttactcatagtgatattatctacttcaaaagatatactctatgttcttccttttgcccttcatagtaaagtgaacatagtgcacacctccacaatcttaaaaaaaaatactaactttcctcccagtcttgccatagggccctccatcctttttgtaagaagatctttttccttcttgaaaccttgggagttgagtggcagccgtaagtaggaaggaggtgcccttgtctttgcttgttctctgtgctcagggaaacttcagaaaggtcaacttggcatctaggctagatttagttatctactagtttaggatcctgcctaaatcatctggtttaggatggtttaagttgatggggatgtggagaactgagtgttaaattttccttttcagttgaaagagtagtttctgttgccaagaagaaggaaatggtacttcagctttcttcgtgacagcttgaaatgtgctcaaaattataaaatcttagacaatgatgacttagatattagtatttacctaagaatttgctgttgtagaaatctacattgcaggctatcaaaattctacctgcttggtctgaagaaagaagaaaaagaaactgcaaatgaagagataggtaaaactgtgaaggtgctattgttttgtcagagtataaatattgggtgtcatgtttggcaggtaagatcagtaaagtggttttacaaaagattttatatccacttgcttcagagaagccaagtgtcaactttaatttttacatataaatagaagatagaaacctatttatttcagattacataatttgtttattattgcagtcaggcatttgtttggattcagggcatactgggacatccattattggagctgaatgtcagggtctatgctagaaaaaaatgtagaaaaggataagaagaaataattaagtgttttcagtgaactacttggcttgaatagcacagattgtattagccaaaaaggagtcagggtggcaccataattattaaaggaggcaacaccttaacattagtctttttaaatatgtgtcatcttgaatttcatgtctttgattgaattgggctataagcataggcttctctggaggtaagtagattgaaaagcactcctcaacagaaaagcttaaaagtaaatatcatcataagcattcatttaaaaaagaaagcctgtttttgatccagaagttgtgacttttcattctctgtgatgttggtgataactcttaattcaattgtgaccttgtttttcttcctttcagatggggcattctcttctcccaccctcgggactttaccccagtgtgcaccacagagcttggcagagctgcaaagctggcaccagaatttgccaagaggaatgttaagttgattgccctttcaatagacagtgttgaggaccatcttgcctggagcaaggttagtatcaattggcatgtgctttgagcctgagattataggtcaagttataaattatggagtacttggttttgaggttaaggtacaagtaagccttaggttcaaagttcactaattatttgaaaatttcagttgaaccacacagtgatcacattgctaaatccattggtcagtcaattctcagccctcctcttggcctgccagcagcattcaacccagctgatcactgtacctcctgaaactttttcctttcttgacttccaggacaccacattctagctgttcctgctcactgattcttcatctcccaactcctaatttatgctgaagttaccctgaacttatttcttggacctcatctcttttctgtctgcactctttcccttggtgagctcatccactcacctttaaataccatctatgtgctgtgattctcaaattttcatctctatgccagactcttccaggttcatataaccactgcctacctagcatctctcctgggatgtccagtcatctcaaacctagcatgtctaactaggcctcattcttagatccagagttttactcatctaagctaatggcaactacatttttatagttgttcacaccccaaatccaggagccattctgaattcttcatgttttttcacatcatacatctgatttatcctcaaacttgtcagctctaccttcaaaatatgtcctgtatcatagatagaagactcacttcccagggatctgtgtgacttaccctcacctcttttgggtctcaactcacaggacatttcatcaaagcctttcttgtcctcattatctaaaattataactccttttcacgttcaccatccccttctcctcagcactctgcatactacctatttagtttgtttgtttcttcctagtagagtataaactcagcaggaacagagactcctgtttagtgcactgctggaacaatgctcactactcagtatatcctaggcgatcagtcaatatttgttgaatgaattaactgaaggaaatacctacttctagcaaaagaatttacttgaacagtaaatttggtggtctgaatttaccttgaaaacattttaagaacttgactgcactgtgctgttaagtaataatgataactactttttgagggatgtatactagaaactatgtcaaacgtgcagttgaataaaagatgtattgacttgtgagttaggggtctgtggctgcatcctatagcagttaatgccagttaatcctaaatatctgagactagaagaatcatgtgtaggagaaaaaagaagggcagttatctgtcttgaagtagaattttttttcattccttacacttctcagtgagtggtaactgtagtttttgctatcatttttcattttcgtttttgcagttgaacatacttttttcactcagagagttggagggacttgcccaagactgcccaatggcaatgagatttcaacctcaaatcaatgttctttttaatgcaagatgataaagagtaggatttagcctaatttaggatagaataaagccaaataatttaggataggttctttggtgttcatgggtgtaatctaatgcccatgatgcaagtggcagagtagagaattagtgcacagcaataattaaagtgacatattgccaaaggaagcggttatagcccattatataataccttttaaaggacagacgcatactcaggtttattttacctgctgagcttctgccttagaagttttcagaattgtgattacattgaataggaaaaaagtctgaactatcagaagcagtgccgcaactttgacaaacaactgattatataataatctgcctctagcatgagactatattaattattatttagctctggtgacttcataagcagccagtgacaacagaaagttaagataataaaatgaaggaatgttacaatttgttatcatccgggagcctgaggcaggagaatggcttgaacccgagaggtggaggctgcagtgagctgagatcgcgccactgcactccagcctgggcaacagagactccacctcaaaaaaataaataaataaaaagaatttgttgttatccacttcagagctcattaatgccacatttgtcacatctccgttgagaaatccacaatggttttgtatctgctatgccatcaagcccctgttttactttcaagcctacacacaatagacgttattccaattttaaatcctcttttccattacttgctaaactctatccaactaagttcctcactctcctatcaatagtttatgtacagagttgcccacatgtttcattaatatcgttcctggccgggcacagtggctctcgcctgtaatcccaacactctgggaggctgaggcaggtggatcacaaggttaggagttcaaggccagcctggccaagatggcgaaaccccgtttctactaaaaatacaaaaaaaaattagccggtgtggtggcgggtgcctgtaatcccagctattcaggaggctgaggcagagaattgcttgaacctgggaggcggaggttgcagtgagccaaggttgcggtgagccaagttcgcaccagtgcactccagcctgggcgacagcaagactctgtctcaaaaaaaaaaaaaaaaaaaaattatatatatatatatatatatatatatatatatatatatacacacacacacacatacatatatatacatatgcacacgtatataatatatatacacatatatatatgtgtgtgtgcatatatatatatagttcctgattcctagaatgcctttcttttctctgtgaaaaatcttacccatccttcaagggcctagatagaagtcctgttcttttcttgaagccttttgtaacttttggagtcctacaaatgggagtgttcgtatacttcagtatttaccatccaccatttaacattagtcttgcatttgctgctgcttcatactggaatcatctctaaccaaatgagaagttcctttgaagggaggagccgtgtcttactcatctgtattccacatgtatttaccataatgcttagcccaccttaagtgctatatcaatgcttaatcaaataacaaaactagattttttttttctccaaaagcttccagggataggaaaagtagaaataaatggatgaataaagttttactagggaaggagggaagtgtatcatttttctttagttcagacttgaaatgctttgttttctctttgaatttcaccctagtttaggtttacttctgcctcttcacccatttatttttgacttgtccttcaagtatatattcaactctccattcttgtgtttgctttgttttgtgatttgttttttttttttttggtcatttcttatttgtcttgtaacttagcatctgagtcagggtgctttatgaggtagggaccagatctataagattttctttacatatggcattatttctagatgtgatggatttaacaaacctattgttatctgatratttttacagtatttgggtacccagaggtaccttgtatttggatctaactaaattattgcaattttaaaggggttgctgctattttctcatagcagtaaaagcatgctgaatttaagagaactgggcatgaaaacagctttggtccatgattacaacctaagtactgtactctgctgttattcctggcaataattggaatgaagagtgttcatctactcactttttaaaattaaaattgcttaaagaaaattactgtgatttggtcctctttcctgtcttgcaaggtgatggctgttaactgatgaaattcagagcatgtgttgggtttagattcctctttccccttttacttgtgtttcaggatatcaatgcttacaattgtgaagagcccacagaaaagttaccttttcccatcatcgatgataggaatcgggagcttgccatcctgttgggcatgctggatccagcagagaaggatgaaaagggcatgcctgtgacagctcgtgtggtaggtcatacaaattcattttgtagttagcttaactgatcaggctgtatgtccgtgtaaatgctggtaccagctagaggagataggggaatatctacgattatgaaataactgtgtattggcgacaatatcactgattatctgtaatgctgatgcaattttcagctaaattttccaactgctttattcatagttcatggaaatctacaaaaaaaaagttgtttatcctaaaatgtcttccagaattgagaaaccttttcatagctctcctgactgctctcctgaccgccctgtctttaaagtgatgggccatatccttcttcataaggcagctctgttttaaatttttatttgttctgtcctccgcccactagaaaacaaacccaatccctcatctgaataaatgcacaactattcaaggaacaatatcaactcccattagtattatttttatgatagtcatccccaattgacacagcctttccctcgattaaatttgcatatcagtttttcttactgggaaagccagaaccaaatagaattcccttctacgtttagaaaataacagggagaagaaaattatctgtattccagccatccacattagcagttggtgtatccttctagatgctttgyttttgtcttgtttttatacccttgaacattattaatgactgcagagctttctaagtggctttaataacactcaaagaactcttcctatttrtgcccctctgtgctttacaggtgtttgtttttggtcctgataagaagctgaagctgtctatcctctacccagctaccactggcaggaactttgatgagattctcagggtagtcatctctctccagctgacagcagaaaaaagggttgccaccccagttgattggaaggtaaagatgtttttaaaaagcagtttctctacttgcctgaagggccagtctctaaatggccaacttcaaggtctgtgttacctgtttctagcacgcaagtacactgggaggatttttcctcatggctgagttcaagatttgctgaaaggcccttttcaaggtctttataacaccttttatacacaacacaaactccctatatggctttccaacttttagataatttggaaaaattattggtcagaatgattccttttcctaatagaaggtttaaaaaaaaaaattttatctaacccttccctgatggcaaaatatttatcgcacaatcttaattggccatttccgttaagtcatggctgtaaaagtactggtgtattaatgtcattaagtatttaatttctcttaagcttcattcttttaaacctgtgctagaattctccaaaatttgttcataaacttttcatctttaggacatggataacatcacaagagtatcttaacattgctacatttttaaaataatgctaacctgaatagcaggttttgttttgtttttttctgacagacaaatcacttaaattctgtatccactagttaacttattattacttatttatgtacttattgagcccagatagtagtgaactggggagatagcagtgaataatagaaagtccttgccctcatagaacttccattccagtgagtggagacaaacagtaaacaagtttattaagtggtgataacaggtgctacagggaagaatcaagcacagatggggagaataacagcacaggggtgggagagtgactgtcaaggaatgcctgtctatgaagggacctttggagaaaaacacagagaagatgtgaccaaggcatgtatacttgtgagggacgagcactatrggcagaaggagcagttagtgcaagaaactgggcctacaagtgagcttggcatgttggaggaatacaaggaaagctagcatgcttggagmagaagctgcagaaggtggggtgagggacaagagatgagaggaggcaggattccatcacacagggcttgcaggccatgatactcagaattaaatgtaaagtgtggtggccagctgttactgggtttaaaacaggactgtttcttgttaagatgggggaactgctttcctgccaaaagtgccaaagatcaacttggaaaacaaaatcctcacagaggggagagtaaagaacacttgattagtctcrttagcacctgtagctacttttctaaagttaattcctgaaggccttgaagcttcactatgagattgaatttcaccattctcaatgtctttcaataggatggggatagtgtgatggtccttccaaccatccctgaagaagaagccaaaaaacttttcmcgaaaggagtcttcaccaaagagctcccatctggcaagaaatacctccgctacacaccccarccttaastctcttggagaagytggtgctgtgagccagaggatgtcagctgccaattgtgttttcctgcagcaattmcataaacacatcctggtgtcatcacagccaaggtttttaggttgctataccaatggcttattaaatgaaaatggcactaaaagtttcttgagattctttatactctctgccttcagcaatcaattccattcatacatcagcactctgctggttctgtttgaaatatgttctgtatttaaaactcaaatcttgttggatctctgcagggcttgtgaccaatgaagtcatatttgttgatggttgacaaagcttgcttcactccatcagagaatgactatcaatttttttttaactgtcctatcacgtcctstcctgtcacccattttgaagagtggcagaacttgaagttcaacttcctctgtaaatatccaagtataaagcccaggaacttctagaataacccagatgcgctttaattttttttaatatgttttgatcacagaacttctagaataacccagatgctctttcatattcttttaatacatcttgatcacagctgggggaaaaaaagctttttaattctrtaccttcctagtagataagtgaagagcagggaaagagacctttaaatattttgctataaaaaaatttgtgataagtttctatcaaaatgggragattgcagaaaaggcttcccttggctcccaaggagrtgtagcaggtgtgagcaatattagtgccatgtgcctttcacacagggtttgcatttatcagtctgttttccgatgatgtgtacatgaaagagtacmccatgtgaaragaagagagaatgattgaaaatgttttagtatagaactcttcwtgcagtgggttgctattttytagattttactttttagggaacaaaataaaatcctttgttaaaactgggtcagagaattctgttgtcatattttgaagtatcagatttatgtcctaaagggcagaggcttccttcttcctaggattggcatgagtaatttcttccaaagacagatacataagattttatataatgaaaatggaggaacagctgaagaacgtgtgatgtcaccacatatcttggtccactttgctccttcatgttacttgtttggatcctacagtcccatgatgttatgatccctggtataaagagctctcttaacctaattccttaatgggattgctgggtgtaggaatgtgaacctcaaagataatggtacatctgtgctttttgctgctctgaactaatactctctcagactttgattatactctactaataagtgccaggtttagaaaagggtgtcccatttacgatgtcttagtctgcttgggctgctatagcaaaaatactacagactgggtggcttaaacaacaaacatttctcacatttctggagactggaagtccaagatcaaagcactggtaaatcctgtctggcgaggacctgcttcctgggttgtagtttgctgccttcttgttgtatcctcacatgaccaagagagggatcatcgctcaacgtctcataaggtcactaatcccattcacgaaggctccaccctcatgacctaataattacctcccaaaggcccttcatccaaatactatcacactggggattaggctttaacataagaatgttgaggagacacattcagtccatagcacctggtataagtcctttgtatgaaaccttttttttttttttttttttttttttgagacagtctcaccctgtccaggctggagtgcagtgacacaatctcggctcactgcaacctctgcctcctgggttcacgcaattctcctgcctcagcctcccgagcagctgggaccacaggcacgtaccaccacacccagctaattttcgtgtttttagtggagacgggatttcaccatattggccaggctggtctcaaactcttgacctcgtgatccatccgcctcagcctcccaaagtgctgggattacaggcatgagccaatgcgcccggtcaaaacctctatatttttattgagtagaataatgtaaaacaagccctaatgccacatgagagacaggtcattaagcctttagtttccttgattactccacatgtagaatttgagtaacactaagaaggtcaagaacgtaggtagaaattccaattctggggaatgctggtttgaaagagacaaaagggctagctagcttcctgctctcattcctccccatttcagtatattttgccctgagctaatactgctgagcatggtggcatgcgcctgtagttccagctacttgggaggctgagagcagaaggattgctggagcacaggagttcaagtctaacctgggcaacatagacccagtctcttaaataaataaatgctctctgtcctcttacagcaaatctgactatccccggctcctgttgtttccctatcagggtccttactgctctcttctcttcacttggatatttgcctcttttgttcttgcctctctcatggagagtctggcttcaccttttttatggtgctagttcagagtttaaatctccaacatgagttactcagattggaatcttgtttacagatggatggaatatttgctgtttaatttgcaaattctaaatgggattcgtcgacgttttctccaacctcaaacctatctattgtccctcttacctcttattcagccttggtgtgtgcttggctatatatactattctaccagtatagatgatgtcagtataaaaatgctgaaagagagctcaaagaaaatgggtcatgtaccctcaaattgaattctggttctgtcactaagcagccatgaagccatgagaccttgtgcaagtattcttttccaaacataaaatattacctaatgaatatgcatttccagggtagaagtgatccttaagtacatttttaaacacagtcatgcattgcttaatgaccgggatatattctaagaaaagcaccattagccaatttctttgttgtgtgaacattacatagagtgtacttatacaaacctagatggtatatatttttattttctatatattttatcatattgaaaaccaaatgtcccagcatcattactgaatatcagtcatttccctgcttgatctgcaatgccaacatcaaatgcaatatattaggtttctataaatgctccgttaaagccttatgggaccactgtcataaatgtggtccatcatttgtctgaagcactgttacgtgacgcatgactgtaacactattaggcagggagagtagagtccccttatgagaattgctgccctcaattttcatagaaaagaataaatttcattatgcatccaatgatttatttatagcaagtgaattaatgtgtggctactgcagctatgaaagaaatacaacttcagaggcagtctatgcgacctcaaagagttaggaaatgctttggctagtcttctaaggtgaccaaagtgatagacctgtgattcctttgttgtggtcttgtcaaaagtctgatcttacccccaacctccaaccaaaagatagggatctgcagtgagaagctcagcaaagggatgagaagccagaatggctgtgcctaaatggccaagtcaggatgccaattactgggtgcagtgaactggcatagggatatactccctcacatccatttgagccttcctctttgaaacaatgcaaattgaggaaatgctgacaactttgattctagctaaatgggcatagcgttaactggttaaaaggccatcgctaccctcttgtcattcagaaatggccatgtagttcacttcttgctgatgagacacaaatggaggattgttggaggtttctagaattctttctcactctggagagcaattgtaagcatttgtttgtctcccactggatataaacaagaaaacatgaagcactaattgctgctggtagctgtcttacaacctaggagtagtgaatcagccatagaatgaggctgaaaaggtaaacagcagagtggagagaaagaaaaactgatatttgatgaccttcactgagtctaccaatcacaaatatgtcctgccttttaacttgcattacataaaaatttctttagtatttaagtctgagttgggttttctggtacttgcagcccacagtatcctaacatatgcatgggatgaagtattatcctctagttgtctcaaatatatggtgatgtactgcctcctaaacaaacagacgtatgttttcttctactactctatcacctatacttatggaactcaggcttcaatctgcactaaaccacctgaggagcacattaaaatgcagagcccaaaggcctaccctcagggattgattccataggtggctataaatccattttatttaactttaaaacaatattttagacacagggtctcactatgttgtccaggctagcctccaactcctgagcttaagggattcttctgcctcagcctcctgagcagctgggattacaggcacataccaccacacacagctcacaaattcacttttgacaacccaggtgacctgtgacagaatacaacaaatactgctgttgttccaccaatacccatttccctcttaagccttactaagaacaccaagattgcattagggtaacaaggtgaggtgccatttcatctcaaggtgaattttgaaataggtgtggccatgtgacagttctggcctagggtcaggtcccttcctaactgaaaaggcaaagcctcattaggggaaagctcttagccctactcctgaaaaacaatcgggaggcctggtgttaacaggtgttgttttgccaccatgaggataaatatcacaagccaaggatgaagaagaagtaggctacaggaaccctgggtccataataacatcctgaagcagctgcaccactcctgtctgcctatttccagacatcctattaaactggaaagatgaacccctatgtggttatgccactgtggtcaggtttctgtaatgttcagaaacacctcatatttgttgacacacagatgctccaaggaccatgctgagaaatactgccttattaagctaggtatagaagtttcttaatagtttgaacttgatttcttctcttgtattcccttctattcttacctctgtccgaggtgtgtgaaccagagcaactccatcttaaataggagctgggtaatgttgagaacaggccccccaaaatctggccattaactggccctaaaactggccataaacaatatctctgcagcactgtgacatgttcatgatggccatgacgcccacgctggaaggttgtgggtttactggaatgagggcaaggaacacctggcccacccagggtggaaacctcttaaaggcgttcttaaactacaaacaatagcatgagcgatctttgccttaaggacatgctcctgctgcagataactagccaaacccatccctttatttcggcccatccctttgtttcccataaggagtacttttagttaatctataatctatagaaacaatgcttatcaccggcctgctgttaataaatatgtgggtaaatctctgttcgaggctctcagctctgaaggcggtgagacccctgatttcccactccacacctctatatttctgtgtgtgtgtctttaattcctctagcgctgctgggttagggtctccctgaccgagctggtctcggcagggtaaaatgagactgaaacctactgggctgtgttccccaacagttaaggcctcctgagtcacaggataagataggaggttagcacaaaatacaggtcataaagaccttgctgatgaaacaggttgcagtaggccagccaaaacccaccaaaagcaaaatgaccacgagagtgacctctggtcgtcctcactgctacactcccaccagtgccatgacagtttacaaatgccatggcaacatcaggaagttaccctatatggtctaaaaagggaatctgcctcctgtttagcgtatcatcaagaactaaccataaaatgggcaaccagcagccctcggggctgctgtgtctatggagtaaccattcttttatttctttactttcttaataaactcgctttcactttgcactgtgaactggccttgaattctttcttgcacaagatccaagaaccctctcttggggtctggatctgcacccctttcctgtaacgtatttctggcgaccacaaagggactatcgtgcagaaaccctgacccaacagctacctttgcgtaagtagtggggtcctgtaacatctttctgatgacaagggaagtgactgtactgcagaaacccccaacccaaaggctaactttgggtaagtggtggggtccagtaacatctttctggatgtaaccacaaaagggacaataccgaggagacccccccaaaacccaaggaaaatagacggcagcactgattggatgacttggggtaagtggtggggtacccaggtaaagaatggaattgagttagaggcccaccttaggggagttagaatctctcctaagactgagtgggttaaaggcctctcttaataaaaggcaaggacgtttgaccaaccttgggttacaggcccaacttaggacggttagagtcccttctaagatttagggggttggttagaggcccctctcagtaaagtccctaagaacaggtttggtactatggaatgttaactgctattctcgttgtattaatttgccttgcactctttgctgacagctgtgggtgacaggattaggcatgtacaggatcatgggacatggggaacttttccatccctaaaaggggaaacttgagagctaatgggactgctggaagagacttgtttgctaccgacaagcggccacccgaactttttcattgtcggatggaataagtgg

SEQ ID NO: 95028 - DNA, 21410 bp, Homo sapiens
gacctggatcttcctaatggaactgcagtgggtggcgggggaggggggggaggcgtggtgtcaagaaaggattatccaggaactgacatctgagaagtttctagaaggaattccccaggtgaataaaaaaacaagtcagtgtgaataggagaagagatgcctcaacattccttaggggttaagggttagcagtttcgagttctgaatccaagttgtgcctctgtcattggaaactttaagacttcatgacctcgcttgacttcttgaacatctctgttttctcaggtataaaacgagactccctaaggtggcttatcttctgtttctagcatgttatgaatgaaggtgttggattggattggaaattagataacttgggtttatgtctgagccctcctactaacttgagtaaggcacttcattcttctgacttcactttttccttccattaaaatgaccagttgagtttgtaatctaagaaagagcgtttctaggttgatttacctttgaccttcatccaaggcagcaaaaaggttaatcttaaaggaaggggtacttccattattttttcctattcttctttctccctgatgccatctgaaaatggctcaactgactggttttacaggtggatcctggggatactattctacacagaggactaattcacaaagttccctaaatgcattattctaagtatctaaagttctttgctattttggccctgccagccttttacatctcattccttcttcacaccctacatcctagccacactgaagaatctcccggggtctgtgtcctgcccggcttctggtgtccctggctttcttgtgctcttctctcaggctgaaacatcccttctcctatttacaccyggcttgtttttttctccccctggggaattccttctagaaccttctcacttgtcagttcctggataatccttccttgatggcccccacccctagttccattaggaagatctaggtccctccttatcctttctccacctttccactccatagctgtatcataatatgtaccacaggacgttgcagctcgccgaccctgggggcccctctgactgactgtcagttccttcagcgcaggctgtgtgccttggcgcttatcacaatatctagctcctccacctggaatgaaaaggtgagtgaatacaacttacagtcagcttgagaaagtgaagctaaggcacagggaagccaggagccaacctgccctaggtcgagcagggctcccacggtgagattccccagactgagctgtaagaaatctgcccatgaaccacatgagctcaagtccttccagtgctgttttgttcttgaagcagtgcattttggggcagagtagaggagcagatgcatctcttccaaaccccaacaggacgggggcaagggctggacacatcccagaaacgagaggcatgtcatgctcatgctgttccatgtggtggctccagagatggtgttgctgtgtggctcatggtgacatggccctgcctgtcactctgtggccccaaatggcatgtacccaatgacagacgtgtatgtcaaaccacgaaagacagcagcctgggggagcttggggcagcttcagcagatctgaaataagatgtcaaaatcggcccctagaagctgggtatgtttttggcctcaccatcctgctcctccaggagtcaattctcagccagctctgtgccaccacactggtgggccactctgctaggcctggcaggtgtgagaagggcctcagagccttgtgaaggatcaggacttaagacaccacatccttcagtaccctgccgtcttatctggatcctctgggggctgaccttaagggcgagatggtggaagaggaactgtctactttgcagttactctacccaaagctccctacacctaggaaccccctacacctacacctacactctgtggcatcttcccttcataagagtaattaccagcacattgcagtggctgaaattaactgagaacatacgtatcaggatctgtgctaggctatttataggattatctcatttaattatcactataatcttatagagtaggtgctgtttttttttttttttttttgacggagttttactcgttgcccaggctggagtgcagtggcatgatctcgctctgggattacaggcgtgagccaccgtgccctgccgaataggtgctattattgcttctattttgaagatgagatgatccagtctaaattagtccagtcccttgcccatgtttcctcaactaatgagtgttgaggcagggactcagacacaagctttaatgtgcttttagccacacgatactgcatcatgcaagacctggagagaccatgggagcaaggacaagcgggatcaaatggagccaagcgatgcaagggtacctgtgggagccccatcacaggggcctcgtgttcctcccttgacccggacaataagaaaccaaaagaaactggctgggacatttctcacttcactccctcagactgagtgtaggatcaggctcacataaacagagttctcttggctactaagaggcactatctgaactcaaagaaggagtgtgtaaccataacaacaatgatacaacccgatctcttcccccatagaaagaagagagctttatgttaaagaactatttatctgaaataactattgaacaggatagcttaccattgacattcaacttgggcagcaaaaagcaagtggaaaaatttggtcgctgaaatattttccatgaccacctgccgtctgggtgtagtatgcaaaggggacaccatgggtcagacagttcaggccccccactgaggagccatcagggctggggtcagtaggtttgccatctgtcagcatcactccattctctaaaacccttgggagggttgccttgtcacatctgttgaaagctatagtctccttcctcttgcactgcctcacttacaatgttagtaagcaagcaatttaagaagtgaattatactaattttgcttatccttgaagtgtgaaattttagaagatggtgccaaatgaatgatcatgtatatttctcagttcgttcatggctttttttaaagtttgttcattcttaaagacacttctatgctgtgtaaatttaactagagatgaaaaatggaagttgaaaacaattgtaaaattatctaaaagtacaggtttcagatgctgataaccagaaaagtaatttctatggacttgaaactatagatctttttgtccacatacattctaggcctatcattcattacctaaataatataaaaaccagctagaatatcagctgcaacaaattatcacaaattttacttatgaaacaagactaaacaaagttgtcattgaaggcagggtgggatctcatttcatttgtgaatttgagactagagctagtgcatggattgtaaaaactgaatgtggtcaaagtgatccccgaaaattatttaattacaccataaagaacagtgtctatgatatgacatacgcaacatgtatcaggcagctattgctatgactttgctgcataacgagtaaccgccaactctctgtagaaaacaattaagcataatatcacccatgtgcctgtgggcctctgagtcagttgcagcatctctgttccttgtgtttcattccagggcctgggctggagagacattggctatccagggtgtattcttcccatggtcatggcagatgcacaaaagtatgagcccagttctgttagtgtgcttttagcctcttcttgcatcaacatctgctaacagcccattggccaaagtgagtcacatgaccaaaccccaaatcaagggtcaaggaagtacatttctcacaccacaaggccatggctaaatgtggttgtctagcactaccagtaaagaataaagaaatgggacgaataatttaatttattgcaattcaatccttaagatgcagtgtttttaaccacgtaaaagacatggtcctagttcactcagggcaaattaaatctgcccatgatactgtttccctatgaagacactccatttactttatttttgaggggtctgtttccttgttatacgtgccatctaatggtcagaggtatctttgagaactgacccagcagtcccaacagtcaacacccccatccagagactcccctaaaggatccttctctctactaggcgttgtttgatgacttcttaggatccacttctccatgttgccccaatccttgcagacaacccaaactcggttccattcctgctctcctccctctccctttagtcccctggttttgggctgcccggggtgtgacttccatttacccttggccgttggacagctctgtcacgatccgtattccaatactgccaaaaccctgggactcaggctcatctagagtgaggctggtgaggatagtctaacagtcaaggttcattcaggcaagaaaagaaaaggagaaaccaagcattttaagcagaaagagattaaatccaaggaagtacatgatcattgagtaggcctgggattgtcaaggtcaggaaatctgctttcactaaatctagaacagtaggaattagaggaagctgccacccagactccagctaccctggagtaccgaagcaagagattctcaggagggcacctcagagccaagggcagctgctaccaataatttcagctgcttgcctgcagtatgttgttcttgggggatatccccccaaaagcaatagcgcattatgtcatctgcatgacagaattattttcttccacttttcactgggaagcactaactctgaaccacactgggaaaagaaattgcagactttgctccagcaatgcagaatacagtgcagcaggggtcagggaggatgctgggtttacaaagaccaagcagaaaatccatcacatcccttccccacatttaaacttccaaacaaccaccactaccaccccacactctgcctaatgtgatgcctgatgcattgaaatgcaccagttctgtctacccaatgggagaggcacacagtctcataagtcacgctatacagacagagggtgacttttaagatattacccagataattacatgaattttaagacttgcttggcaccagttgatcaattttatattcatttatctaaatgaagactcatattcatagttgagggattattttacttgaatactatatcttttaaaatatttgctggggttatgatgtcaacagaacccaatagaatatcacactgaagtttttacaagtctcttctttatggaagaacctgaaaagcctcttcagttctacctaaatgaagaagaaaaattcttctggcacttatttccctcccatacagtttcctgcctttgttcacataccattttattccaaagaaagccatattgtctaatcataagtcatactggaaaacatcaataaatataaacaattattctcatcccactctcttcagtataagaagaatctataaaatgtatacaatatgtttgtaacataaataagagaaatatatatgtttatgtatgtgtatatacatatatatatagcctttaagtaaattcagtgattcttatatagtggttcttatgaagctaagaaatttgaattcaaaggcctttggggtcctggaattcaaccattcatcatttactcatttattcaacaattacagattagtgcctgccctgtgccaggcaaatttgcttatggttcctacccgcagtgtgctcccagtgtagcagaggagttcacagttctgttaccaaaggcttgaaatttccagactcgaacaacaactagcacacaaaaattctcctcccctaatggagttgaggaaactacccatgtcaccaaataattcttagctttcctaaaagaatcaccaaagagctctttcaaactggtaatgagattggaattcctaaaattaaaaatacaccccactgcatatggagaacaacactaccagcaggtggctccggcagggccgtctgayggacgggtgagtcaggtgctggcagtccagggctgaatgtgcttgggtctcctcaaagttgcctggctttttatttatttttattttttatttttttgagacagagtctcgctctgttgcccaggctggagtrcagcggtgcgatctcggctcmctgcaagctctgcctcccgggttcacgccattgtcctgcctcagcctcccaagttgctaggactataggcacccgccaccacgcctggctaatttttttttttggatttttagtagagacggcgtttcaccatgttagccaggatggtcttgctctcctgacctcgtgatccacccgcctcggcctcccaaagtgctgggattacatgcgtgagccaccacgcttggccatgactggcttttagggtgatcagtggagtctccagtggtcagaaatgcctgaattctgctgattttgttttgtcagcaacctcttattgaatcgactgttacttatttttattaacaacaggttaatgctaatggttgtcatagactgggcaacgcaggttctgcataatatagatgggttcctgttttaaaagaggctactgttgtgtccaacaacaaagctgtaaaatcatggaaccagactactcttcagagagtgactagtgcactgccagcagctcgccagagagagtcacagaaggttggctctgcaagacagcttatatttcagagcatgaaaccgaggccgggagggaacacttatcccatgccccatacctggttgaaggctgaatgaaccctcagttagtcacgggctacccaggtggccagtatccctgctgcactacacaataagcaaagacacagccatggacatagtgatgacatagccatagcaatgattagagaatcacttcttcttgggatcttaagaaggctctgtcagtttccagtggtaccatttccttaatccatgttacatactttttggccatgattaacagtgagtgagtgtacactgtatggcaatgctgtgatagtaccttacwtagattatctctcattatgacatccctattatacagatgaggaaactgatgctaccagaggctaaataacttgccaaactttctaagttaatatgtaataggagccgggcacagtggctaatgcctgtaatcccagcactttgggaggctgaggcaggtggatcacttgaggtcaggagttcaagaccaacctagccaatatggtgagaccccgtctctactaaaaatacaaaaattaggcaggcatggtggcatgcgcctgtagtcccggctacttgggaggctgaggtaggagagtcacttgaacctaggaagcggaggttgcagtgagctgagatcgtgccattgcactccagcctgggcatagtagcaagaytctgtctcaaaatatatatattagaaactgtactgtacagcaaaccctgtgacatgtaacaaactctcacatgtatccctaaacctaaaagttraaaaaagaaaaagaaaacaagaaaaataaattgtacttgaaagcagacctgtctaacccaaacaccaggctcttaaccattatctgtattgttaaagactctcagcaacaaattatagtctactctgtatattactgtccaccacttcacacatttcacctgttaccaacagtctctctgagctttgcttttgtatatttcacaggtttttcctatagatagcattgtaatatttccatttaactctatcctttgtaaaatgacatcactggtatgtttcaaatagatttttagtcagcgacagctaatgagcaaaggagcaatgattagagaatcagttcttcttaagatcccaagatttgttctaactattgtgggggtaattccaggctgcatttcaaacagtgttggcacagaaattcttaaagtgtaagccttctctccttccctctatgctttctggatttctctaggcatactgggaacctgaactcaaagtcttaacacagaaacttctaaactactcacacctacagcctgtaactctgacccgttcacaaaggttaagttttttataaatactattttaaaaaattttctctgaaaaaaaaaggggaatttatggagttttaatactttagcatgtgagaaacttaagggaccagggggtcttttttagctatgaggcagtaggagttgaaataatgtaaattagaactattttaagaggttggtcaatcaagtcaatggaaccacaagctggaccctctccttcttgtgagcaccaagactccaaggtcaggctgaccaggaggccccaggatagaaagttggaaagagcctgtgggtgcggcaggttctgaggctcaattcaaaaggaggtggcctcagccaggggagaagcacagaggcagtacaggtagaagtggaaatgggtagattactggtcagaaatctgcctctgtatctgccttcacttcctactggctgtgtgaccttgggcaaatcacttaacctttctaagctttagtcttcttattggtaaagtgagatgttctgagtgggtggctggcccacagccaaagcataattaatgtgagtcattattacgagtaagaaacaagtcagtggagacactgaggcctgcacacaaaagtccaacaaatcacaaggcaacagggagaatgggctcagtgtagagaggccaagagtcctgggccagcaccactgggaagaggagaagccccctctttcttcttctccatgccctggccttctgctatggtacttgcattttttcaggttcttaccttcttgctgggacctcagtggtctcttagcttcctgtgaccatcgccactcagattcattctcttcagtgctgccaggcaatatttcctacaacgcaaacctgaccaacttttcattctgctgaaaactcttggacaagggttttagcaagagctagcccagaccctttggcatggctcataaaccttctgtaacttggcaggtgctttcatttttgactcacctgtaggcatgacacacgggagagtcctgaaagccagagaaaggccatttttacattggtggggggctgggggagggatagcattaggagaaatacctaatgtaaatgatgagttgatgggtgcagcaaaccaacatggcacatgtatacctatgtaacaaacctgcacattgtgcacatgtaccctagaacttaaagtatatataaaaaaagttgtcatgcaaaaaaaaaaaaaaaaaaaggccaactttactttgtggctcgccagctgataagacacctgcttgggggcagagaaactgcacttacctaagcacttactttttacccattctcacccttcattgcacattagaatcacctgggggtgtttataaactacccccaatgcccaggccacaccccagaccaattatgtcagagcctctggagtgggatgcaggcatccctatttttaagctcctctggtcatcccgaggtgctgtcaagctgtggatcacagctatacatacatttttgtctttcaaaggaaagagtcttatcacttgtttgaagtccgaagacatcagcctcaaatctgaatatcaaccacctgctagttattgctgactttgggagaaacattgatcaatttcagaaaaaggatgtcagggaagtaaaagtgcatgaccaattcaggaagtgggagatcagcccagtctcctgcaaagcccgtggttttacagaaaccctcctgaatgtcagcgagcataagccgtcgtggcatgggcagctctcggtgagcagcctggccttggtccagctcggcacagaaggaccagcacagggagggaggaagtgactcagggctgccctctccccgacaacaggacaggactgtaaccttttgtgaaaggacaggtaaaaatagctgcagcactttaggaagaactcagaatttttagattctgaaccatctgattatataactgagggtaagtgatctgggaaagggcaggaaactattatttatggtcttttagtgtcctgggttcggtgctgtatgtaggtcccagttaatcttcacaatgaccctgtgaggttgttgttttcctctccttttctgtaaatgaggagcctgcaggcactgagggrgagatgatgaactcgaaatcacccagcttgcaaatgatagagatgggaccaaccctggtgctgtcgtgtcccacaccccattctctggcttgactctggctcaaccccaaccatgacacatatagggtggcatgaagttctccaggagccagggctgcctggctgtatcctgtatcctagtgttcttgcaaagctgcagtgagagaaaaagcagggccaggggcaggaatgtcttagctgatgtgaatggcttgtatgctgttggccccaaaagtttgctgaaaggtctttagcagcgggatgatctatcccaccaggggtccaggaattttcatatgggaatgctacttatggtagatctgtgagggggggagtagaacctagaaaacaacttagaagactttacagacactcagaatgtggactttatatacctttcacaaaaaggtaccagggctccttagaaaagtagccatttccaggtctggggcaggaaatgcataaattgagacagaaagaaaagaagcagtcaaagattagattcctggggtcatgttgaaaggacacatgcatcaacttgaaatgatactcactggctagagatggataatttggataaaaaagaataatggctgaaatggattgaaaatgtcaagcatataaaaatccaagagtttataataatacaccataccaccctctcacaaaaaccgcaacacgcaactcagtggttaactacctttgggagttgcttgggcaccaagtcattattctgaagactgatgaatagaggaaaggaataaaacatccatcctgtttcttctgtattcattttttttttcagagaaaccaagtagctsatgaagaaaagttttcatttatagaaaaatcacaattggccrggcgcggtggctcatgcctgtaatcccagcactttgggaggccaaggtgggcagatcacctctaaggtcaggagttcragactagcctgacccaacatggagaagcactgcctctactaaaaatacaaaagtagccaggtgtggtggtgcatgcctgtaatcccagctactcgggaggctgaggcaggagaattgcttgaaccccggaggtggaggttgtggtgagcccagatagtgccattgcactccagcctgggcaacaagagcaaaactccgtctcaaaaagaaaaaaaaaaaaaatcacaatcgataatggaggaggaatgttagaattagaaaatcaccaatttgcaactcattgaaataatggtatcaggaatgatcatcaatggctattaaaaccatgaagtgaaggttgagcgaggccttgctaacagatgggtatccatgaacccactggtcaaccttagcctactggaaatggaacagtggaactggcagacatgatgtatcccagatgtcacaaaatacacaatactagcaccatctagatggaatctgaagctaatcaagccaccagatcttatataacccacaggaaacagagggtagagaaatgtgtgaaatggtagtgagtcctctccctccatggcatagaggaatgaggtagctaggctgaaggcacatacctcagccccattctgtgacaatcctatgcaggccctgggacctttacaagacaagccagtaaaaaaccagctaaactttagtcattgttcactataattcaatgtgagaaagatgatcaagttagcgtgtaaggcaggtaggacctatcagaggatgagacatctaagttagttctcttgtttgaggaccctaaataatatttttaaaataataaagaagcacatactgtcatctatttcaaatgtttaggtttgacacctttcacacacactcacacaatgaccatctcttgatgccatttggaaatcatgtccttcatgaattacatcaccccacaaccttggcccatgttccattatggactgctgggcacactgcagatttcccagctggagaaataataaagccagttcctgcctcctattctgtttcttttctatcccaccccagagtatagctatagagataaggaaggcacacagaagtaatgattctcttgcagcagtaattgccctgacatttgctcacctatctgtacccactttctctgccttcccacccaggacctcagatttcctatcgatgctcttatcaaaaccatcctaccacttcatgctaaacgacacctcctctaacaaacccagaaacattcttccagaaatccttttgctacatcattaatttttcttctctttgggatcattgacattagcataaaatgtcttattatctctctcactaaaaattcctttccaaatacctgtagagtactatgttcactgtttaggtgatgggttcactagaattccaaaccccagcattatgcaatatatctgtgtaacaaacctgcacatggaacccctgaatctttaataaaataaaataagataaaaaataaagttaaaatgataaaatagattccagctgcataaggatttagagaagaagaacaagatgattttcaaacacaagcatttgtggagattgaaatttttaaaaataattgtgtaccatgttaccatatgcagaataaaactttcaaaattagtagcgaacaataaagaaagctaatttatgtttttaaaaatgtttccttaaaaaagaataaaactttcaaagttagtaactaacaataaagaaagctaatttatgttttaaaaaatatattttccttaagaaaaactagagcagagataaatgaactggaaaatagaaaaataataygaaaaatcaaaaaaatcaaaaaaagttggttatttgaaaagatcaacataattgacaaacctttagctacatgaattaaggaaaaaagaccactcaaatttctataattagaaatgaaagtgggcacagctgctgcacatcccggggctcctgacctctctgcgtttgcagcgtagcccaagtcggtcagcactggaggacctcagaagccatgttgaagccccatagtgaagccagggctgccttcattcagacccagcagctgcacgcagccatggctgacacattcttggagcacatgtgctgcctggacactgactcgccacccatyacagcctggagcactggcatcatcygtactatgggcccagcttctccattgctagagatgctgaagaaaacgattaagtctggaattaatgtggctcatctgaactctcatggagcccatgagtaccatacagagaccatcaagaacgtgcgcacagccacggaaagctttgcttctgactccatcctctaccagcccattgctgtggctccagacactaaaggacctgagatcccaactgggcccgtcaagggcagcggcactgcagaggtggagctgaagaagggagccactctcaagttcacgctggataatacctacatggaaaagggtaagagaacatcctgtggcgggactacaagaacatctgcaaggtggtggaagtgggctgcaagatctacgwggatgatgggctaatttctctccaagtgaagcagaaggatgctcactttctggtgacagaggtggaaaatggtggctccttgggcagcaagaagagtgtgaaccttcctggggctgccgtggacctgyctgccatgttggagaaggacatccaggacctgaagtttgggggcgagcaagatgtcgatatgatgttttcatcattcatctgcaagacatctgatgtccatgaagttaggaaggtcttgggagagaaaggaaagaacagcaagataaccagcaaaattgagaatcatgatgggggttggaggtttgatgaaatcctggaggccagcgatgggattatggtagctcgtggtgatccaccacaagccgtcgagatgagattcctgcagggaaggtctgccttgctcagaggatgatgattgggtggtgcaaccaagctgggaagcctgtcatcttgccactcagatgctagaggatgtgatcaagaagctccaccccacttgggctgagggcagtggtgtggccaatgcagttctggtggaagctgactgcatcatgctgtctggagaaacagccaaagggaactatcctctggaggctgtgcacatgcagcacctgattgcctgtgaggcagaggccaccatctaccacttgcaattatttgaggagttctgccacctggcacccattaccagtgaccccgcagaagctactgccgtgggcactgtggaggcctccttcaagtgctgcagtggggccataatcrtcctcaccaagtctgcaggtgtgcccaccaggtggccagatactgcccacgtgcccccatgattgttgtgacatggcatccccaggcagctcgccaggcccacctgtaccgtggtatcttccctgtgctgtgtaaggaccccatccaggagccctaggctgaggatgtggacctccgagtgaacttggccatgaatgttggtaaggcctgaggcttcttcaagaaggatgatgtggtcattgtgctgacctggtgacaccctggccctggcttctccaccaccctgtgtgttattcctgtgctgtgatggactccagagctcttcctccagcccctgtcccacccccttcccccaatgcatccattaggccagcaatgcttatagagctcactctgggctgtagtgtggcactggtgggctggaacaccagggaagaagatttatgcctcgctgaaacgtggctgtttttagagcctgctgtggcgggagagcccggagcctggctgcccatcatgtggccccacccaagcaagagaagaaggaggaatgcagaacagaggcccccagagtgtatggcaagagggtggcagcttcctttcytctgtgtactctgtttagttgctttagaaaatggaagcccagaggactcccaaccctgtcctggggtcaggaaacagccagtgagagttagggaccttagggcatggggcagtagttccagtttaagcagatcctgaccctggcccttacttgcttcccaatcccctgggccttcctcactggcacctgtgcccgctctccactcagctgtcctgcagcaaacacttcaccctccaccttccattttcccccactactgcagccgcctytgagcctgtggctatagagcctatctctatgtcaataaacaacagctgaagataaagaaagaaagtgggaacattaactacatacttactgaaataaaaaagattgtaagagagtgtaagaggagcaattgtaccccaacaagttggatacactagatgaaatggacaaattcttagaaacgcaaaacctaccaagactaaaccatgaagacatggaaaataggtcacagacctatgactagtaaggagactgaatcaataatcagaaatctccagacagccaggagtggtggtgcacacctgtagtcccagctgtttgggaggctgaggcaggaggatcacttgagcctaggagtctgaggtcagccttggcaacatagtgagactgtgtctccaaaaaaaaaaaaaaaaaaaaaaactccagacaaagaaaagtcccagagctgatggtgtcacaagtgaattcatctaatgttcagaagagagacttaggagggagtctggaccctccccacccccatgctccactctatcctacagccacagaccaccatttctcacccgatccactctagctttccttacccctcccttgcctattttatgcagccacagagattttttaaaaattcaaaaatctgactctcttttctatattttaaactcttcaatgttttcctttttctttttggataatgatggaaatcttttgtggagtcctaattagggaaaaggagtcaggatggcaagactgagggaaagaaaaaagaaaaagcagattgagctgggcaccgtggctcacgcctgtaatgccagcactttgggaggctgaggcaggtggatcacctgaggtcaggagtttaaaaccagcctggccaacatggtgaaaccccgtctctactaaaaatacaaaaaaaaaaaaaaaaaaaaggaaaaaaaaattagctgggcgtgttggtgtgcgcctgtaatcccaggtacttgggaggctgaagcagaaaaatcgcttgaacccgggaggcggaggtagcagtgagctgagattgcgccattgtactccagcctgggcaacaagcatgaaactccatttcaaacaaaaaaagaaaagaaaagaaaaagaaaaagcagataagttgtgtctgactttcttcatggtccaggacacgtagccctcctgtgcaaacaactcactatcttcctgcacccagttatcgtcagacctttggctgatggaaaaatgcaagtgagctcactgccaccttggcgttatcagtactgcaaaaagccctcttcggcacacagcataagcactgttctctgaaatccccagcaagcctttgtctctttgcagtcagctcctctcttactaactggtcattgttcccttacagcatatttttatactctctctaagaaacctgcctttctttacctaacaactgtcttggtaaattcttctcacctccataccactggtctcagatagtgacatctttgacatggtcctcaattttcaggacctttgcatgagctgccgtctcctagctggctccccatcatccttcacagtgtagcttagggctatttccctcagggagcttttctgaacttccagagcagttctaggccccctgctatatactctcctgaagcacttttatttcagtgtatttatataccttggtgctattatttaaagtccgactgacctcttagattctaagccccatgcatgcttttctaatcactgaatttctagcactaacatagcacatgacatagtggagactcaataaatatctaatgaataaaagagggaaaaaggaaataaggaaggcaggtgggaagaaaaaagctgatagtctcagccaaactcagtgactatggtgaatcctgtgggacatggaaatattctagcaaaccttctttatgtacttaactactgtcctgaatctgcattgaccagtgtctgctgtatgtgatctgcacacacagcatgggtataattttcagccacagctttttttttgtttaaaaaaaaaatggaaaggttaaatttagaagttaggcctatccacacaatgtctaacaaacttactaatcaaaatatttacaaatacagcttccaactgctgaaattagataatttaatatttcctagtttaggcagaacactcaagaacacaggaaaagattgaaagtctaaaaaaatggagtgaagctttttggaatttatattgttcatttcatccaacaaaagtcgtgaaacagttacacattgagtagtactcagggaatgtcatgacatccaagcttcagatccaatgggactctattttcagaagagcttccattttaaaatttagtcttcccacaaaagaggagtggaatatagcctctgtgtgggcagaaggcatgctgcagacacgtctggaggaggaacattcagatgcaagattgctgcaagggcccacaagcagagaggtgccctcatctgtgatcaccaccctcaccctccacttctgcctttgaaccttgactcagacaaagctgcaacagcatcagctggctcacaattacatttcttgttgtaaatgatgtttttactttaaaacatctctaattaggggccgggtgcggtggctcatgcctgtaattccagcgctttgggaggccgaggcccccggatcacgaggtcaggagatcaagactatcgtggctaacatggtgaaatcccgtctctactaaaaatacaaaaaagtaggcgggcgtggtggtgcgcacctgtagtccctgctacttggtaggttgaggcaggagaatcgcttgaacccaggaggcaggggttgcagtgagccgagatcacgccactgcactccagcctgggcaacagagcaagactccgtctcaaaacaatgacaacaacaaaaacaacaacaacaaactctactcatatgtagaaatccaggtttcaaatatttcatttaatctgagcctacttggtagagaacactggatcaaagttgtattccttttctattgctgccataacaaattactatcaacttagtggcttcagcaacaccagtgtatgctctcacagttctgtgagtcagaagaccaacatgggtttctttgactaaaaccaatgtgttaataggctatgtttctttctggagggtctgggggaaaatccatttcctgctaatttgggttgttgacagaattcagttccttgctggttgtcagtggagggccattcccagcttctgaaggcccctgcattccttggcttatggcctctccctccatcttcaaagcctgcaatggtgggctgagtccctctcatactgtgaatctctcttcctttttttcccctctcatcttttcacttgcaactgggaaaggttctccacttttaaggacttgtatgattatagagtccacctggataattcagatacactctctatctcaaaatatttaaccttaatcacaactgcaaagtccctttaccatggaaggtatcatattctgggggatagagagtaaacatatttggccgggcgtggtggcttacgcctgtaatcccagcaccctgggaggctgaggcgggcagatcacgaggtcaggagttggtcagcctgaccaacatggtgaaatgctgtctctgctaaaaatacaaaaattagccaggcgtgatggtgtgtgcctgtaatcccagctactcaagaggctgaggcaggagaatcgcttgaacctggaaggcagaggttgcagtgagccacgattgcgacactgcactccagcctgggcaacagagcaagactccgtgtcaaaaaaaaaaaaaaaaaaaggagacacatttgtgggtccattattctgcctacctcaaagatattcattaatcgaggtggggggtggtggtgctagagattttctttagaactttgagtgagctcctctgtgaatcagaaagatattcttgtaaagtctctagccttatgcttgtgatatttaagagcttcagtgattgccatttcttggagaattcctttatattttagcacactctcaaagaacattattacccttccccactgagttttgctcagagtctcaatgtcattattttattccttgcgctccctttttttcttagagtcatcaactataatgtaagttgcttttccttgttgtatatcctttcttctggatcttttggagagggttcagattatatatttttcctgttttttcagagtgggggaaaaagtctccaggagaggagaaggagttttctcacttgcctgctatttcatttccctaggctttcaaatttatacacacagtccatgtgttctgatttttccacacagacattttctaacagagatgtttgtgcaatttctttgcatcttcacttcatgttacgaatatagccaaattcaaaaaatatacccagccagaataaatgtttgatcttgtatcactggattcttgcatataactggccattaagcaactaaaacaactggacttcagaacaactgaattaacaaatacattgataatctgatcaattttttggttggataagatccaaacattttaagatctggcattaaagaaagaaaaagaatatatcacgcatttttcaatttagttaattaacagctcctaaatttagtgtcctatttctggttatgtgttaaatttacccatggtgttgtcctttacatttgagaaaaatttaatgaagtctttctatagggaagtgttaaaagtataatgccaagtgaaaaagagattataaaataacacatacaatgcaatttattaatgtatgtttcacaatataatttttctatagtacacaaaataaaaatataaaacagatatacatatatatacacatgaatgatattagatctagttgacaaacagtgcaagctttcaccttccctccaatcctgaatctattaaaataaaaagctatattttagaaagaatacatttacagcattctaggaaaacatgaaatgaaaccaccattaaaagaccaggaaattcgagacattcctggaaagaagatagaaatgaatgagaggagactgataacaggcgtgaacagaaaactacatcccgacacacccgtgagtgaaaggccaattggggaaattccaaacttagagagaacaaatggaacaagaagagaagtagccatggagcaatgcttctagtgagtcataaacagctgcatcaggtcagagaggacagcccagaaaccatctctctcctgtctcctggtttatacacacaacacacgtgtttgatcccaggttaaaagtggagaactacactctgaagcaagcaaacttccttcccttaaggcgtcctggtgtaggggcctagaatagaaaagcagagcttaagataactccagactgctacaacaatcagggagagaaaaatgaagacacagctctctccaagaaggaaatacatgaaagggctaaggggggaggatcatttgaggcaggaagttcaagaccagcctcgatgatatagcaaaaccctatctcaaaaatgaaacaaaacaaaacaacaacagggtttcaccaccaacccattgaactattgccatggtttgccacatagttgactaatatccatgttgacatgagaagcgcgatgccaattttttgtctcttttcattgtaggtaactggctttcttctctctggagatgtcattcagcaggctttttcaatctgacaactggtgcttttcttcagcttgggaaattttattttatttcttcaattacttcccctattttctctgttctctccttctggagtttccatgagtgaatctttttcaatttccaatgtctttcaattttcaatgtctttcaactttcctatcatatttttcttttaactgattttttttttgtcttccttcttggatccttgcaagggtgagctcttaattt

SEQ ID NO: 95029 - DNA, 343317 bp, Homo sapiens
  misc_feature (1)...(343317): n = A,T,C or G
tcttctcacatctataaacattctggaggaatgggttcattgtcccatcttgggtcaggtgtccccctcttgaccaattaggtgtgggcaatggacagcggtcacacagctctcgctgccatcataataaaaatgtgggcatgagagcagtagttcctataggaaaggtgggtgctggccacacactaatataggtatacgttaaaattatatgagatgataaaatacaggtcgatggtctgaattaaatgaatggtaaaggagaacaggatctatcctaatgcataaaaatggtttagctatgaataaacatcatttaatagggctgcaatgtatacaacatttactatatgtcaagaattgtactaagtgctttttgtatgttgagtcatttattttatacaaccccatgagctaggggacatcatcccttcttatagatggaaaaaccagagctcagagaggttaagtaacttgcccaaggtcagattgtaactgagcactgtttaatgtgcatagaggccaatggccaataccatggcactggcttttgagaaaataaaagctttattgcaagtcaaccgcaaggagacaggaagatatgctcaactctgtctccctgtgcagggcttgttttctttttcttttcttttcttttcgtctctcgctctctctctttctctctttctttctgagatggagtcttgctctgttgcccaggctggagtgcagtagcataatctcggctcactgcaacctccttctcctgggttcaaatgattctcctgcctgagccttccaagtagctgagattaaaggtgcccactaccacgcccagctaatttttgtatttttttagtagagacagggtttcaccatgttggccaggctggtcttgaactcctgtcctcaagtaatctgcccacatcggcctcccaaagtgctgggattataggtgtgagccacagcgcctggcctgggccaggttttataagcataaagtcatgagatgtgatctgattggatcttgcaatgaggtgatgctgggaggtatgatttgattggatcctgccatggggtgatgccaagcttgatacgattagatcctggatcctacaatgtggtgtccccttcttaattcagtcctcactcctcagtcagagcacttaggttcccgctgtagttgcagactcggttcatctgggcatgttcaggttaggtgaccttcaaactggggggccattggtaactgaaaaacaactcacaactttgttacataaaagttgaaccagattggtgtgatgtggttacaaaaaagctagtaagtctgagagtaatatactggctcaatacttctctatcctaagttggaaactatggtcaattttgatgaagaaattattagctatttccctacttcaattttgccataccaaagctatatgagcttgataaaccttgtaatgtcttacaaggttttaatctcttcatctgtaagaagattggattgaatcaaattactctctctccttgttaatacagataatacttttttttctgaaggcaagagtatgatctattacattaaaatgtttttaatgtatccaatatatttaaaaaaatagagacaggggtcttgctatggttgcccagcctggtcttgaactcctggcctcaagtgatcctcccaccttggcttcccaaaatgttgaggtgaaggtatgagccataattgctggctatatccaatacgttttagtgcttcttgagacatatctgtgttaggaactgagatgaaattaaagatatacaagatagagtttttgcttacagtgttatggtgggaacaaacaaacataattattattttgtagaattaatagtccaggaaagaatagttttcaggagtggtatgaccacagctcaatcaaatctgcaagggttttctatctgtctgccatcgccagtaggttgacttcattttcaggttagttcctcttgcaagattgctgccaatggcaatctgggttacaggttgacttgctcatatctggcaggaaagagagaactccttcccccagatatggactgaaaatcctttccttcagtctgattgggctagtttatcctggtcctaatggttttcaagtgtatcaattagaatagtctaggactattctaattctagcatattctagtctagcataacctagatgctaggtcatactgcattgaaaaatgcccccaaatctcagtggcttaaactacaaaggtgtatttcttattaaaaccagatgaaaatgggaggcaggctgctctaccttgtccttttttttggaagttaagccgagagaggctttaccgatactttcaagataatactggtcttgagtctggagaagagtaaacactgtaaggacttacgctggccatgaactgttctacctggaattgacacataccacttctgcccacaacccactacagactggtggctatagctagtcagtcacatggtccagcccaactgcaaggggaggagggtatctgggggtgggtgtggaaaaatataatctttttgtatgtctggaaagagagagtaagcatgataaatctcctaccatattagggaacccatttattggctaattgagttgcctttctgtagttggagttttgggtggttacctaaagaattggcagatgaaaacaaaaataaacagccctattaataaggaaggacgggagtgaatgttcaattagaaatcaatagtgtgaactatatgctgctttatcccagtggagaagacagaaatttcagccatggaggcaagtcatagggagggatagtctggctagtttcatcagtctttaaatcaatcacttcatttactcttgtaatgggaaagatttgctctggctttttaatgagtaggtatagagtttgtttaaggagctggctcaaaagtgacttaaaacacattgaatttgaaaatatagattcttagctactcaggaggctgaggcaagagtacagcttgaggccaggagttcaagacgagccttggcaacattctgcgaccttgtctctaaaaaataaaaatgaaaatatagactttttttccctatatttcatttttgtagttattgtcaatggtgtgtcaagttggctagatttatagttttagaactgacgaacaactaaaacttacctagtccaacccttttattttacaaatgagaaaactgaggcccagatgggtaaaatgattatctcaaggtcaccccttcttgctcttggcaataacaatgctgccctttggatgacttcctggaaaatcggatcctgtaagtgaaatgtagctagagcaacaattataaaacaacgagaacaattaacaattattcagaatgcttccatggctgacagtcagttggtacacgttggtagagatagaaaaatttctaaactatttggtaagtagcttatgctaagccttctgagtgcctcaaccccttgctggaactccacagatctccccaccgtaataacaggatccacctcaaaggtttgatttgagaattaaatggtggaggtaaagagttttgcatgaggcctggtgctcagcactattacactttggctattatttttattacagtcataataaaatggtagtaaatttcaaaccagtttctacatgaatgttcacaacttaggaaatgtgatagcattcacgttcattaactttgatctagctaatctctcaataaaatggccactcatgtactcactttaactttcattttgatcttttccatagtctaagggttgactccttcttgccccgggacacccgagtccccatagctctagctgatggttaagaatttgaccgaggctatatacaagaaaacaatgcactgacaaggccctgttacttgttgtataacagatcataacgattgttctgtctaatcttttgttgaacagaacttgtctttaacttttgggataagcaaagatgggtccaaaacctagtttggtgagggaggggtggagtaagaggtggagtacctgtacttacttaagcaactattacaaactggcagtgatgagcagcagaggcaagcagttgggagaagagaatgagagagcgcagcaacagggtgggacctgcagcttgtggaaaaatgcttttgacacagatactttctgatggccagtgatgtttagaaccttttgggggattccttctctctcagaatttaacctggcaagagaacgactgagttctaggaattttcttgtctggagagagtaaaataaatgtattttttaaaagctgggactgttatccacactgagaagaggcagggtataaaattccctttcataagtgaatttcctggaaattcatgattggcttggaacttaatgtgtaaagacttgttctcaaatatcagttgtttgacagagacctccagttttgggatggcagctaaatcctgagcctgccttggaaagggttttgataataatgttccatcacaggtggagaagcacattgattcaacaaagcagacttcaaaaccactgaagaattagtttctgagtgtattcaagagataccaaagttatttgttattttaacgtatattatactgttctatacaaatgcaccaaatcctgggcaaaacattcctaggacaggtttttttttttttttttttcagttggaaggaggtagggaaaataagtgctttaattcctaggattttggaagtaaaaatggaacaccagacaaaaatggaatttttaggcaaatgtaaagctttgtacttgggtatctcaaagtattatacagtgtaaactatcatgattattaaccaactagaagtagttcttttttttaaattttatttttaattttagacatgagggtcttgctatgttgcccaggctgaagtggctactgacaggcacgatgtggcactgcagcctggaactcttgggcttaagtgatccttcctgcttcttctatcttaaaaaaaaaaagttacgcttgcttgttaaaatatttttaaaatgctgtgtttaaactaagaagtaaatatccaccccacctctgacttctaaaaattatctaaagtatgactggtaagatttttacctttaatcccacataagtctaaaatttgtgttcatttccaacaaccaaagtgtgtcacttttataccagaattttgtcctgcttatacgtttagtacagaaatctcatgggagagagcatccatgcatttacaaattgttattgaattattttattgaatgatgacacccaaactgagctagaacataattctggctctgctagtacatcttctgtgtgatcttggacaagtcactctactttcctttcaattttcttttctcacagggagataatcataaaaacgactgtaaagtacagcacttcatagagtgctttttgtttaaagagctgacaataaatacgagtctcaaggtctaggaaagcctccctcacaacctgagctgcttgaggacaagggattttcttttgaatcagcagtaccttatttgtgtatctgtgatagagttcctggtacataaggtctcaataaatatgtgaatttatgaatattaggcagattgcaaccttgacaggccactgcctcttaaatctcctttctgtgatcttttaatatttaacatctaaaaggccgccgctacttgctttgggataagtatccccggtatgtactttaaaatgcccaagcctagagaaatgattcttgtcttaagggcaccatttcgctctcccaccgtaaagcgccccaggcttgggatctgggtcccaaggctacagggaagagtttggaacgggaagctcatcttccggccctctgattggccggctcgcactccactcacgcggcgcgcagctctgattggcctcggcggcacccctcgtcccgcgactactttgtgtgctggggcggcgcgctccggtcctcccgctcagctggcggtctgggctgctctggggcagcccttcggtccactgctctgcatcgcgggcgccgggaattttccgagtccgagcgggtaggacgcatcctagggcaaagcctctcccctctccccgtgctgttctctttcccgtactaaataaacttccgcctcagaggggctgtcgcagcygcgggtcgggagaggccgggcatcgaactcaggccctcgtggggggggtctttctcttcgagtgaatgtggaaacagctcttacaagataaagtagggcttygctgagtctcctgggggagcgatgccattgtaggatcgcgctggaagcagcagtcaagcggccaaatgcgggctgcaggggctgagcagcagcagcgcgcacccctaaaagtagcaaggagccagcttcaaaacctctagtgcgggtgccccctagggccgccgactgagctggcacgggccggtccattcccggcgctgtagggagcacagcattctctggaggcgagtctcctcccgggatccaggatccgctcgcgccccgctcagcctccggccttcaggcggtagagggcggcctacgcctgtgtgcgagccggagccggcgtgcgcagccgctgccctgctggaactgtgccgtcccgctgtggcccgcggctctgctaggcggtggatgctgctgctacgctctccaccggcgcagcgaggaagggggcggggagaakccctggcacatgccagggtcgccgtaggtggcagcggccggcgcatgcgcgccctctcccagaagccaggaacgccgaggggcgcgctcccccattcgcgcgcgcacgccggcgctggccgaggcttccccgcctgcgctcgttgtcagagccgctccggcgcgtgcgcgcgttatctccggccgacccgagcagccgsttccctcctctccaggccccctccccatcccacccccgccgcctggccccagccgacccgtcccttcgtctccccgcggaatggggccggcactgctcagggtcgcgcgccctggacccagctcgctctcggtctcgcgctgtcagcgactgcccggctcgcgccgcctcgcgctctgcctcagtcagtggcgccgaaggctccgttaagcggcggcggcggttcctgtttccgtttcttcctctccgttcggtcgggagtagcatcctccactcagccacccttcccactcccccatcgtggggcagctgcggctgagggctgtggctttggcagctgcgacggggagcggcggagaccgcctctgctcccgcctggggtaagggggcgttttgggagccgggccccgcgcgcctcggggtcttgggctgggctgcgcgcgggatctgaggaggctccgcggctgtccctgctcgttcacccgggcctgttgctgcaactgctgccggttaaccagcggctctcggaaaagtggggagggagcccccgggacgctctggcggatgccttggcgcagccccgggggcgcgggcagagggtgaggggcgcccgcctctccagccgggacgcggagctgcgccgctgctgccctcggcgtcgcgcatccttgcctagggcaggggccaaagcctagggaaggagaagggttgggggcgggggtgggaggtgtccgtcgtttcccctccacacctaccttcccttcgtcagcagctcggtccctggagtcgcggtttgtggggaggaagatgcccgtgcgttatgggctctttctgagtgctgctcgggctagaaagcagggagtggaccctcacaaagatccgcgagggactgatgcagggcagttaaaggcttgagtgcagctgtactcccttttgatgtgcaaatgacgagctggcggcttttgagtatcaacttatttgggaaggttaaatgagtccatatttatcagttctaggaggtttgtcctgcaggattgagtgggttgtcgggtgcagcacctgttctttmttcacagtggggattgcaatcttcagagacgcagtgtatttcttaagtggcagtgtcatgcttagggtttgtcccggatgagcttttattttagcattttgccatataatatatagattgaggccttggttaaaggcacggacaggtggtgtttttttccttcctatgttttaattattcacagtttatttaaacccactcaggaaggtggacccagaaaagccaaattctgtagtacataaccccaaatttcaaggttttgcggaacaaattcaacacaagttttgtgtcagtttagagttaaacgcatctcaagtarctgacttaactggcttgcctctatgaaaactgtaggcaggtttcattatagattttttttttcttgttattccggcggttaggtgcatgtttattttcttgattaaatttacattctatgttttatgactaattctttaaataggtgcatcatatagaaagtattttaggagagaaattattatttaagcactacagtatatcagatatatgagaaataatggagttgtagtctctgctctttaaaataactgtaaaaacatcttaaaaccctatgccaaataataaggccctgtaccttgctgtccttgtgaaatctggtatgtgtatagaaaatcttaattacttgatttgtaaatactacagtagtattgaaaaggtgggaattcaagcatttgtaattgtgatttcacaggtttagtgtgtaaaaaatgcagggagttagagatgaataggctataagacacgtacaaaggtagttccaagacatggattttctttttgctgccttataaattgagaattctatttgaattcaagagctgaacagctggaatgaaacttgcatagattgcagaaacagatgcaaaaatgtatctttggtcaagttgtgagttaacttgaagagtgtcttgtgtaataggatagtgattcaaaataatttccataaagtacggccttatataggttatattttgaggatatttttgaatttaaaaagtcacctgaagttgttttcctacaaatcagttctgtttaagatgtatggaatcgaaaaaaacaaaacaaaactaattctgattacatcctgcattgttttgttgcaaattcttaccagttatttttacgcaattggagtgtccttaaaagtggtgaatcttaaaatttgccagtggattggaaaaaactgttaacttattatttttaaaaatgctgttatattagtacattggtctggagggggagctagtgccaaagcaaagtatagcttaatagctgtttgaacttttaaaacacccaaaaccagatttttatgaccaaaagaaacataaatttttaattaaaagagtaggaaattgatgtgggcatatatatgtacatagttatttgtggagtgaatatattgtgtattacaaattagtttaaaaaagtcttttcatgcgctgcaataatggaaagctaaatgcttaaagatttattggatttctcacttaaaaatctctaaaatgtacccccaaacttagagtatgttatagtattttcttaaccttcttgtcctgttcatcagaatctaaggcatgtattcttgacccattgtacatgttgtgtgttcttaaattttgtttttataatagctacaatcctaaaatttcaaaaacgaagcttcaagtagaatcttatatgggcgaaggtattaattgtgtggtaagctaggtatttatcaaaagtagatataattccttttttttttttttttaaagtagagataattccaataaaaaaatggaccttttagacatctggagaacaatatccccaggtcacttaacccttatctcctgcagtataatgcagtgcgtccagctgatctaccaaattgaatgtgtgcctttgaatacgaagcagttgttttgtggcctgtggcatttcatttaggtttctaagctgtaataaattagtatgttaatttacttctttccattcacatattctttaaatccaagcctagaaactgatagttatatgtatattaaaatcattggaatattggtttttttgcagatagtgtttgggctgtttattatccatagctcttcattatgtaaatagaatctcaatgctgataaagtaaatagattcttccatttcattaatggttatttttgatttatgataaactgcatttaataaatctcttgatttagttaaatggtggatacatcatttcatattatagcaaattgataaatataaaagaaagttttacaatcataagagtaaatatttaaaaaaacttgaataagttactttactaaacataaaattaagatttttaaacaactctgaaactaaaagtattactattatggtacctttttttttttttcccccaaagagatgtgatcttgctgttttgtccaggttggccttgaactcctgggctcaagcaatcctcctacctcagtctcttgagtagctgggactataggcatgtgctaccacagccagctttattatagtacttttgtaccctgcatcaatgctgcttctgttgatacttttcaaaggagatatcaacttctggtcttcaacagtagtgtagcatcctcttattgattctctggctcatatttcactaccgtatagtatggagtttctttcttggagtttgaattgtttttacattgcagcttgttatagtgaaacaattaaacatatttaaaagtaaaagatatttacgactgatttttaaagaacctgtaaaaaaatctccaacagaagaatattatatggggatgtgtagatttaacattttattttctttaatttttttttttttttttttgagattggggttgggggttgtctctctatgttgcccaggttggagtgcagtagtggcgtgatcacggctcactgcagccttgaactccctggttcaagccattctcccgccttagcctctggagtatctgggattatgggtgcatgccaccatgcgtggctaattattttttaatatttgtagagatgagaccttggtatgttgcccaggtttgtcttgaactcctggggtcaagtggtcctcacaccttggcctcctaaaatgctgggattacaggcgtgagtcactgtacccggctcctttattttattaaaaagatttttgtttgtttgtttgtttctaagtttaaaagagacagggtcttgccatgttgcccaggctggtcttgaactcctgacctcaagtgatcatcccaccttggcctcccacaggcgtgagctaccatgcttggttgtaagatttttaaaaaatggattagtttcaaatctcaacttctctttctttcaacattctaatctcctggcattttttcctttccccagctaccccccatcatccaacagtcttccatttggaataatgggaaatcaaaccaataaagttaatcttacctcccaccaggcaaaggtttttcttaatctctacaatattctgaacataaaacccatataaactttatatgatactacacattttccttttaacagaggaagagcaaatgggacctatggaattatgccgtatttgtcaatataagggttacttttgtactcttactgaaagcagagttatagggctaatttcatttaaattttcttacccatctactttaaaaaaatacctctttgtggtagtcttttttttggtcagaaaatgacaatgtgaaggagaaataygttttgaatttataaatcttcttttaattaacaaattataccaatataagggtagtgttaatgtggttcaaatttgcctttgctattctgccttttcttctatagtgattgtatagttatactataacttcttcatcgaagcactggaataaaagaaaaacttttaaagatcactacgaaatgctcactgtatttgttgtattttataacttgggtttttaaaatttatttttccataaactgaataaatatgaaaacgaacttgaaagatcttgtcacagccttgatgactggtcagtataaagttcacattataaaataataaaacattgataataatcttagatgaaaatggaaaattaagctaatgtttattttagaacctgagtaatgagtttatatcatgtagcaatgaggcacatgaagacggttagaattagtttttctaatgaataaacttcatgatataaacttgaaagtgcataaatgctataactttctgattgtaaacttgaacaaaagtaaaatgaaaatgggagagtcctcttaattacctttaacgtataactaaaatgaacctgtgtatctgtctaagtcttatttgatcaagactttcaatggacaatgaatgagttttaagtttttatcaatgttgtgactgatttttctataatatcccttaaatgagatatcaaattctaataatatctagaaccagattaaatttggttagagtataaacaatatttacaaaccatcaaaactataataaaagcattgtaatgttatttaatgacttaagccaacattccataagctaatctaagcatttttacaattaatacaattgatagtaatatcttaattagtggyaaagtggacagatataatttatagattctgtattgtctgggaccttggggcagtcagtgaagagagggagatagagagaggagcatactggttgatgagcttgccttatttggagatgaaggagatttattcagtttttctctttccctctacttacttctccttgtttgtcatcctcttctagcaatggtaagaaatgcgggaattgaccatctttacagtatacttttttccttagagttcatagaacatttccaggtaaaacattagcttttatgttataataggtttattataatgatatcatttccttttgaggtggtaggcaagagactagaagaacttcatttgtatagcatttaatattatttattaaaaatgattttataggccgggcgcggtggctcatgcctgtaatcccagcactttgggaggccgaggcaggtggatcacctgaggtcaggagttggagaccagcctgaccaacatggagaaacctcatctttactaaaaatacaaaattagtcgggcatggtggcacatgcctgtaatcgtagctacttgggaggctgaggcaggagaatcacttgaacccgggaggctgaggcaggagaatcacttgaacccaggaggcggaggttgcagtgagccgagatcttgccattgcactccagcctggacaacaagagtgaaactctgtctcaaaaaacaaaacaaaacaaaaaaacaaaaacaaattctaaccttcatgtgcctcattactgtaatgtaaaaaaaaaaactatgttcattgaagagaactaacatattaaactaaaaatgaagcacagtgttctccactcatgggagtactgttagcaggtttaagacagttactgtgagaagttcacaaggtgaaagtgtctttgataattagggcctaatcaattgggatttgacttactcaatttctccaacacatggaattgtactggtacctgaaggagaaaaatatataatagaagttgtattagtttttatgtcttgagctctctgaataactacttgattcattcagttgccaaatgtcaaaagattgtaattttgagaaagttgattctttacaattagaactaagccagggtaaacaatttgctttctttttctaagttttaggtttttctttctctcttaggaagtttagtgaaactctaggggttaggcaggttgtaactgaaattcttgaggccaaaaggtcctgtcttatgcttggtaaaccgaccccctcaacagcgtgagaaatgtagatgtactgataaccctgattgcttcgtgacataattacagacatccagccctctatcaactaaaattccgtttatttttaaggttcaaatattagaagtatctgcttgatacatctcataggttgtcaagtgtgcatacgatgagagatataatgttacttttaatttgtaagtaaacaaacacacaatattatgttctcaatgctgagtaagctgaaaagatgtatacctactgaggatgcaccaaataataagcaacagaaacctggtaatgtgcaattaggaatagttcctcttaataataataaaaaaaagattagtgtttaggttttaatggcataaagatgtaatgaaaataaaattaccaaagaagtctattttggagaaatttttgtcagactagataacaaagaaaagaacacatcctttttttatttttattttttattttattttagagatgaggtcttgctctgttgcccaggctggtgttgaattcctaggctcaagtggtcctcctcccttggcctcccaaaatgctgggattacaggtgtgagccaccaaacttggccagaacacatcctctatatgactgtctacagaggcttagagtagtacagaagtacctgaaaggaaataatgataaataatgaaaatgttttaatagggatcatgtgttcatttctacatgtatatcagtatagtacctatcgtttgctgtttctgcttgtaaatgcacggttggaaaataagatacccaacctttggaaattattcagggaagtgcatctaaagtttagagaaaagttggtttcttcatattttaatgacacttttcagcacgtatagttcacccttgaacagcactgggtttggggcacagacccccatcaagatgaaaatccacatgtaacttttatctcctcaaaaacttaattactaataaactactgttgacttccagccttaccgatgacatagtcaactaacacattgtaccttatatgtattatatactgtgttctcaaagtaagctagagaaaagaaaatgttattaagaaaatcataggccgggcgccgtggctcacgcctgtaatcccagcactttgggaggccaaggtgggcggatcttgaggtcaagagatcgagaccatcctggccaacatggtgaaactccatctctactaaaaatacaaaaattagctgggcgtggttgcatgtgcctgtagtctcagctattcaggaggctgaggcaggagaattgcttgaacctagaaggtggaggttgcagtgagccaaggttgtgtcactgccctccagcctggcgacagagcgggactccatctcaggaaaaaaaaaaaaaaaaaaaaatcataaggaagagagaatatatttactcttcattaagtggaagtggatcatcacaaaggcctttatcctcattgtctccacattgagtaggctgagaggagaaggaagcggaggaattcgtcttgttggtctcagcatggtagaggtggaagggggaaggggaggcgtgagaggcaggcacacatggtgtaactttatggcaatacgtcatacttctgccttttttgctttttcatttctctgaaaacatttccatatggtaccaatccttcttccaccgtttgctttagtttcagtgcccatatcagagaagggtccatgtcatgaaggagtcaaaagcagtcttgaacaatcagacagtcttctgccatatcgtctgatgtcattttgttttcttgcattccttctacattacctggtactggattggaagcacttaccgagtcatctttttaaattcctcttgtgtgatgtctatttcttgaatttctccaagatttgtatcttgaaaccctttaacccaccccccccccttttttttttttttgccatatccacagtctttttcgtgatttccttgattggccctgtggcaaatcctgtgaagtcatgcacaacatctggacacagtcttctccagcaggaatttattgtttcaggcttgatggctttcatggctttttccataacaacgacggcttcttcagtggtgtaatccttccagactttcaggatggtttctttattggcattctctttcatagagttgacagtactttctgtagtgtactgtgtccagtgatcctcgtgaccccctgatttagaagctgaattagagacattttgtttgggggcaagtagactacttcagcacctttggtgttgaactcatggggttccgggtggccaggggtattgttcaataataaaagaacttacaggcaaaatacttcctgacttcagggacaaagcatcaatggaaccaatccagaaaaagggttctcattgcccaggctttttttgttctatgaccaaaagactgggagctggtgtttatcttttcccttcaaggcttgggggtttgtagcattatagataagggcagttctgatcataaaccacactgcattttcaccaaacagtagagttagcccatcccttcctgcctttaatcctggtgctttttctcttccttactaatgaatgttttttatggcattgttttccagaatagggcacttttgtctatattaaaaacttgtttaggcggatattctttctccatatttcttttttttttaagagatagggtcttgctcaattgcccaggctgacatgcaaatggcatgatcatagctcaccgcagtctcaaactcctggacttaggcagtcctcctgcctcagcctcccgaatagctgggatgcaagtgtgcaccactatgcctggctaatttttaaatattttttatttttttgtagagacagggtctcactgtgttgcccagtctggtcttaaactcctggccttaggtgatcctcccacctgggccttccagagtgctggggttacaggtgtgagccattatgccttcccccagctaattaaaaaaatgttttttgtagaggcagggtctcgctgtattgcccaggcccaggctgatcttgaactcctggcctcaaacgatcctcctgcctcatcttcccaaagtgctgggattacagggatgagccactgcacctggcctcctcagtgattttctttctttctttcttttttttttttttttttcgagactgagtctcgctttgtcacccaggctggagtgcagtggcgcgatctcggctcactgcaacctccgccttccgagttcaagtgattcttctgcctcagcctcctgagtagctgggactacaggtgtacaccaccacgcctggctaatttttgtattttttgtagagacggggtttcaccatatcggccaggctggtctcgaactcctgaccttgtgatctgcccacctcggcctcccaaagtgaatgattttctttcttttttttttttttttgagatggagtctggctctgtcggccaggctggagtgcagtggcgcaatctctgctcactgccagctccgcctcccaggttcacgccattctcctgcctcagccccctgaatagctgggactacaggcacccaccactacgccaggctaattttttgtatttttagtagagactggggtttcacagtgttagtcaggatggtcttgatctcctgacctcgtgatccgcctgcctcggcctcccaaagtgctgggattacaggcgtgagccaccgcgcccggcctaagtgaatgattttcttaatgtcatctggaaagtcgtctgctgcctcttggttggcagaagctgcttctcctgttatcgtgacgtttttaaagccaaaactctttctaaaattatcaagccatccgtggctggcattatattcttcagctttagatccttcgccttccatttgttttaagttgtataatgactttgctttttcttgaaacttattaaagtttatagggatgcctttctttatagcaatcctgtacccctataaaagctacattttcaacatgagataaaaaactatttcacaaaacgtgcacaatttttgcacctgctggtgtgccttcagcaatggcttcatgaattctttttttacartggcccttatgctggattcatttattttgaagtagcacgcaactgcagctgcagacctcaatctacagtacgtatcaagcaattcacctttttcttgtaatgccatgatttttctctgcttcttgggagcacttccggcatcactagtggcacttaggtgtcatttgaggtttatagtatcgtactaaacataatgaaaccgcgagagatcactttttactggaatatacaatttattggaaagatgaactgcttgcttggagatgattaatgtcacatggtactttaagcaaatattcactcttgagctcacctcattaacaacaggaggtggctacaaaattatttcaatagtacagggtgtagtacagttaaatttatgtagttaygatttaatactgcatctttactcttttgagacagggtttctctcagtgtcaaatgccaccatgtgtggctaagtgtgtggtataagttgtgacaatttttaactttttataatagatttgtatatatttgtagtagtaaatgataaaatagactagtatctacatatattttaagcactcatgacatacctcttactttctrtttttcttttcttttcttttttttttttttttttgatgaagtctcattctgtcacccaggctggaatgcagtggcacgatctcggctcactgcaacgtccacctctggtgttcaggtgattctcctacctcagcctcccgtctttttctttttttgacccagggtctcactctgtcactcaggctggaatgtcatgattcaatcatagctcactgcaacctctgccttctgactcaagcgattctcccatttcagcctcccaagtagctgggactgcaggtgcatgctaccatgcctggctcatttttgtgttttttgtagagacagggttttgccatgttgcccttgtccagggtggttttgaactccagtgctcatgatcctcctgccttgacctcccaaagtgctgggattacaggtgtgagccactgcacatggcctacttttttgatatttctaggttatatggttgtctatgaatattttcaaattgtcacaaacctcccccaaatttatcaacatatttattgaaaaacattagcatatgagtggaccctcaaaattcaaacctgtgttgttcaagttttaagccctgagagctctaagagtttaaagctaaaaacaattagaaaaaaaatggagtttctttttttttttttgagacggagtttcactcttgttgcccaggctggagtgcaatggcacgaactcggctcaccacaacctccacctcctgggttcaagcgattctcctgcctcagcctcccaagtagctgggattacaggcatgcaccaccacacccagctaatttttttgtatttttagtagagacagggtttctccatgttagtcaggctagtctagaactcacgaccttaggtgatccacccgcctcggcctcccaaagtgctgggattacaggtatgagtcaccatgcctggccgttttttttttttttttttttaaacatgaaatgttctttttccccctggttttattgaggtataattggcaaataaaaattgtatatatttaaggtgtacaacttgatgttttggtatatgtgtagattgtgaaatgtttaccacaatcatgctaattaacacatccgtcacctcacatagttatttttgtgtgtttgtgtggtgagaacatttaaaatctcctttctggctgggagcagtggctcatgcctgtaatcccaacactttgggaggttgaggcaggcggatcatgaggtcaggagtttgagaccagcctggccaacataatgaaaccccatctctattaagaatacaaaaaattagctgggtgtggtggcgggcccctgtaatcctaggtatttgggagtctgaggcaggagaattgcttgaacctgaaagacggaggttgcagtgagctgagatcacgccactgcactccagcctgggtgacagtgcaagactctgtctcaaaaaaaaaaaaaatctactttcttagcasatttagtgtgtacaataaatattattaactgtggtcaccatgctgtacgttagatctctcgaacttactcatcctgaataaccctttggccaacatctccccatttcctcctcaccccagcccttggcaaccaccattctgttctctgcttctatgagttcaccttttttagattccatatataagtaagatcatgtagtacgtgtatttgtctttttctgccagtcctattttacttagcctaatgtccttcgggttcatccatgttatttgcagataacagtgtaaaggggaggcaaactttacctccacctttttaaagttttttttttttttttgcttggcctcacaaattaccataagatagattatcaggagaaaagcacacaaatttattcaatacaagttttatgtggcacaggagccctcataaggaaacagacccaaagatacagttagaattgaatacttacatactgaattggacaaaggataataacttgtgaaaaataaactggattatatggggaggcttaaaggatagaagttattttaacaaagtctgtatggaattctctttgtctccatatcccgtccttgatgataaaaatgttgctttccttttagtttaaggaggacatcattcacatgggaatttcatctgcttttaagaaatagaagaaaggtcagagcgctcttcttacacctgctgtttttcaagtgcctttgactcaaaatagtcaatatgtcagaatggcgtatttaaactccaacaggattgtcttactttttaaaagctgaatatgaatcctgtgtgtgtgagcatgcacacacacatgcacacataacacattttctttctttttttttgagacggagtctctctttgtcgcccaggctggagtgcagtggtgtgatcttggctcactgtaagctctgcctcccgggttcaggccattctcttgcctcagcctccctagtagctgggactacaggtgcccgctaccatgcccggctaattttgtttttgtatttttagtagaaacagggtttcaccatgttagccaggatgatctcaatctcctgacctcgtgatccgcccgccttggcctcctgaagtgctgggattacaggcgtgaaccaccgcgcctggcctacataacacattttctttacccgtttatccattggtggacgcttacgttgactccatatcttagctatatgaataatgctttcatgaacattggagtgcmgatacctccttgacatactgatttcatttcctttggatgtatacccataagtggaattggtggagcatatggtagttctatttttaatattttgaggaacctccacactgttcttttataatggctgtctcaatttacattcccaccaacagtgtacaagattcccttttctccacatcctcatcttttgtctttatgtgaatagccattctaacaggcgtgaggtgatacagaattgtggttttgatttgcatttttgtgatggttcatcagtattttttcatataccaattggccatttatatgtcttcttttgagaaatgtctatttaggtctgtagcccattttttaattgcattatttgttttcttgctattgagttgagttccttatataccgaattccttcttagtaattttaaaaatagcattattaaggtataatttatataccataacattcatagttcaagttctagtaaatttatatagttgtgcaacaattatcacaatccagttttagaaaactttcatcttccaaaaaacccattcttgtccatttgcagtcactccctgtgcctatccccagctccaggcaaccactgatctgctttttgtctccatggttttgccatttcttgatttttaatattaatggaatcatacaatagtgtagtcttttgtgtactcctcctttcatttagcatgattctgtttagtaatgggaatgaatggataaagtacaaaagctttgaacttggaatcaggagacttggatactagtagtgtgtgccaccaaatatataaacatggttaaccacttgtcccctctcggcctctgctttttcttccataaaatgaattattttgactttcttatatcccacttttcacagctgggtagacattcactgaccttttcttaaaaggtacattaactcttcctcttaaatgtagccactgtgtgtgtgtgtgtctttttctggatcaaaaaaatgaggcttatgtcagctatggtctgaatgtctcttcagaattcttacgttgagacctaaccttcactttgatggttttaagaggtggggcctttgggaggtacctacgwcatgagcgcagagctctcaggaatgggattagtgtctttactattaaagaggcctgagggagcttgaacccccactttctgccatcaccagacaccaaaccttgatcttgcacttcctagcctccagaactgtaagcaataaatttctgtcatttataagttacccagtctaaggtattttgttatagcaccccaaacggactaagacatggtctaatggatgattcagcaatgaacaaatttggaattgtctggaagaatcaagatgggtgattaaacattttcttgggcatttcttagttcacacatacaactctgaggatggggataatcttaaatgctgagttaataaagatttttgacgagaacaaagccatagttgaataattctgtgaggtagagcttcaaaagtgattgaaacttgttatgaagagaagtacaagactatatgctgttttagttttttgttttgggagtagaaagtgggttggaacaatttcagtgaagtttgtgccaagctgcactcaaggtagtcaagtggggttagatagtttttcaagaagaacgaaggaaagtgcatgactatcattgggaaggttgtcctagaggcaaagctgacagktaacattcaggttataaactaggaaaacaatacatgtatgggggatttaaaaaayagtgtacatgtgtatatgtgtgtgtttgtaacaggagtagacaattgactgagtaggctggtgtcaggtatatgctaaaagagtaatgttcattttcagtatagtataaaaaaagagaattgaatcacagctgcctaaatttaaaaatcagtgttgtaactgctttcaaataatcaataatttgacttttagaaaccttcagggcttgttattttacctacagtagtaggaagtatggctattaaatgattgaactttatttttacccaacatactagagcatatgagtgataacccacagagcagacactggaggaggggaatgtagctataaatgtattttaatgatggtgtcattacagcggcgtaagaaaatttgtttcatgttttagagtcacactttttgttcaaaagtagcatttccaatgtaggtaaaccactttttgataacaaatatctccaaatcaaaactatgtttattttatgaagatttgtcactctgacaatattataaacattatattaagactttaaagcaggccaggcatggtgcctcatgccygtaatcacagcattttggaggctgagatgggaggattgcttgagcccaggaatttgagatcagcctgggcaacatggtgataccccatctttacaaataattaaaaaatcagccgggtgtggtggtgtgtgcctgtaggcccagccatttgtgaggctgagttgggaggatcacttgagcacgggaggtcaaggctgccggtaagctgagattgtaccactgcgctccagcctggatagtagagtgagactgtctcaaaaaaaaaaaaaaaaaaagacttacaagagactttaaagcagctacaaaagttgaatcccaaagctttttatgaaatgtcagtgtcagcgttatggaaataaatgtagaactctctgaggtgactgttcttattgcaagaatctttttttgtttttgttttttttktgagacagggtatcactctgttgcccaggctgtagtgctgtagtgctttcatggcttactgcagcctcgacccctggggcagaatctatcctcccagctcagcctcctgagtagctgggactgtagacacataccaccacgcccagctaatttttttttktttttgatattttttgtagagacagggtttctctgtgttgcccaggctggtctcgaactctgagctcaagcgacctgcccacctcggccacccaaaatgttgggattacaggggtaagccattgcaccagccaagaatgttcttttgaaaatgtgttatgccatatttattttaaaagtcccactgaatttttaatacatataaaatactgaaatatgagttgtgtaattggaaaaatgtcaatgtaaatgaaaagagacactttttctgttctgaagcttcaaaatattaaagatcatcgttcatattttcctggggaatttttatttttagtcataatagtaaatgagcagccgtcagaagatatagccatttctaggtttagaattccttttctttatatagttctcttgaatacttgtctttaagaaaatagacattaaggatttcttgwgtaatcaaatactactttgatatttgtacagagcatgagagcaagactagaaccacattaaagcaggaagaataattaaaagttttgtaacatagcaaagaatagatggggtaatttacaatggaaaagtagacgtacagaacatcattagatgggatatagaaagctctctttaaaaaagggatatcagatcaaatagactgaagaatttgtatcctacaagttaagtaaaaaatgagatgagcaattaatgagaaaatgtgctctaaaatacttggttgcattgattggcaattcttttccacttcctataggggctatttcagaccttttctactaattttttttttttttttttttttgagacagagtttcactcttgctgcccaggctggagtgcagtggcgcgatctcggctcactgcaacctcctgctcccgggttcaaatgattctcctgcctcagcctccggagtagctgggattacaggcatgcgccactatacccggctaatttttttttttttttttttaagtagagacaaggtttctccatgttggtcaggctggtctcaaactcccaacctcaggtgatccacccccctcggcctcccaaagtgtgggattacaggtgtgagccactgcgccggcctttttttttttttttttctctcaaatgagacagggtcatgctctgttgcccagactaaggggagtggcgcaatcccagctcactgcagcctcaacctcctgggctcaggtgatcctcctgccttagcctctggagtagctgggactacaggcatgcgtcaccatacccggcttttttttggtattttttttgtagaggctgggttttgccacattgcctgggctggtcttgaacacctggcctcaagtgatttgcctgcctcagcctcttaaagtgttgggattacaggcgtgagccaccactctacttcttcctagggcctgattccagtgtactgctcttagactttgtaggttcacttttttttttttttaatgtaagatcaagactatccaacagaagcttcttcagctttgcttttctctctctctaaattgtgtaagttctgtctcccatttggtgtcagggatatgcaatatgccctttaggttttcatggctacctcttttatcccttctactgttagaatgtataggatcattaattaactcttttatcatttttattttaatcttccctagcaacaatttaatggcttaaacaaaaacctttccttattattattatttttaaatactgtgcaacaggccaaaggaaaaaaaacaatttatgtctgttgtttcaatttggttaccttattttttactaaaactgttctttctgttgttaccagtgaccttctgaattgccaaatggggattcttcagtcttgttgcttcagatttaacactgtgaaccacttttcctcctcccttctccttataactttgctgtcctcttggctcatttacaaagtcaacttgtttctcaagtatttgccttacatgtttttcattctctagattctttttcttgaaatgttacctattcttttggctttagtgagaatctcttccaggtgacccctatactgtaagttcctgaacgtcagtttccagctggagattgtcatctaattgtcatgctgtcatgcttaacccactcaaatttgaattttcttttcttttaaaatgtattttttctactttcctttttttttttttaaattattggcttttccttcccattatccaaacttgaattgtgaatcatctttgtattccccgtcagattcattcgcttgtcaaactatcagaggcctgtgaaccagagcaattgcatcttaaacaggagttgggtaaaatgaggctaaaacctactgggctgcattcccagacagttaagacattctaagtcacaggatgagataggaggtcggcacaaaatacaggtcataaagaccttgctaataaaacaggttgcmgttaaggagccagccaaaacccaccaaaaccaaaatggcaatgagagtgacctctggtcatcctcactrctacacttccattagcaccgctctatgacagcttacaaatgccatggcaatgtcaggaagttaccctgtatggtctaaaaatgggagacataaataatccaccccttatttaccgtatcatcaagaaatagccataaaaataggcaaccaacagcccccgagactgctctgcccatggagtagccattcttttatgcctttactttaataaacttgctttcactttgcactgtggactcgccctgaattctttcttgtgtgaaatccaaaaaccctctcttgggatctggattaggacccctttcctgtaacatgtttctctgtcctgtaacctatttctggcaaccacrgaagagactatagtgcagaaaccctgacccaacggctacctttgggtaagtgttgggatcctgtaacaaaactgcgaattctatcactacagtgtttatctcattcatctgcttttttctgtttcatttttttttgataacagtttaggttctcattaccactaacatataaatatataattataattcagtaattgctatgatgaagggtgaggtggcagaggaagttctagtaggatatggtacatagtgatgattagcttagcatcaaaaacaagtaggggcattccaggaagacaaactgaagaaaggcttattaggagtgtgctatgtgtttgttgtcaacttgtgagacttcttctttaatccttactgcagttgtgtgcttttcgtatttgcatatgctattgcctttcttcagatattgattaaaatttgtgaaagagcatgcaatggcagaatgacacaaagtaacatacatctttattacctagctttaagtgagtagagtggtaaaatgtaaggtaatgaaaagtgagtactgcctgcactgaagatttaaaacctgatataatttgcattaaaagctgtcttgaaggtttttcactatttgtaatgtaaatcttcactaggcagctgttctcagtctactgttgttatatgtggctttatcttttatttctacctctcttctgtctcttctcttctctctctctctctctctctctctcgctgtgttgcccaggttggaacacagtggctattcacagatgtgatcatagagcactgcaacctgaaactcctggcctcaagccgtcctcctgcttcagcctcctcagtagctagggctaaaaatgtgtgccaccaggctcagctatttctacctctttcaaatgtgtgtgattgccctacagtggggttgggtaatatcttgatattagtagccactaatactgaaaataactgaaggccacagcaagtaaagagagaatttactatttttgtttccttagagaagccaaatattttgtgattttaaaatgggaagcattaaaaacaacaattctaaaatgccttatacagaaaggtgatttattggctatgtaaataggaagaatagagatggagaagtccaggaacaaccagatccaggaacttagatgctgtcttcagagtattctagcttcattttattttttctcctgttggcctcattttctgcttatgttagaaagcttctttcatggcaaggatgcatggcctcagacagctgagaacttagttccctaggatggcctctgacaggcttatctctgggctaatcactgtggggaattgtcgttgacattaacatcagaaccacacaaatcgggggtagtgtcagttccccagaggatagatgttgttaaccagagaaatagggaaaaggaatttgaagtagcaaaaacaatgtaaagccatttcagaggcagaagaaagaaaaggcaatagtagacacagtgaaagagaaatacttacataggagagagaagcagggaaagggaagggaactagaatttaagaattcaaaactaagaatttactgtgtggtaagcctgtgttaagcgttttacattttatctttacagctcagtggaggcagctgtattatctccagaggataaccatttgtagatctggtagtgaaaagcccccccaccttttttttcttttatcccaatttggcatatttcctttattttttatacaacttttttcatttttaaattatgcattaatacattaaaatccacactgcratacacagttctatggattttggcaaatgcatataatatgtatctaccctcataatcaagacacagaactcctgctgcccatttgtagttaacctctccccctaagttcatcgccctggaaaacactgatctattctctatggctaccattttacttttccgaatgtcatacacagttgtcactccttatctgagggaaattagttccaaaaccccttcagatactaaaattcacagatgctcaggtcccttatgtaaaatgacctagtgtttacatatacacacacatcctcctggtactccagtcatcgctaaatataatatacaatgtaaatactatatacatcgttgttatgttgtttatatgtattatttttgttgtattttttttactataatattttctatccatattggttgaattctcagatatggaactagtggatatggagggccaactgtaagtgacattgtagttatatagacttttggatcagcctcttttacttagaaaattcattgagattcatttatgttgcgtgtatcaatagttcgttcctttacattgctgagtagtaatctgtggtatgaatgtaccatggttagtttatccatttgtctgttgaaagacgtttagcttattgctggtttttggcaattatgaataaaactgctatagacattcatgtatagctttgtgtgtgatcataagttttcatttcacttgggtaaatacctaggagcagattgctggatgatatggtaagcatatgtgtaattttgtatgaaactgccaaattgttttccaaagtggttgtaccattttgcatttccaccaacgatgtttgagagttccagttgctctacatccttactagcacttggtagtatctgttcctttttctttcttttttttttttttaattttagctcttataataggtgtatagttgtatatcatgtggttttagtttgcattttcttacaattgacttttggtgtatttttattttcgtgtgctttaagatatcttcccttttttttttttttttttctttaaaagacagagtcttgccgtgttacccagactggagtgcagtggtgtgatcatcactcactgtagcctcagacgactctgaactcaagcagttcttctacctcagtctcccgagaagctgggaccacaggtgtgtgccaccatgtctggctagtttttaatttttttgtagagacaaggtctcactgtgttgcccaggctgtaaaatatctttcttgagctggtcctgatggcacaagtgtgtaatcccagctactcaggaggctgaggcaggagaatcgcttgagcccagaagtttgagatcaccctgggcaacatagcaagaccctgtctcaaaacaacaacaacaaaaacttttctttaacattccgagaatgcttattggctttaaaaaacaatgatagtggccaggcacagtggctcacacgtgtaatcccagcactttgggaggctgaggcaggcagatcacgaggtcaggagatcgagaccatcctggctaacatggtgaaaccctgtctctactaaaaatacaaaaaattagccaggtgtggtggtgggcgcctgtagtccagctactggggaggctgaggcaggagaatggtgtgaacctgggaggtggagctggcagtgagccaagatcgtgccactgcactccagcctgggcgacagagcgagactccctctcaaaaaaaaaaaaaaaagtttttttccaaaatagaatagtaaatggccctgacaaggtctttgacaagcattggggttgcacactcaactgtaycacacaattccaggggacatcattcacataaaatttttttttcttttttcctactggagttgtgcagtgtagcagtctgggctatatatttacagttattatctaggattatcagtgattaggttccatggaaaatttgagtactaccaaatgatgcatttaaaaagcatttttcaatgtttctctgaaatgaaatttttgtccaggagctagttctgaagaaatgccctacaggcagtatgtctaatggatcagacctgggagacataaaggcctatttcaggtactcaactctgccatttactgcatgagtgaccttgggcatcttgtctagcttctttgagttcattctttatcagcaaaacaggattgataatctctcctttttatagatgtgacaagaattataaataatgcatgtaaaatatctgatgtagagcagacctcttcaagttgcaactgcttttacttctgtttattagcacttagtactgattagccacagctttttatcaaacaaaagcttagggtatcagcaaagcagaaagaaaagaatttgaaaaacaattgaaagcatttactacctaacatttaaaaaaatactgaagtagaattaggaaagaaataagaatttattggattaaatgttagctgtttagtattgtttttattttgtatttaatagggagagaatagagggctatactattatattttctgtacttgggacctccaaaggtcttaatttggtcttatcaccactaacaccaccactgccatctccatgtcatgcttrtgttaaagaaagactttgaaatacgtcacctaatgtttagggtcgtagaaatgcaatttactgttttgggactagagtacatgaattcatattacttgacatcattagttcttcccagtaaaatgagaatatttgaggtcccagagtattttataaggttttaaaaacttcataatttcttaatgtttttttgttattacccatagtgattacaataaaatccttaaaacagcaaggaaggagaaccaaggagattagatgtgctttatggatgcaaggagagaggtttagcaagcaatggagtagggagtaaagaagaggagtttagcctgagtttctggatctaggaagtaatgtagaagtcttaactgtagaagagtctttatagtgatagtgattttttttctttgattttaaattatttctgctttggtgttttctgtttgttggacatgttggtttcatacctctgtatagtaaagaggttttaaaactttgacccaaactattttggctcacacttttacttctcatatgggcttttataataatatggagagaggggataagaagttgtctaaagtaaaatcaaaagttgtttgtccatttcctctctcaagtaagaatatatcaagaatatttcagtctagccattttgtagcttgagattagagaaggaaagtttacattcacatgttaccttcatctgcctttcttgtctttgacctgttacaacagaaattaggcagttttttttttcccctcacatattcattctctgcttctctcaagttaatgaaacctagatagagggcccaattgccacttgctgaaagaacaaatttctgaagttctcttgtagcaagttactaccttgtgactaaattctggtcagttagatgtcagtagaagtatttggtatttcccagaagtctatttaaaggaagagctttaccattctttatcattttttccagctgccaacttagatcatgaggataggggctatacttgtaaggatggtagaatggagagctggaaagaccctgtatatttatgtcatggtagagcagctctggagtattatcagattattttatgtgagagagaaataaacttctgttttgtttatgccatagttattttggattttcttattatgcattgctgaacccacgatccttcacacctccatctaaggcatcttcccttctgcttcctgttctgtggttgaactcttggtgctgtttcatctctccactgctaagtccctgaattctcttgctctccacattttctataatgattgttcacaggcacagtgttgcagttagaagctgctatgcattgctagttatgtagcacctgaaattttaattttttaaaaagaaactttaacaggaatatgaaggaatgtgtaagcacagttacacatattttatttcctaatgaaaaatataatttctaaagaacgatgtgtccattaagtctcccctgccctccaattttagttgatacagattggtttggctaattggctgccagcagttcctctagagaatatgtctagatcactaacagacccctttttacttgcctcttttggaaaactcatcctatccctaccctagtaacatgatccaaatggaagcttgttactgtcacagttattggttcaaggatggatatgtaagcaaaaataccagctctgtcctgggtttttagaactgcatctagcagaaaggagatcctctctacttttgaggctataaggatgtggacaaactggtttaggaggatcatagtaataatactcagaacagaagtagagatggagggaaacaagtcagtcttcctcagagaatggacatgtacctcatataggctaattagaatattttgtttagtaacttgataatttcaagtcagactctgttgggcacttgaactggagggtcatgtgaaggacagaagtttctttaaagccatactcctaaatgtaaataaatatatttaaaaaattttaaagggtgatagaaactatttcctttcttactttgaagggggttcctagctggtacataattcatactgtctcagttattcaaacaaattactcatttaataaagcgtttcatggagaggaaaagaaactacaagttttttctctatggatgtggagtacttttaaaggaaaataaatgctcccttaaacaccaatagcaacaataaaatatgcacaaaagcctcctagtgttgagaaaccatcacgtaagtgctgagcactctagttctgctcgtggatctctttacaaatagaaaattatcttatctcttatgtttgttaaagcattatttgccatagctaagatatagaatcaacctaagtgttcatcaacacatgaatggataaagaaaakgtgtgtgtgtgtgtgtagtatatatatatatatatatatatatatatatatatatatatatatgtacacacacacagtggaatactgttcagcttttcaggagaaggaagtcttgatatttataagaacatggaagaacttggaggacattatgctaagtgaaataagccagacacagaaagacaaatactgcgtggtctcacttatatgtagaatctaacaaagttagactcatagaagcagagaatataatggtgattaccaggagctgtcagctggggagaaatggggagatgtggttaaagtgtacaaagtttcaggtatttagaggaataaattctggagatccagtgtacagcatggttgactgtagttaataataaagtgttgtatacttgaaaattgcttagaaagtagttttttttttttttaaattgaaatgggatctcactgtgttgcccaggcttatctagaattcctgggcacaagcaatcttcctgcctcagcctacttagtagctgggattacagacatatgccaccatgcccagctagagagtagattttaagtgtccttactattaaaacaaaaaaagcttggatatatgagataataggtatgttaattagcttgatttaatcattccacagcgtacacatatatgaaaacatccagttgtacacaatacatatgtgtaacttctatttgccaattaaaatgaagtttaaacattgtatccatctggagttcctcttgtgggaaaatgacttctttggccacctaaggtctttttttttaaactcttaaatttgagacatctatagttggtataattggtaagtcacaagtattagtgagaattttatttgggtccatgaagaaccaatacaggcaataaaacacaccaagaattagggaaaagctaaagcatagtccaattatctcaattattgtaaatgagaagtacccttcacctaaatgaggctgagtagaaacttccttacctctgcaacaatttataactgtggaattagaatttagattcaagctagcaaaactagagctacattttatactcaaaactatgtctgccacttaaaagaggaaaaaaaagaatgaatataagctggttatattgaagtatattttacacagattttttttagtagttaatttcttatttagataactaggaagggtaagtggaaagatacatatgtttttaaagaggggcaggtaacttttaattttctttgtaactttcagaatttctttccctacttgatatatggagacctactgtagaggatgtttgtggagttagaagagattagggttgttgaaatacagatgtcagtttaattgtaattcatagtattgaaccttagaatagtgaccattttctgttttcacaaattttagaaaagtatacatatatgttgataattattaaaaaatttgaaccaagctttcgttcacagtgagatttgtttagtaggtaaattattttatgtttaaaaatgagtacaggtctgggcatggtagtttacacctttaatcccagcactttgggaggccaaggcaggttgatcacctgaggttgggagttcaagaccagcctggccaccatggtgaaaccccatctctactaaaaacacacacacamaaaaaaaaattagccgggtgtggtggcacatgcctgtaatcccagctacttgggaggctgaagcataagaattgcctgaatccgggaggcagaggttgcagtaagctgagatcgtgccactgtactccagcctggtgacagagtgagattccatctcaaaaaaaaaaaaaaaaaaaaaatcagtttgtatttactcagattttttttttttaattatactttaagttctagggtacatgtgcacaacgcgcaggtttgttacatatgtatacatgtgccatgttggtgtgctacactcattaacttgtcatttacattaggtatatctcctaatgctatccctcctcctcccacaaccccacgacaggccccggtgtgtgatgttccccaccctgggtccagttgttctcattgttcagttcccacctatgtttactcagatttaatgggattttatctgggttttcaaagggctcccagatttaatctgggttttcagagggctccctagataattcttagatgcatccagattgagaagcatgaatccagagcaaaacagaaacagctaagggtggactttttttttttttttgaggctgagtcttgctctgttgccaggctggagtgcagtggcgcgatctcggctcactgcagtctccaccttccgggttcaagtgattctcctgcctcagcctcctgagtagctgggattacaagcatgtgccaccacacccagccaatttttgtattttgtatttttagtagagacatgtcggccaggatggtctcaatctcctgacctcatgatccgcctgcttcagcctcccaaagtgctgggattacaggagtgagccaccacgcctggccaagggtggacatttgagggcacaaacatttgaggtactgaccatcataaatacatacatacatacatacatacatacagtataggcccgctgtggtggctcgcacctgtaatcccaacacttggggaggccgaggcaggtggattacttgagcttaggagtttaagaccagcctgggcagcatggtgaaattctgtctttaccaaaaatacaaaaaattagctgggcatggtggtacttgcctgtgatcccagctacttgggacgctgagatgagaggattgcttgagcccaggaggcagagtttgcagtgagccaagttgggcctgggtgacagagtgagaccccatctcattaaaaaaaaaaaaaaaattaagaatacagtatagaggggcatcctacaaggaaaccttactcatgcaccataaaagtggtcatcagaaacagggaaatctataaaactgtcacagacaggaggaacttaaaactatgggctttagttaatatatcaatattcattaagtatagaaaatgtaccatactaatataagatgttaataatagggaaaaccggatagaggagtagtatatggaaacttactgtattatcttcagaatgtttctgcaaacctgaaactgttctaaaaaatgaagagttttggggtgggtgtggtggctcacgcctgtaatcccagcactttgggaggctgagatgggtggatcacgaggttaggagatcaagaccatcctggctaacgcggtgaaaccctgtctctactaaaaatacaaaaaattagccgggcatggtggtgctcacctgtggtcccagctacttgggaggctgaggcaggagaatgttgtgaaccctggaggtggagcttgcagtgagccgagactgcgccactgcactccagcctgggcaacagagcgagactccatctcaaaaaaaaaaaaaagagttttgaaaatcaaggctgggtgcagtggctcacacctatgatcccgcactttgggaggctgaggcaggaggattacttgaggccaggagtttgagaccagcctgggcaacatagcaagatcccatctctacagaaaatttaaaaattagctgggtgtggtggtgtgcgcttgtggtcccagctacttgggaaactaaagcaagaagactgcttgagcccaggaggttgaggctgcagtgagtcatgattgtgccactgctctccagcctaggcaacagagcaggacctctaataaaaaaaaaaaaaagacaccccaaaaagtagttgattttcaaaaatcatgagtaatataaactccttgagttcagagtcatttgacttaatattggtatgcttagggtttagcagagttaatacaaaataagctttaaagaagtgctaagtgacaatgttacatttatgttattttgtagaaatggcttttggaaagatgagaagtaacttgacaagctttttaatgttttcaataagtttttactaaaagtttataaaaaattttaatttagtaaaacaaattgaaaatatttgcataaactttctcttattgcttgagaggccactttgaaactcttaatgttgcacatggttctgaaaagacatcaagcttagtttagtttataaaagcatttcattaacagactgggtgctaaatagtaaacatagttctttgacaagtagagttaaatgtaatatttcttttaaaaaactgagtacataaacctatttatccagtaggaaatgcaagtagaaatcacgagataccattacttacctattagaaaagcaaaacaaaaacaaaccaacaaacctagacaatagcaagctgacagagatacagagcaactagaactctcctgccctgcagatggaaatacaaaaaagtatacagctacttcagagaacaatttggtggtttcttataaagttaccatatgagctggcagtcccacttctaagtatttacccaaggaaatgaaacatgttcctgcaaaaaccagtaatgctctgttcataattgcccaaaactggaaacaacccaaatggtaatgtacatatagacaaatattaatgtgtgaatggacaaactatggtacatcatacaatggatgatgtaccaattataaaaaggaatgaactgttgatacgtgtgttgtagcaatttggaggaatctcgaagacattatacttttttaaaaaagctagtctcctgattccatttacatgatattttcaaaaaaataaaactgtagtggtagagaatgtgtactggttatccagtgctatggtttgaatgtttttgtcccctctgaaaattcatgttgaaacttaatcaccaatgcaacagtgttgggaggggggcccaatggaaggtgtatgtattggttcatatgggggagccctcacaaatggattaatgttgttataaaaagggcttgcggccgggcatggtggctcacgcctgtaatcccagcactttgagaggccgaggcgggtggatcatgaggtcaggagttcaagatcaaccaggccaagatggtgaaaccctgtctgtactaaaaatacaaaaaaaattagatgggcgtggtggtgagcgcttgtaatcccagctactcgggaggctgaggcagagaattgcctaaacctgcgaggcagaggatgcagtgagccgagatcacgccactgcactacagcctgggagacagagcgaaactctgtctcataaataaataaaaggataaaaagggcttgctctcttctgcttttctgccaagtgaggatgtaacatttgtctcattttgtcctccacctttcaccatgagtgtttacagccagaaagatcctcaccagatgctggcgccttgatcttggacttaccagcctccagagctgtgagaaacaaatttctgttgtttataaattaccctctctcaggtattctgttatggcagcacaaaatggaccaggggttatggtgggggagggtgtgtgactatggagagacagcatgagggagtttttggggtgatagaactgttctgtatcctgagtatggatatacatgtgttgaaattcatagaactgtatactcctacttcctcccaaaagtctgttttactgtatgctaacttaagaaataaaatggaagacatacaaagaaactgaacatgtgtctactttataaggcatttggtctaactactggtcaaataaacttgtataaatactgtctaatgttttctctattagattttttttacgtctcaaggatttgtatgaaaagtgactgatgcacagaaaacctttattttttattttttaaaaagtagaaacagagtctcactatgttgcccaggctggtttgaactcctaggctcaggtgatccccctgccttggcctcccaaagtgttgggattacaggtgtgagcgactgtgcccagctagaaaacctttcatattaaaataattagcactataatcatgtgcaaagaattgggatggtcacctagtacagcttcacattttaaaataggtaacaactatcatttattgaaataatgctgttcattggttttataacccaagtgatactatatccttagacactgtaatactacgtatatatatatattttgaatttgatacgtcttttaagccttttaatctacagatcccccatctcatctgtctctttttcttacaagttagctattgaaccctgggctgtttgccttgtagagtttcccacagtttgcattctgctgattgcatactaatagtgcagtttaacactttcctctgttctctgtatgccctgtagattttcagctggattcagaggcttgatcctaattaggtgtgatccctttggcaaggcaataggaagtgtgtcatcagaaggcacttggctgtttggatgactctctttgtgacgttagcagccattgatactcactacttagatggattaattcattggaggttgcaaaatagtgatagtgatattctaaattatttctttttaatttattacttagcatacttccatagaatattttcttcatcactgtttggttattaaatagtataattcacaaggaaagccaggataaatacttgattctttatttttatttaccagttttcaagatactgaaattgttacatctaaacctgtgaagatgttttagggcttttttttttttttttttaacatgtttagattttcattcattgcaattaatatgcttaatgaagctcaaattgttgttacatctttgaccagtgggagcctgcccctcaccctctctctctttttttttttgtaaagatagggtctttctctgtttccctttcctttccttacttttcaggcagagttttgctatgttgcccaagctggacttgaactcctgtgctcaagcaatcctccagcctcagcttcctgagtaactgggactacaggcacgtaccaccacacccgactctgctattgtttctttaaataaacattctgcccctttgtctgtctcttctctctcttcagctcttataatctgaaaattttctctatgctatcctataaatgttgtaacctttctttattttcatgtttttcccttctgggtggtgaaatctggtctctactaaaaatacaaaaaattagcagggcatggtggtgcatgcctgtaatcctagctgcttaggaggctgaggcagaagtcgcttgctcctgggaggcagaggttgtagtgagctggatgtcccacactgcactacagcctaggtgacagtgaatgagactctctcaaaaaaaaaaaaaaaacccaaaagaaagtaaattttgtttgagtttgttactaaacttggtgaatataagctgcattttttagtttccagtaaatcaaggcgcagtgtaatcattgtacattttatgttgaagagttataggaaaatacctttattttataataatgaaggaaaaggactttttggattggaaaggaatgttttgacaaaagattaaattaaaagattaaaacaattttttcttctgaaaattttttttcttcaaccagacaagataccattttttcaaatacatacatttttttcaaatggtatcttgtctggttgaattactagaatgtttttggcgtgtttagtagcaagtggtaagttcaattgaaatacaagctgaaaaattctaatggcccctggaagatggcagtataggcttttcatctcagaattttagatctggaggagacctttaaaatttattccagttccttcattataggagaatatctagacatctagggataatgatatgttatttctgagatcacatagtaaatttctgtttagagctgggactagtactaaacctcttcgtttctgtttcgggattagtttctcaatgccagaatgtgtttcttgaaaggcacgataaccagctcctgggctcctcatatcctacctaaattagtgcaactaaggcagtgtgacatatttatattggtatttttataaaggcacagaaacagacatgatttattcagtatcacagggatagtgttaggtcataagacccctgacctgttgattctatctctttatcttacctagtaagagatagcttagagatagtagccaaaatatccaatggttatgaactatagattgggagctggaagtggagctggtactagaaaccataaaaacgccagatgatgtttgtggtatggtgaagagtgctgggatgatgcaggcagggggtgatgaaagctttggtcatgagtaagtgggtctagaacctatagaatgggggggcggaataaaggaggcaatggagccaccatcaaactcatgcttatcaggaggatcgtttgttctgttctcattccctatagcatattgctactttccagctaagatttagaataatcatagacaataataaaataaaatacatctgatatctgcacaatattttaagcacagtactcataaatattgtactrtttgatccttgcagtatccttgtgagataagtagaagggatattggtgagtagaaactattaaatataatatgtgttaaggtagtgtgctagaaatcactaagggatataaaggtgaataaccacaggctctgttctcatggtgtgcccaatcttttggggatggggtgggaaaaataaacagttacaatgtataggaagttgaaaaggatttagaaattcaagctgtgtcccatgggaatttagaaagagtgatggtattgtaacaggaattttggtattttgccttcttaattcagactaactgaaaggataatgactgtaaaagcatcttgactgtaatagatactgatacgattttcctttataattttcagattattttttattttaggtgattttacacagctatttatatgaatgaatttatgaattaaggatgacagraatcacttaaattgttttagtgatttttggcatattagtctggtttgagaaggagggagaaaacaagggaattgattttgtaatgtcaaacagaacttamaaattyaggacagatttacctagaccattatgaataaataaatagatccttttaattggtaagaaactagaccaaatttaatatagttgatttagtactagtttatgttgatgatgtagacaacttcaccaaaggaaggggagtagtgaataaattagttataacttattttactgtaaagtaatgttaattgttagaataattataggaaatatttgcttaccaataaatatgactttgacagtcttacaatgatgaattcgtttttgttgaaatagcagacaaaacagactttttcgttttgttcacttattcctagaatccattttagtctctagtttttgttagtatgtatcacctaccttaactatttttctttttgccaaaacagaaagaatgcggcttccgttgatatactggagtcacttagaatatcaatatcaacactacagagaaaggagaaggaaaggaagcaatataccattgtcagtgtgcttttctcttctgaggctttcatccttcttgtgttttctctcttaacattggcccatagctagaagacattgaggtcctgccttactgcatttttatcttagccatgagcagcataccccatactatatttaggttgataaattttcaatagtaaaattcttcatagtgagcagcctcttctaggctgtcgccacccctgccttaccctatttcactgtggaaagctcactttcttggttgaagcatctccctgtttgaagtccagctttggggaaacctagaatggccttaggaccatcagtgttacaagactcagtagtgcctgagtcatacttagcttttaaaacatgtttatagctttcactttttatgggtaaatagcccttttattatcaacacagtacttttctctttttcttaaaaatgaccaatttcaccactgatagagttaatttttgtcatctgttaaacatgttttcccatgactttgggttcttcttcatttcatatgtgattttgtgtgtatatgtatgcatgtgtgtgtggtttccttttttagaacaagatgtatttctttgaagatgagactcaatgggccatttgctgtttttctttcctcatctagggtaccttcagtttagctcacagttgtctttcttcctaatggtgtgggtaaaaatgactgactctgttcaatattacagattgaaaataaaacctgtgattcctagcctctttattttatacttctttattttaaagtctaacatttttctttctttatgctttcttttttctatcatggagataacttaagatgtttatttagttctataggtattctgtttctcctgaaaacttatacttatcgttttacttctcttcctttattatgttcatgttcagttagtctacagcagatcttgtaacgttcgactgaattctagttccactaacgataagcaagtatagcatttcttcttaagtgaataatttcttccatatatttgatgtggatatgatattatatgctgcactcttggttgtatcttttcaggtatatttctttttctcagagaaatctttcagtttgtatcttttctaaaatggggtttttcttacgttgggtttttattattgctgattactggatattgtttattctttggatgctgttgatattcacctatcatgaaagtaaactttcatggttaatcatttttttctattacgtaatgaagcaggatatttccctgactcctttgtgggactcgcaacaggggtgccttgtttacccagcctaccacccttccaccctattttttttttttttgagagggagtcttccctctgtcggccaggctagagtgcagtggcgctcactgcaagctccgcctcccaggttcacgccattctcctgcctcagcctccctagtagctgggactacaggcgcctgccaccgcaccccgctaattttttgtatttttgttagagacgaggttttgccgtgttagccaggatggtcttgatctcctgacctcgtgatccgcccgcctcagcctcccaaagtgctgggattacaggcatgagccactgcgccttgccccagcccaccactcttaactccttgtggaagggagtgcacaagtgaacgggtgtgggaattggagtgaatgagtactgaaaccagccggctgctttggcgccagagggctcaacctccactcactcagacccactgcgttctgcccctcgcaggagggagtgcgcatatgagtgggtgccggaacggccggatgctttagccacagcaggagtgaactctctgcaggccccacagcagtgtccaggagcgggtgcctgcgactattgaagctccagagggtgtgttacagtgctcttttagctccgctgtccgtggacagcttaagtgctaacaactcagtggaccctttgccttttttttgtgaagtggcagccctctgccagtgaggccaaagggccactgtgaaagccttttgtatccacacttgtggctcctgagctcttgtctggcgcccaggaaaaatgaggttacatgaatgaattgaaagatggtaaatgcaggggattttattggaaatgaaagggactctcagtggaaatggaagctgaaaaggggacagggtgggtaggtaatcttcccctgggaagttcagccatctctggcaagattcttctctgtagtaatgccatcaagctgtccttctgaagtcaagccacctctctccaatatctagccatcgtcttgtctaccagctgagtctggggtttttataggcacaggatgggatggggcaggaccgtgggtgatttaggaaaaggcaacatttgagccagaaaatggagatataagctctcactttgggccatggttacaggctttttggcttgagggtgaggttatgctggggacccaccattttctgcctagaatttctctgtcccccgttcctgtcaataatatgcatttcttaaatatctttagtttctcctatggtaatattttgttttcatatgagttccttctcattcttagatcctatttatgcttctttgctttaggataacttattgacatataagtggtatttattgaatacatctaatttttagaaaatttcagcattcagtgctgtcacaaagttaattaagttcatagtccccctttaaaatacagtgtttccaggtaagatggactaatagggatggtctttccacctaagacaactaaagaatgggacgaaataatgaaaccacagttctcaagacatttgccgtcaagcagcaaaagacattgatcccyaagggatgggaaacaaattaggcgagatcatgcggttgctctagctcacacctagagagggtttgtagggatggaacaaagcagtggaacccaggaggagcctagagatttctctgtattgaagaggtagagctagctgggagattggggggccaaggcagctagagttcacaaggtagagtatgagaaaggagaaagctgcaagagacagaaattcacagatctgtagaaattgctttcaataattcaattgactactgatcaatacatgcctgtaaggaaactatgggaagctgcggaagaaccaccaaaaaggaattgagggaataatataataattagagctcacacatggttaggagtagggcctgaatccatcagacaaaaaaacttcataattcaacaggtatgtcaggtagaggacttccaacgttctagtttttatttctagatgttcaacttgggtcttttttgtctgtgtcttaatatacttaacctttcttctggcttttagtacatatggaacagatatataataacttttaatgtcctagtctcctaattctatcaaccctgtcatttctgggttggttttgattgattgatagctttccttctggctctgttttcttgccttagtttttttaacctgctagttaattaattgatgcatatcaggcatgtaaaataagacactgtaaattgtgccctgttgggtgctggacatttttatattcctatattctttttttttttttaagagatggggtcttgctctgttacctgggcagtagtgcagtagcatggtcataggtcatggcagtattaaactcttgggctcaagtgatcctcctgttgcaacttcttgagtagttgggactacaggtgtgtaccaccagccctrgtgcctgcagatatttttgaactttttcctggtctgtattgaagttatttgaaagtgttttttaacttttaggtattgcttttaatctttgttaagtgtaaccacttaatttaattttccccactactgaggcaaaacccttctgaatattttatgcttcatgaattatgagacttttccattctggctgttggttacagatgttaaattgaggatcagattgtcctttcatggcttgtttttaagctctattgggatcattatagagtcatctttattctagggcaaatttagccctcctgaggtctgtacctatggcctagagtgtaaagagatgtctctgctgtggctggatggaactcagatgtctccaagctcagtgtcagcccagagttgttcatattatagctcctggaagatgttttttgtctgactttatggaacttcaccctaagcatgtgtagattagtatttagttgatgactcaagtggaccccaatgtacatatctgtagcttttttctgcttaagtttctcctttctggtatatcattctagtaatttttgccacctccactgttccaaactctgttcttttcaagttagcaagactgctgtattctgctttgaatttccctcttggcaatggtgtctagaacatgtctctaggcagaaagccagggtggtcataggccttatctagtttgttttcttgtttcagggaacacagatctacactaattgttgttcactatctggaaactgtcatgtattttgtctggttttgcagttgcttaccatctgagggtaaatctgttaccagttattccataatggctggaagcatacatttcacactattggattattgaggagtttggcaaagacttttgggtgaagttacaggaaagaattacaataaacctttgctgactttagacttgatggctgtttaataattgtatgtttatgggctttgggagtagttgactatgtcttcttcaaatagatgtatgagataatgtaaataataaagcattatacaggctgggcatggtggctcatgtttgcaatcccggcactttgggaggctgaggcacgaggattacttgagcccaggagtttgataccagcctgggcaacatagcgagacccagtctctacaataaagtaaaacaaaataaattttaaaatcttaaaaaaaaagaaaatagttgtgttacctttgtggtgggaggagtttaagttggtgatattgcttttatattagttgtaattgcctaaaattgttttcagtagactttgatgtcattggagaaaaactgcttctcacaattaataatgtcaatcagagaaaaatctcatgttgttgacataagagtaaagcaagtggcagaaacacacatttctatagaatatattgtgtctttgtactgttcttgggtttttgtacttggtgacttgcgcatactacacactcagtgaacatttgatgtgcgaatctttattaaggccatttcacttttcagttaatcatattgattactgtgtgccaaacatgatactggatgagggagaggcagcaacaaatgaagtaggagaagggcccctgatcaaaagactgcatgagatggtgcatgtataaggcagcaaaatactctactgaagattaatggagtatagaatgattatgtcagctctcaggcagggaggtatagaggggctggattttgagaaagttgatggatatgcattgattgataaaggagaaaaaaatccctgttttttaaaaaaaggaatgttgtattgcagggtgacaactgagaataaacaaattgttctatggaaagaaagcaaaattaaattggtgttagtggaagtttgtgtagaagatagtaagaaactaggttatgtagctaaccgaggtgtcatacaaaatcgaggggaaatacaaaagattttgagctttggtctgaaaagaggtacacttctgaatgccttttatgttaaaagatagacaaagttaaagaattttatattcacaaagcaagttatatgagcgctaacttattgtaagttgaactatgaagcaaattaaaccactgagtgttactgagtttgggtataatttgcaaaatgaaaacccattttttgttgacatttggaaagtgcttacagaataagtcagtgtacaaaataagtgaatttgcatgttatgactggctacataaagaaaagttaaaggtatttaaaaaattatataataatgctaactgaagcttgagtagggctgaatttcatatatttttattttgtttcaggttgctgcttttgctcagaggacatccatgaccctaatggtctttttgttcaagataaagtgattttttgcctttgttgattaactggacaaattcaggttagtgtattttgtggacagcacttccctgttctaattatatgttaatattttgagaaatagataattttgtggttaaagctacatgttatgtaccagtaaagcagaaaggccaagtcagtctaaactctgttgaattgtgtattagttaagaaacattttcttactgcctactatatacaatattcactgcataaattgaaaaaaatttacttccttttaaatagttttgtactttaaattatggggctggataaaacaagttgtggttgaatgcggtacactgaacttttggcatcgttgtgtggcatatttggtgctaaaaataagcaactcatcttaaacatttctgacatttttagtagctggcttttaaaggtattcttgtccagatttcagtcctacattaacatttttatttatttttagtgttcattctattaattttgacaaatatatatcaccacaattaaaacattctctaaaccttccaaatttgctcgtgttgcctatttgtagttaacctctccttatacctcaatccctagcaatcactgatctgctttctatccctgtaatttgccttttccaatgttatttaattggaatcatctaagatgtagtttttaaatcctggctttcacttagaataatatatttgaggtttattcatgttgctgtgtgcatcrgtagttgtgtatcagtagtttgtccttttttattgctgagtagtgttccattttatggatataccataattagtttattcatatacctgtttatggatatttaggctgtttttagttyttgatgatcataaaactgctgcaatcatacattaaaaaaatgtgactctatgttctttaaaaaatttggtggggcatggtggctcaaacctgtaatcccagcactttgggaggctgaggcgggyggatcatgaggtcaagagatcaagaccatcctggccaacatgatgaaacctcatctctactaaaaatacaaaaattagttgggtgtggtggttcacgtctgtagtcccagctatttgggaggccgaggtaggagaatcgcttgaacccgggaggcagaggttgcagtgagccgagatcacaccattgcactctagtctggtgacagagtgagactctgtctcaaaaaaaaaaaaaaaatttttttttgcattgatgcatgttaggtgtacatacttatattcagggtacatgtgataatttgatacctttatgtaataaaatcagggtaattggaatatccgttaacttaaatattcattttttctttatgttaagaaaatttgaattattctcttccctagctattttgaaatgtacagtcaactaagtaaggttaactataatcaccctattgatctattgaacaccaggtcttatttcttctaagtgtatgtttgtacccattagtcaacctttcttcatcccctgaccccatgtattttttactaatagaaattactttttgttgttgctactgttaaagcgctgtgatgatttaactattgccttttaggccatggttgcatttcttttttaaaatgttattaaaacataatgagaacacaatttaacagacattgtggctaggggaagaaacttgcaatttatggtcattttgagtatagaaagagaaatgatgtaaaattattagaaaggggatctattggaacttgtggtgttccctgattttggagatactaggtagccttcttgaatatagtggtagtgtagcaagacgagctgcagacaaaacctctcagacaccgagttatagaaggaagggctttattcagctgggagtatcggcaagctactgccttaaaatctcagctccctgagtgcacaatttctgtcccttttaagggctcacaacactaaagatttcacatgaaagggttgtgattgattggagcaagcagggggtacgtgacaggggctgcatgcactggtggtcagagtgaaacagaacagagcagggagtttcacaatacagtgcctgaaatctatgtgtaacatcgggttctaagtcatgagttgatttttaactactaggtttaggccaggcaggcccaggcctggttttgggcctggtgccgggctgcctgtctttgatttcacttccttgttttttttcttaaaacaggtactgaggccgggcgcggtggctcacgcctgtaatcccagcactttgggaggccgaggcgggcggatcacgaggtcaggagatcgagaccatcccggctaaaacggtgaaaccccgtctctactaaaaatacaaaaaattagccgggcgtagtggcgggcgcctgtagtcccagctacttaggaggctgaggcaggagaatggcgtgaacccaggaggcagagcttgcagtgagccgagatcctgccactgcactccagcctgggcgacagagcgagactccgtctcaaaaaaaaaaaaaaacaaaaaaaacaggtactgagtgtaaaacaatataaaacaacatgagagggtctctcttccctcagtagaccagaaatatacaggtagattaataacgtcaagcctcatataggtagcttcaaaagtcatctagaaaagtcaagtaaattagaattctatattaaaaacatacttaaagagggtaaaggttgggcatggaaaagtcagtttaaactttcttgaatgaatatgtaggatgaaagtgatagaaactgtctttctgccttggggaaattaatgacctcaaaaagtagcttgaaaccctatttgaatatttataaggaaactgtagttcattatttgttatagaaataaaaaggtcttgagaaagtattatgctctgactcagaaaatgtaggatggtttagactctagcttctaagcctggacattaaaagacttactgcaactttaaattgttttcttgtttctgaacatttttagatgaattatgtaattttcatagtatctctgtagatacgtggcctgctgtattgtgttctcagaaaacatttctttaaaacctttttttcctttcctttcttttcttttctttcttttttttttttttttgagacaagaatctctctgccactcaggctggagtgcagtggctcaatttccgctcactgcaaccttcacttcctgggttcaaacagttctcatgcctcagactcccaaatagctgggattacagatgtgtgtcaccatgcccagctaatttttgtatttttagaagagatggggtttcaccatgttggctaggctggtctcaaacttcttggctcaagcggtctgcccacctcagcctcctgaagtgctgggattatagatgtgaggcactgtgcccggtcagagaacatttcttaaatagacaaaacattttaggcagagtcagagcattttagagctatttctgaaagagaatagttatctgttcaacgggcaaatacaacacagagtcaaagataatgctgtgctcagaagtcatgatttcttcaggattttagggtatttagattttaaaccacaattctaaggtcaatatttatgtaaagtatttatgaaaataaaagccatatttaaatttaaatttaatatgctttaattcacataaaatattttgaggttgttacaaaataaaaaaatttagatttttctagctatatattcaatatcagcatattttttgcatatttgaaaattgagattctgtcttgtaccgtttaaatggtagcctgtttaacttaaaattaactgcaaaagaaataaacaaaaactgagtttttgtaaataatattaaattgagtaatttaacttaatcccacccattaggttaagcaatgatcccaggataaagagagagagagaatgatgagtaaaatgaaccctacactgcaatgtctccagatagctgtatgagtaaaagcttaccatctcagctcttgggtctttattttcttattttaaaaaaaggcgttaaggtccacattaaagtcaggtataattggtaaagtttaaaactgctagtctcttttatttcacgaacactgccaggccttggaaattattgataaaacttgattcactgtgagaaacagtcaaaaaataataaaaaaaatagcattttattttaaagttaaagaataataaaataaaaataaaaacttgcttgagatacttttctagaaatggaacattttacaatgaaaataggatccaaacatataagtatttacttttggatatttgatagataggcttgttataagattgtgactcagctgaagtggttktagtttatacagatttttgasagaagaaagtacacctttttgctctatatgttttctctggaaacatctcattgtattgtaccaattttgtcttgattctctaagaatctttttagtcttttaggacaaaggaaataggtattgagagacatttctcttcaatccatggatctcttctgtttctgcacattcgctgagcagagtactgatagcttttgttgggggctatctttttcaaagaaatctgtttagcaaacagcctaggaagatagaaatagtgcttccattaggacagatggcacatttctttgctgtccaggataattaagataatcyctctagggaaaaaggttgggcatatttgcttgtagctccttttaaagattggagtttcattaagctcaggttttcttgtcctgtaatgcaacccacagtatgtgcacttggttttcctttcattggcctttaggaattagagcttgaggaatcagtaaaaaatatggtactctgtctatgctattgttgtgagtagtaaactgttctttgtttctgatctaggagtgtcataacttctgccaggattatctgatgctagcttaccagctacactactaacacatcctattgataaaacaaagctgagttcattgcttattgtggtaagggagaacacctaaaaaaatctttggtagggtcttagagaggtcaaaatttgagaatttgaagtttgttttaagttggatctttcagtggtggcgatgaggcttgattaggattgggtaggtatcatgataaaacagtttaggtttggtggaaacagtaagattttgaaaactgccgaagagttgatgggtctttccagaaggtctgtaatgaacaatcacattatatttctgctgtctcctagaatagcagttatgctaattaagacagtggactggtaaagtcatgttaatgtacctagaaagctgtgtgtgtgtgtattagttttctagggctgctataacaaagcactgtaaactgggtggcttaatatagcagaaatttattctttcagttttggaggttagcagtctgaaatcaaggtgttggcagggccacactctctccgaaggctctaggtaagaatcctttccttcttcttttagcttatggtggatgccagaaatccttggtatttcttgacttttggtagcataactccaatctctacctcagtattcacatgacatcttccctctgtgtgtgtttgtgttcaaatgtccttcttataaggattccagtcatgtattagggtccatcctaatccagaatgacattatatcaacttgattatatctgcatagaccctatttcyagccgttmcacattttgggaggacacttatttaactcagtataggggacatgtagtttcagtcttcagtgcccaaactgtatgtaggtacagtgtttgctctcagtgtccatgaaactatggcagactgatgttagcttgcatgtagggtaaaatcttaggttcttcagagttcttgacaacagcatggtatagtagaaagaaaaccagtctggaagtcagagtaccttagttctgctctgttaataactagcttaagaaagttactgtcttctttagctattagtttgttactgatacaccaggagttcagtctaggtcctgctgcttgctgcatagaaagccaatcactgagacaatgagtattgccaaggaagaaggctttaatcaggggcggcagctgagaagatgggagcttggtctcaattccatctccctgactgactaaaaccagggtttatatagcagggaagacatagattttaacaatgtgtaagaaaacaggaacttgggaggaggggcgaggaagcaataatggtgaatgaggggtctggcatctggtagggtgatctggtttcagttctttgatactttttgtgccaaaagaacagtctgtgggactattgggtttgtttcaatttcctcatagataaaatttgaggcctgaggaagagaagagtaaaccaaatgatctttaagacatttctagttctcacattctgaagttttataatgttgagtggctgctacatactgtattaatattagtcttgttggagtcacaaaaagggaatagaaaatgctttaagtgctaatcagataggctctaacttgtgaatgtagcttgcgtaaattaatttgtttatttgggtgaagctaattaatgaagacattaggtaaacatgatgtttgccctgatctctctgacttaccattttgtttttcaacttgaatagtgtatttggaagaagagcattcttcaggtcacttaaagttagaaaaatgctgcactctcaggctgagttcacaaaatgaaataacctttcctgaagtgaatatgagaatgtggttccccttcccccttcattgcccacgtttgtctgtcatgtcattcttgtggtcaagagattttagaaaaattcttactagagaatggtaatagtactgtgaggtggagcatggtgttagaattctaggtgtaagtgaatcatgtgctattgaattttctttgcgttttaaataggtcactgtagtatcgtatttgaattctttgtttgaatcatgttgaaagtatgtaataattactgcacagagatattgtgggcactgaaaaattctttggtactaccaaaaccccctgtggtcatgtatgtgcttgttctttgaagttacaaatgaacaatgactacatattgatgataagtataaatacaggttgaaccaatgtttttagatctggacaaaagttactgaagtaggagaaaggacggatttttattaattccatatggaagaaattcaaaaccatataccagggggagataggattgtctcaccacttaacttaaggatcttcctgtatgtagcccttccatcacacacaaattgtactaagtgttttcatagtggatatttgggcaattcagagactctcactacatgttgtaacaatggtaatgtatttaattaattttagaagatacattagaatatagaattagcagtaacactccagcaatacctgaaataaaatgtgttaaaacagacagaatatagaaattaaatagacataattacaataataaaaagatatacctctatcatatttctattcacatttctattctagtcaattaaaagagtaggagaattttttatctttctttattaatttttttgagacagggcctcactctattgcccaggctggagtgcactggcgcagtcacggctcactgcagccttgacctccttggctcaggtgattctcccacatcagcctcctgagttgctgcgattgcaggtgcacaccaccatgcctggctaattttttgcattttttgtagagatggagttttgccatgttgcccaggctgatcttgaactcctgtgctcaagcagttccccacctcrgcctcccaaagtgctgggattacaggagtcagccaccgtgcctggctaatatattttcttagtgttaaagaaaagaatgttaaggagttactcagaaagtaacttgaacttttggtgtgggctgttttgatgattgttgggaagattttctttttttcttcattcctggggccatggtggctgatcatccaagcttggattaaactctgttccttgtacttttccttctcattttaggttttggagtcagtatacttatattaccaagaaaataaggttcctccaacttgtaagaaatattttctagtttcagagaattatgaattggtaaagattgaaaaagatggtatggatgtgtttgaattattcacttttatggtgtatagtcttcactttccatgttgtgttttgttggactcaaagatgcttgagmagttagagagattctccctggctcccccagccacccctgcagccccactggggaaaaaaggaaacaaaggaggaaaaccgtgttgaacacatattttttcttaagcacctatactggattaatgtattactgtgaaagttgtttaattggagtttttttaaaatagatttttatttcttagggcagttttaggtttacagagaaattgtaatttcttacagagagttcccaaatatctcccccttttatcttacaatctgtagtaattgcttattatttccaggagtttgttggtcagtactttgggttttttttttttttttttttttacatagatgatcatgtcatctgcaaatagagagttttatttctttcttctcaatttgtgtaccttttatgtccttttcttgttttactgcattagctaggatgtccagtatgatgttgaataggagtggtaagaagggaagtccttgccttgttcctgatcctacggggaaaggatctggtttcttaccattaggtatggtgtttgctgtaagttttttgtaaattttatttatcaagtggaggaaatcctcctctatttctagtttgctgagaacatgtaattattaactgatgtagaattttatcaaatacttttattgcatctattgatatgatctgattgtatgattttttttttctgtttcctggattacattaattgacttttagatgttgaacctaccttgcatacttggaatatactctacttggtcgtggtgtataatgtgatttgctgagatttttgagaacatttgcctctgtgttcatgaaagatattgttctgtaattttcctttcttgtaaggctgttgcctgggcttatgatcggggtaatgttggcctctgagaatgagttagaagtgctcactctgcttctacagattgtagaatattggtatcatctgttccttaaatatttgatagaattcacgaatgaattatcttgagtgtggtgctttctgttttggaagattattaattatttattcaggttttaaaaatygatttaggcttattcagattatttgtttcttcttgtgtgaattttggtagattgtgtcttttaagggattggtccatttcacctaagttatcaaatttaagggcatagaaccagctttgagtcttgttgattttctttgttttcctgttttcaattttgctctgatttttgttgttttcttctgcttcctttggatttaatttgttcattttctggtttcctaaattaaaagcttagatgattaattttacctttcttcttttttaacatatacattcaatgctaaaaattaatctcttagtcctgctttgctgcatcccacatttatttacttacttacttacttatttatgaaatggggtctcattatgttgcccaggctggtctagagctcctagcctcaagtgatcctcctgccttagcctcccaaagtgctgggattacatgtatgagccactgtgcccggccataaattttggtgttttattttcatgtacacttagtttaaaatattttataatttctcaagactatttttttgatctacgagttatttgtaagtgagctgtttaaacatctccaaatattttgagattttccagctatgtttttgtttaactagtttaattccattgtggtgtgtctatttgtatggtgtctattctttaaaatttgttaaggtatattttgtagtctctctttgtgaaatgttccctgtggatttgagaagagtgtgtatactgctgttgctggatgaagtgttctataaatgtcagttagatctagttgattgatggtgtcatcagttctatgataccttcctgattttctgcttctgtcaattaccgatagagggttgttgaagctccaactataatattgaattcatgtgtttctccttgtagttctatcagtttttattataccttatgtattttgacactctgtagttaggtacatacatataaagatgattatgtcttcttggtgaataataacagattgaccatctgttattaggtaatgcccctctatcactgataatttttcttggccttaagcttgctctttctgaaatttttatagccattccaggtttcttttgattaggtttagcatagcctatctttctccatccctttacttttaatctgtcttcatctttatatttagagtgggatttttgtagacatcatatagtagggtcttgtcgtttgatttgctctcgacagcatgtgtcttttaactggtgtatttagaccacagatgtttaaagtaattattgatatagttggattaatgtctactgtatttataactgttttctactcattgtccttgttctttcttttttcgtctttcactttgtctctgccttcttcattgtaattcagcattttatataattccattttgtctcctgttttaaaatataaattatacttaatttaaaattatcttttaggctgaggatggtggctcatgcctgtaatcccagcactttgggaggccaaggcgggtggatcacctgaggtcaggagttcgagactagcctggccaacatggtgaaaccctgtctctactaaaaatacaaaagttagccaggtgtgctggcgcacgcctgtaatcccagctactcagggggctgaggcaggagaatttcttgaacccaggaggtggaggttgcagtgagccaagatcgcactactgcaccctagtctgggcgacagagcaagactgtctcaaaaaaaaaaagaataaaatgaaattattttttagttgttgccccacagtttgcaataattacacagttaaactgatccaagttcactttttaaataacactttaccacttcatgggtagtgcaaataccttacaacttagtattgtcagttcctttttcccattccttataacattacttttatttgttttacttttccataatttacagtcactaaatatattgttgctattattattttgaacaagttgttatctgttagatgaattaaggatcagaaaaacaaaagatttagttttacctttatttttttcctctacactcttcctttctttttgtaatccatatttctgatctatataattttccttctttctgaataacttctgttaacatttcttgcaagtcatgtttattgggtttcatttctcccagtttttatttcagaaagtctttatttcttcacttttggaggatacttttgctgggattctataggcattctagtttggtattttattttattttttttaacagcccagaggtcttattttattttatttttttgagatggagtctcattctgttactcaggctggagtgcagtggcacgatcttggctcactgcaaccactgcctcccgggttcaagcgattctcctgcctcagcctcctaagtagctgggactacaggtgcgcaccaccacacctggctaattttttgtatttcttttcttttttatttttgagacagagtctcacactgtcgcccgggctggagtgcagtggtgtgatcttggctcactgcaacctccacctcctgggttcaagcgatcctcctgcctcagcctcctgagtagctggaattagaggcgcccatcaccacgcccagctaattttttgtatttttagtagagagggtttcactatgttggccaggctggtctcgaactcctgacctcatggtctgcccgcctcagcytcccaaagtgctgggattacaggtgtgagccaccgtgcccagccagtctagaggtcttttattttttttaacacctgttatgctatgaattcacagggaataggttccagcagctcaggctccttcccactggttctcacaaagtgtgctkctctggatggagcaggctggtgcttcagtagaacccgggtacctttctctttggcttctttctttttccgatcattttcctttacgtgtttcaggaagctattttggctcttagagtgctgaatgtgctcaatacgcacattaattctcttggcaagaatcttgcccttaacttgtttgttgacaagttgtttacaataccaacagcatgctgagtaacgtgtttgtttacaacttgcttacagtgccaacagcatgttgggtaacactgcagactcttccagttttgccatgataacactcgcggagcattcctttttgaatagtacccattcccttgatgtctacaatatcacctttcttatagattcgcatacatgtggccaaaggaacaactccatgtttactaaaaggcctagagaacatatatcgggtgcctctcttctttccctttgtgttcgtccttttggcgaattactggaagatggtggttccggccgaaaggttggatttttttttttttttttttaacactaaatatttcacttcactctttttgcttgcatggtttctgaagagaaagtttgatctaattctttatttctctgtggataagatgttttctgtgtgtgttgatttttttctttacctcttgcttctttcgagatatcttattggtcttaaagttaataaggaaaaaactaaagttttgcttttgatttagttttctctttgtcttattttctgcagcttcactatcatttgcctatgtaaatattttggtatttatcttgcttggtgttctctgaacttccaggtttggtgtttcttactaaagacattctttcctgttacagtgttattgatttgtacactccccttcctcgcctcccctcttcactgttttttccttctctttactcttcctttctttccacaggatctcactctgtcaccctggctggagtgcagtagtggcgtgatcataactcgctgcagtcttgaactcctaggctcaagtgattctccctcctcagcttctcaagtagccaggactacaggtgtgtgccaccatgcctggcgattaaaaaaaaaatcgtagaaacagggtctccaatgttgcccaggccggtcttagaaaaaaggacttagctgggcatggtggtggcatgcacctgtagtcctacctgcttgggaagctgtggcaggaagattgtttgtgcctaggagttcaaggctacagtgcgctgtgaatcaccactgtactccagactgggtaacagtgagaccctgtctcaaaacatatatataaaaaaaaattcctggtgataatttgataattcctggtaaaaatttctgccacatccgagtctgtttccgaggcttgctttgtttcttcagattgtattttttgcctttatagtgcctcataattttttttcatagccagacagaatgtatcaggtaaaaggaactgaggtaaataggcctttagtgtgaggttttatgtttatctgtttagaagtcaggctgtgtttagtgtttgttctggctgtggtatcggaggcaaatgttacgggatctttaaggtgttgcttttctgtctagaaacctctgtggccagtggcgcctttgcccgagttcttgtcctgtgtccaggaagaattatgtatgcagacaagtggagggtgagcaagacaaagagaagctttactgagtgttagaacagctcagaggagagctgcagagggcagcccctctctgtaggcaggttgtctcatccagtgttcagctctcagcagagaggaggccctggagtgagtggctcctctctgcaggcaggtccccattgacttcccagctctcagcagagacgatagctcctctctgcagctagtcatctggctgtctctctggcctctgccctgctctggctgatctcggggcttttatggacctcagtggggaggaagtgtgtcaattggtacatcggtggccatgggtgggctggaaaaggcaccacaagcccccactgcagtctgcgggactggcagcccggtccccaaccttcaggccctccctggcctgaaggtggggtctatctggggacgtgcccccttccacccaggagcctgtctgcttcctgccactttccatggctcccaggctgcttgtgccaaggggcacctgcctgccagcatggagcagctctccacctcagcttcctcagagggggcctaggcggcagggcctgagcatgcgcatatcctgttgggctgtgatgatatccaggcttggctccaaccccactctgagaacctgccacattggagccggtgcgggaagtggcagcgggaacaggcatttccgagcctgcaaaggcaaggggggccttcctgagcccccaagagcacacggaggcctgggtccacaaccctgacttgggtagctgcagctgtatggggttgggggacagggctcctgcctgtttccagtccccaagagcacatggaggcctgggtctaccacccaggcttgggtggcttgggctgctgcctgctcctggctcccactggcactgtggagcatgcagccctggctccgccccctttcagcctgagacaggggctccagatccttgctggacctgggctgggatccggggcaggggtgacatcgccgggagctaccccagttgccctggcgcttcagtggcccaggcagagcagataactgtccggcctggctgttgggagtggcaggctcagcagtcgcctgatgtggggtggaccctggggatgtagccccgggcagccctgcacagagcctcctcctgaggcccaggaacctggcamcctcagtggggtgggcgcagtggctgtgtcactggctggtccctgaagtgggcaccgctcccacttcctgcctcaggcccctgaagctcagcctcagctctgcatcggtctgctctctgcttgactgtgctgcacagagggcggcgggctgttgagggagggggtctgtccgcctctccctgtgccgtccatgtaccagaaagccaccgccatcactattagaggctaaaatttcttctactgtccttgcttttatctgccctgttgtctttgggtttttgtaaagaatccttaaatggggtctgaggcttgcaggtttttaagttgtaatcctgtgttgtacaagagctgtactgatgtggtggtaagggtagagggatgagggggaaagttctatagtcctgtaattagatctcaggactatagaactttccccctcatccctctgccctctaccaactgtgagcctgagttgagtaactgtctctttttctcggtcaaaggatagatggggctggagttgggtatttcccttccctccggttggttaggcactgtaaaaccgtagtaggttaggcaatctaaaagccagttggttaggttctggtaaaatagtttccttttctggaataccttttaagagaaataaagttcctggcgtatttcaaaatggtttttcttcttcccctgctgcaagcaggaggggttttttttcagatctttaccatgagaacctggtagggctcctggaggtaaaactcaggaaagtatggggacccctgtaagactggtccccttacagtttttaactctcaagctagtccacaattactgtttcaagtgttcctactgatgctggcttcagttgagagcttgtattcctggacttctgcttcctgcacactgtgattctctrtctgcctgtcttgtctctccaggttttagagcagcagtttgccctctgacctcaattctctgatggctctaagaagagttggattatcagtttttttttttttacccccagctttttttcttgtcgtgaggttgggagtgatgaattacaagctctttacaactgtacttaaggttattttttgaccatttttgatgcttttgtaactagtcaaaagacttattacagtatcctttatctcatttggcagtattgttcattaagaattttatttctttctgacatcaggtctgcacattttggggataatatattctaatttgcaagaaagattaaaaaacttctccagagggaagttgatcataggactgattcttattattgatgaattgactgccttgtcttgttttgtgttgctatgtaggaatacctgaggctaggtaatttataaagagtttgatttaccgcacagttctgcaggctgtacaagaagtatggcaccaggatcggcttgtagtgagggccttaggctacttccactgatagcagaaggcaaagaggtgccagcttgtgcacaaaatgagagaggagaaaagggtgggaggaggggccctggctctttttaacaaccagctcttgggggaacaaatagagtgagacctcaagcatgcctgaggaagagcattaatttattcttgagggttctgacccctccccaccatgcccaacaacatctcccattaggccccacccccaacattgagatcaaatttcaacaggagggacaatcatctaagtgatagcatagactcaggctatttactattctgttttcaagtatagattgagggcaacagcagcctttgttttctatgttgatggccaaaggtttatttttatattcttatactgtaaaaaaaaaaacaactttatttttatagcctttttgggtgtagggtcatgtcaggctttactaattgcacttctgataagtatactgatgatgctgaggatggttattaaagccctatgctgatactttggatttatggaaccaattaatttgatgactcatttacattgaatttcttaattagtagattgcccactaattatttttatgagcacagaataaggtaatgtttattcttattttttttgtgatatggtaaaaaacttagttcatataatgaatttagtgctcaaatatcttagtagaaattgaagtagaaaaagacattgttgtaaattaaatgtaagatataattttattttctttagaaaactttacattgaaaagatcacattatagataatttagacaacttatttataacttttatttattattattattgaatgtaaaagaattacatgcagtcccatgatcttaacataactgtggttaccatgttggtatatgtgccttttagtcctttttcatacacaattttttttacaaagttataataataatttcttttcaaatttgtgccttatttcagttaacagtgtaaatgtttcccatttctaacaatgttttctcattgagtgaggtactgttaggttggtcagactgatagtttattgtacgtattgctgtaatatctttgtacatttagcttttccatgtttgtaccatatctttgggttttcagaagtctgtctctctctctgtttctctttttgtctgtcttttctatctctcaccttcatttggggagcattttgtgttctctttcacaggactaattaagttttattggatcttgaaaaacgggattagaaattttttcttacttatataattagaaaacaatgcttttggacttacattgccacggcagtttacacagttttattcccaaaaattgtagttttgtgactaggtgataaaaatgatctcctatatgtgccaaacttggtattctagacactcatacttaggatgtaaattgactgtagtccaataatttaatatgttgtgtttaattcttgtaatattttactcacaaattgaacttttccttaccaatttaatgtttgtaggcttaatttggcatctttgtcaggattattagacttctctgcattcttctgacttctccctaaactaatgtttagaactgaattgggtccagcaatttaagtggaaaatcagtatgactagagacttctagaaacttctggtgtcactgagatggtgaatttgatgattctgaccctacttgctcatctgtaaaagctattagaggattgttttaagcatttctattctatacaggtatatgtacaccatgtaataccactcagccataaaaaagaatgaaataacatttttgcagcaatttgggtggagctgtaggccattattctaagtgaagtaactcaggaatacaaaactgaataccatatgttctcacaagcgggagctaagtcatgggtacgcaaaggcatacagaatagtaaaatagactttggagactgagacgcggggagaataggaagaagataagggataaaaaacgatatattgggtacaatgtatgctactttggtgatgggtgtagtaaaatctcagacttcaccactatacatttcatccatgtaacccaaaaccacttgtactccaaaagctattgaaataaaaaagatatttaaaaaaaaagaggccaggcaggttggttcacgcctgtaatcccagcactttgggaggctgaggcgggcggatcacttgaggtcaggagttcgggaccagcctgaccaacatggtgaaaacctgtctctactgaaaaaaaaaaaaaaaaaaaaaaaaaaaaaaaaaaaaaaagccaggcgtgctggctcccacctgtaatcccagctactcatggggctgggcgaatcgcttgaacctgggaggcagaggttgcagtgagccgagattgtgccactgcactctaagagcaaaactctgtctcaaaaataaataaataaataaaaaattaaaaaagatcttctgttgtacctaatcttctagccttattatttcttagagattttataaatccatgtggcttttttactcttgtcatcttcaagttatttgccaagattgaaaaataaccatctttctcctaataccttggtgagcctgagagaagaaaatactacacagttcattttattgtaaaagtagtgaaatttctcaactgatattcatccttcatttttgtggatttgttcagggaagataagatttattgtttatttttattttgctgtattgccaggctggtctggaacttctgagctcaagcagtcctcctgcctcggccttccaaagtgttgggattataggtgtgagccaccgcacctggctggaagacaggatttttttgggaaagtaaatatcacttgagaatatctactagtatggaatctaaagttatgcatacaaggatgatctcatatttctttgtatcttgttcccagtctttcccccaatcttgtctcgctttttcctcaacaagcgtagttaacaactactatgaatttggaatacaaaatgataacgaccctgcctttaggaaactgacaatttagaaggtcaactagaaatataagttaataattacagtacaggaagtcccctgatttcctctataataacatgtctcccaaaatgtgattgaaaataaaaattccacatgtcataggcgtaggaggtatttgggtgtttgtatggagagtcatttcacagagctaaaatttattattataaaatactcaattctagttcctgggcatgttatctcctttggaattagaaatcttagttgctgcataacattaaaagtgtcaggatgatgcctgtaatcccagcacttttgaaggtagaggcagagcattgcttgaggccaggattttgagaccagcctgggcaacatagtgagaccctgtctctaccaaaaaatttaaaaaaattagccaagcatggtggtgtgtgcatgtagtcctaggtacttaggaggctgaggcagaggatcgcttgagctcaggtatttgaggctgcagtgaggctgcagtgaggctgagctctaccatatagagctcaggctctatatggtagagccactgcaatccagcctccgcaacagagtgagaccttgtcttggggggcaaaaagtgtaaggatgggatttctaggcatatttggggctgaggaaatcagtcttgggcccaacctccttgtagggggtgaggtggcaacctctggaatttgaggcctgctactgggattgtaggtataggaagttgagagggaaagggtctttctcaccctgctgtggtagtaagagcttggtgcttaatgggtgccttttasttgtttgatcacctaggatttctgcttagaacccagcaatacttgtaggcctgcacagtcccaagagagaaatcagagacttggtgataagtcaagggtaagagatgagataagagagcacctacactataggatattagaactacaactccaattactccttcactctcatctttttccctctcccagctgccaagtatatgtgactagtgctttgtccagagcaggactggaggatggggtaggaagaattattattttttcatcatagatcaggatagtgtcatgtccccctaaacttcagggaggcctggcttcatacctcttcttccaatttcctagcattgtgcaatgacaaagcttcatgcagtaactcaaaatcattgttaataaggtgatatctaaaagattgaatttgatgttctgaagttagtgtgaggatgtcagtctgttaatgtgtgaaatgttttgagctgtgtgaaactcaattttgcttagtgtgttaagtacaactgaagtaggtgtaaaagtcagtagtagcacacagaaaggagtaatgaattgtgtctagagggtcaggaaaggtctcacaaaggagaggatccttgaattctttgttcaagtggtagagttaaagaagtagatttttttttttttggcgacagggttttgctgtaggtctcccaggctggagtacagtggcgctatcatagctcactgcaatctctaaacttctgggctcaagcatagaaatagatctgatagtggaagtctctgcccagtaatactgagatcttggaaccttactcatttcagaaatggctctggtctgaatacattatatgggactaagctcttctaaatatctttatcccttaattctttatgcataaacttcagcaacttctaagctaccattaggaaattttcactgtaaattatatactggatgattgaatttttagaattagatttattccaaatgtaagtcaacctaaatgtaaagtttttctctacttaaatataagcttttttggcactcttgaagattytgagtatttctgtggacagttatggccatcagggtgtttgtttgaattctggaattgccctagagagcacataagctgtggagtaaagcaggtgtgtggtctgactcctgacttggtcacttaagatctgtgcaaccttgaatagtaacttcgatgctaattttccacatctgtaaaatatggataaaaaatgcagagtctttagcacagttcctggcatgaagtaatggctcaataaatgttaattattactattgttaactaaataagagttccctaggtctctgacttcaaacatatagttgttggagactatgaataccttggggccaccttgagctaagactagatgctcaggagcacctttttgattagtcatttattcattgagcatatatttttgcattgtttaaactttagcaaaatacctaagtcagtcaattctatttttatacagatatttctatatagaggagatttcctataggatgacctgttctgggtgtgtctatctgacctgcagctaatcaagtgactacagctttgctaattttttttttgaaaaaccctaatattgttaaacagtagtacagaggaaataagctgttggtcagcttctaaattctggcacgggttagatttgcctaagagcaaatcatatagcaagagttgatgagagaacttttctcatatcttctagcctgggtaagtttgtctcatttggtgtcaagtcagaggaatctgaactatagaaccaaattgtagggaaagatgactaagggtttgtgatgtctttttttttttttacccccctcaaaggagttctaggtgtaaaaagcatcatggtttaaacgttacgaggcatcagtgaaggcagcagaaaagtcagaaactaatatagccaagtctagattgtatctgttataaactctttaatcagaagattctagcttctagaaccaggtctgtaaaatgttgagagccctctaagtaaactccattatagtcatttaattgatttttctttgtctttcttcttggacatactcttctttaaagagagcgttcccccctctaccccagatagtatctatctttgaggttttgagaacaatagtattcttgttctttaggttctgagttgctgacttgagggaatttgatacacaggagtccccaaggccccccagtggatacctgaaaccatggatagtactgaaccctatatatacaggtcaggcatcccaaatctgaaatccaaaacgttccaaaatctgaaaccgacgtgacactctgaagaaatgctcactggagcattttggatttgtggatttgagatgctcaactggtaagtataacacaaatatccccaataggaaaaactccctattcccattagtttttacttgatattctgaattcttaagtgtgatttttttttctaatttggggatagctcctatttttgtgagagaaattaatgggaaattttgagatggtaactagaaattgtctttgcagtgttaaatttttagttgggaggctactaggctgggtggctctagctgtttaagttcctgtctaagcaaaccaaagcccaacttagaaagtaaaaggaaactagatattttgccaactagaaaccacctaagtaatctctaactagtgtctttccactctgaccaatgagatatgttttctttgtcttccgtgttcagcctataaagcttacagcccacactgctgtgaatgaagctcttcaaaccttttatggttcagagtgctgcctaattgatgaatcattctttgcacagataaactcttttgtctgtttttgctttaaacaacaaaggaacataaattctgttaattgattgtatgaatataacagtgaaaattccctgttaggctttggttatcagtattttaggaatactttttaaaacatcccctttagcttttaatgtgttttggttagacaagatgatgtatgtgtcagtataatgccaggctcacaaaagttgctaactaaatgttagttccttcaatacatacattcattccctgggacatggttccaaaagtagattatcataagaattctgtgagaagctttgaaaaaactacagatgtctatggcatatattaatacatggcgtctatatccatacatgtatgtaaatgtatgcaaacaatttaatctactttttccttaacattaactccttcagatagaatggttggcccaaatgatttaattatttttkaggttgttgattcatagaaacaaatcccctgcagaaaggttgtaccaatttacacggttacctttcttcacattttctctaacactgggtattcttgagcttttagtatttctcagttggtggaaaggatctcttagtttgttgggatctctttgattatgagtgagattcagcattttccataatttactgatgtctgcatttcttcctccctccttccctttcttctttcctttctccttctcctacttccactttctcccgtcctgtcctccctttcccctgctctccctctttcttccccttctatccccctcccctcctgtttttccttctttgcttgtttttgatctctgttcttccacatatgaagattctattttgaccagcaataagttgaattatggggctagaagataaggactaaaaacaagaattggtgtccagaaaggtggggtaattttgattactatgcctgttgcaaacatgagcaagatgttaaatgtatcatagatctgcaaggtttttttaattcatattttttatctattgtctcattaatgttatctttgagaaatggttcttttcagtttgagaatgggggaattggatttaaaattttcttacatgaagaaaccaaatattttgctgctatcctttggaaacttcttactatgattggttctgggtggyattggaatcagtttgaaatgatgccattaatgaccacatgtttggatttcttgactatgggtaaatgtgattagaacagaaatcccttaataatagggattctttatctttgtgtccctagtgcctcayagtatctggccctaattaggagctttagaagtgcttattgactgattgcttttttatctgaatcggccctttctatcccatcattatgataacatccatcttggtagtagtaaaactgttgcaaactgcagaaatgaactgtgatttttttttttttttttttttttttaaagacagggtctcactctgtcacccaggctggagtgcagtggcatgaacatcttaatagctcactgcagcctcaacctccccaggcttaggtgatcctcccacctcagccaccagagtagctggaactacaggtacactccatcatgcccagctaatttttgtattttttgtagagacaggtttcatcatgttgcccaggctggtttcaatctcctgggctcaagggatctgcctaccttggcctcccaaagtattgggattacaggtgtcagccacggtgcctggcacaaataactttttcagacaccacttttgattcttctgggtatgtatccagaagtggaatcactggtatcatackgtaattctattttttttttttaaatggagtctcactcactcaggctggagcgtagtggtactatctcggctcactgcaaccactgccttctgggttcaaatgattctcctacctcagccttccaagtagctgggactacaggcgtgtaccaccacactggctaatttttttttgtatttttagtagagatggggtttcaccatgttggctaggctggtctcgaactgctaacctcaagtgatctgcctgccttggcctcccaaagtgctagaattataggcatgaccatcgttttcagcctctttaattcttttttcaattttttgaggagacatcatactgttttccacagtggctacaccattttacatttccatcagcactgcacagggttctaatttcagcacattcttaccaacacttattttctgctggtttttttttataatcatcatcatcttaatgggtgtgaagtggtatctcattgtggttttgatttgcatttttgaaatgataagtgatgttgagcatcttttcttatgcttactgttcatttgcatattttctttggagaaatacctatttaagtcctttgcccactgttgagtcagattttttgttgttgagttttagggatactttttaaagatgctaatcacgtgaactcctttttaagtgatttataattccgtaacatatacttttttttttctgatcgatttccttatagtttgtattctagtgggttaatggagtgtgatttttttttaaaacagctttgctgaggtgtgattggcataaaaaatactgcacacatctgaaatgaacaatttgattagttttgacatatgtatacatctgtgaatccatactcattacctccacagatttcttcttgcccccttgtaatcttttcccccactactacccatccttccttgtctccaggaaaatcctgaattgcttttggtcactataaatttagtgccttttctaaagtttttttttaaaatggaacttctagtatatacttttgggcaggggctgtccattcctgtgtttatttatcctttgtatattttctttggtaaaatatctgttcaaatattttggccattatttaaattgggttgtttgttttcttattattgagttttgagagcggtttatattcttgatcaaagttgtttataagatacgtgcttcgcagatgtatttttcctggactgttgcttgtcttttctttctcttaatagtgtcttttgaagagcacacattttaaattatgatgaaatttgtttgttctcatatggattgtgtttatctatcagtttgttctcatatggattctatttttgtttatgtatctaagatatatttgcctaatccaagggcatagaagttctctcctggaagttttatggttttgtatttagacctatgatgcattttgagttaatttttttatatgggataaaaattggatagaaattcttttttggggggtagagacatgcagttatttcagcatcatttactgaagtggtttgtgtccttttgatttttgtcaaaaatcatttgactgtatacgcgtgggtttatttctgactcttattttgttccactgacctctttgtctttcttttttttttgtctctcataccagctcagttttaattttaaagtgacaaatgtacaggtggaataaaattttaagcaacaccctccaaattcctcttacatgacaagaagaagctgaatgtaattttgctctataaccaactaaacagtagctcaggatagacataaagccaacttttccaattaagcctttgtgaaaatcaatttctaaatggatcacaactccaggatattgtttctgtgctgtgatttctttgtctttcttgatgccactaccatgctgactattatggctttataagtcatgaaatcgggtcacgttaacccatacaactgcttgttccttttcagagcaattttggctattgtgctggttaccaatctgttgcctctcagctccaaatgcatcctttttgcctgctctgtgaaaatagatcaggccctttaaatatttttcttttgtcagctgacaatgttaagttttgccagtacagagtgctggagaaacactgcagagaagttttgcttgttcgtttctgtgtacttgcttagtggactgtagcaacacactcagcttctccagtgtcaacccacattggctttcccactctacagtttctgtaggatgcatgttttcaccattatcaggcttctgcagtgctcagagggcagcaatacccagcaaccagtgacccgaggccagcaacttcttttacttccccctcagttggatttgtaacagagtatctttggtgggacacttctgtgtgaagagattttactagcaccctaaagaatggatttctggcaagttccacaaggtagacttccagtaagttctgctggtgcagcactacagcaacttccgtgctattcagtgagaggactgtgttctctccaacaaggtctggatctcagccctgggatggtttagggtcggaggaagctcttgccttggtgttctgtgtcagcctagggagcattggctactcttaagagttctctttatttctcattagttaattagctgtttctccaaccccatgttaaatagttagtgatcctttttattaagctttcacttttcaaattactgtgtggcttttctctccggaatggctttacatttccatatgaatttaagaaacagtatgtaaatatttgattggaattgcatcgaatctatagatgaatttgagggacagttgacatcttaacgatatcaagtcttctgactcatgaataaaatgtctccatttatttggatgtttaatttctttcagcagtattttattgttttcaatgtactgatcttacccatattttattaggttgatctttaagtattttatattttttgatgcttttataaatatttaaataacatatcaattttttttttttgagacagagttattggccaagtgtggtcagtaactgtcacccaggctggagtgtggtggcatgatatcagctcactgcaaccttcaccttctggtttcaagtgattcttctgactcagcctcctgagtagctgagattgctcagctaccacacccagctaatttttgtatttttaatagggatgggatttcaccatcttggccaggctggtctcgaactcctgacctcaagtatctgccctcctcggcctcccaaagtgctgggattaaaggcgtgagccaccacacccggccaataacatacaatttttaattgttcattactaatgtataagaatgcaattgatttttgtatagtggcattgtatcctgaaaacctgctgtactcattctggtagctttttttgtagattacattggcttttctgcatagacaaagcatgtcttttgtgaataaagagagctttatttcttccattctaataaaaagacaatccttttatttctttttcttgcctgatttcactggctaaaacctctgatataatgttgaatagaaaaagagcagacatcttagtcttgtttctaatcttagggggaaagcatctattctctcacaattaagtatgatgttgtagatttttcaggatgcactttactgggctgaggaagtttttttccattcctagtttgggtaaagtgtaaaagaaaattaggaatggattttgaattttgtcagttttttttaatgtgttgaaatgatcccatgtttgttttttttaaagttttttattagccagacatggtggcacacacctgtagtcccagttactcgggaggctgaggtgcaaagattgcttgaacttgggtggtagaggcttcagggagccaagatcatgccactgcactccagcctgggtgacagggtgaggccctgtctcaaaaaaataaaaaaatttgttaatatggtggattacattgcttgatttttaaaggttaatccaactgtatgtttctgaaataagcccacttggttatgatgtatatttggcttcttgatgttgccccacagttcactgatgctctttatattctttttgtgttcttttctctttttgtgttgtatttttggatcgtctttattggtatttttccaagttcatggatttttttcttctacggtgtctaatctgttaattctatgtagttttttatgttagatattatagttttcatctttagagttttgatttagatcttttttatatcttccatgtctcttaatgttttggctatatgaaatgcatttagaataacttttagactaggcgtggtggctcatgcctgtaattccagcactttgggagtctgaggtgggagaattgcttgagcccaggtattcaggactaccctggccaacatagtaatacttcgtctctattaaaaaaaawaataataatttttaatgtccttgtttgctaacatctgggttggtttcagtcaattgattgctttattcatgttttcatgcctctttgcatatctggtaatcttcagctgacagacattgtgaattttaccttttttgagtgttagatattcttttattattagaaatactgttgaattttgttccggatatgtagttatttagagataatttgaggcttgcttttatgatttttttaagaggcctggagcaatgctcaatccagggctagttattcctcactactgaggcaagaccttcttaagcactccactcaatgtcctctgtgaattaagagctttaccagtttggctggtagtaacaggcaatattcctaagtctgcatgattatccatcactattctctcaaattctttcagatgtttttttccccagcctccagtagttgtctcacactttgagctaatcagtactgtgctgaatatttgagaggccctgctgcagatttctgggttttgttctctgcgtagccaccctgctactttcccggggctagctacctttgtcttcatggactctaagctcttctgtttcatcaactcaagttagtttatccacgcacctagctccccttggatttctttctcttccctgggccttagcctgaaaagtctccaaaggttgtaagctgggacaattgaagggtattgcttgtttcctgtctctctagaatcgctgttctttgttgcttaatgtccagtttcttgaaaaatgttgttttctatattatgtccgtttttcttttaagtgagaggacaaacctggttgttactgcatcctgacctccatatatagcatatttttaaccccattattttccattttttaaaactttttttcccattattttctgtagtaaaaataattctggtttgaaaattacaatttctttatgttttagcactagctaatgcaagtatctattatatacaaattgtattggcaattttctttctaaaaaatccccccaattattctgcatatataataatacctacgttttaaaaggtatttttttccaatattattttcagttggttaaaataaactacagtacatactagtggagtctgattgaactgatgtgaagaatacagaaaaatacttagaaatgtttagagaacgcattgtgatgaaatctgttaggagtacaattgttttaactgtaaagcttggcattactggatgggagacagctatagaatacttaagccttattggtgaacatataggaagaggtggaaataagagatgaattacatgaagaagtctttaagtcatggaggcttactgaaatattgaaaaaagcaaataagtagacctaacaagatagagggggctcagaagaatgcatttgtttcttatagatggtagctggagctagggcagtgtagcttatggctttgcttgaatagaaagagttgatttgggataattggatttaaatcctctatttaccacttgctaactgggtaagttttttaaactaaatttctgattttgcatgtgtaaaatgaggataagcatatttatcccgagggttgtagtgagccttaaatagaatcaattacatagaagtatatagcagtatgtttgtgtgcttaataagtgtttgtctttattattttaaagaaatgaccagagaaagctttacttttctattgcatatttccctagtgattatatggacatagaagcagtgcttacagttaccttggaacccatcaaggaaaaatgaagcaaattcctgccctgttgcccttctggaacattacatagtttagatgaaaatcagccagagcacagttagactctattagcataagattatgttagaaaatagtgggcatgataaggccctgaaggagagttctaacttggagaaggatggtggaatttttttatagggctttgacagtaggggtcaggcaaagttcagtttgaggagtagttagtcaaggatagctctcagaggaggggagaattgatcatgtacattagcaattattgggcaatttgaattttattaagaatgttggggctgggcatggtggctcacgcctgtaatcccagcactttgggaggccaggcaggcagatcacttgagatcaggagttcgagatcagcctggccaacatggtgagaccccgtctctactaaaaatacaaaaattagccaggtgaggtggtgggtgcctgtaatccaagctactcgggaggctgaggcaggagaatcacttgaacccgggaggcagaggttgcagtgagcagagattgtgccactgcacactccagcatgagcagcagagtgagactccgtctcaaaaaaaaaaaaaaaaaaaaactcagtttttagtgtcttcacagtagatttttttgtcattggctcttgcggcctttcttcttgtctcccccagttccagccccccaaaatagaagggcccattatcttgctcatgattttagattcccagctcttgattttggaaggcgctgtctttgtgaaatttcagagatcaaggagttagtgttttgtggtgtgggaaatttctctcagtctttgctccttgcattctttgtgcagttttttctttgtttatttcagagacagggtcttgctctgttgcccaggctggagtacagtggtgtgatcataactcactgcagccttgaatttctgagctcaagtgatcttcctgtctaagcctcctgagtagctaggactacaagtgtgtgccaccacgtctggctaaaaattttttttagacatgggtcttgctrtgttgcccagactggtctgaaactcctggcctcaagcagtcctcccacctctgcctcccaaagtgctgagattaggggcgtgagctacctcacccagcctgcagtgtgtcttggatcctgttatgtaggtgctctgtagtagaggaaacagtaatatatgataatgaaaagcttcaaagtagacatatggctgaaagggagatttgaatagggttttgcagcagctattttagttgatgacacatcttcaacttaaattgcaattgccttttttcatttcgcttcatccttctgtgatgatcctagtagaagtcaaatgagatcatttttgatagttggtttgcaggcttcggtgtatgcacccaacctttcaaagactgcctgtgcttttcagggagctcagttttgtgactgaaaggatcagctattctcttctacctttttaatgcactactggtttctagcagctgctgcttaacgctgttcattcttgagtttggtgaattgttttctgtgctccatgtgatttctttgtctttatgaggtacattttgactacaggtgagccaatttcctgtgaatataatctatgctttgaaattaaattatctttatcctctttaaatatgtaaatcttcttagtatctgctagtttgcctcttgctttgtggctccttgtgttcctcttgtaatgcttgcttagcttttaatttaaataccagactgtgttggttagcatccatagaagacataggcctattcaggaaagtgtgaatatttggccaccatatttaggattattggggcatttctttccaatttttcagagtacagaaaaagaggtgagtttcctattccttcctaatcaagttcaccatcgaccttgtactttttgaaccaacttgaatagaaaaaaaacaacctgaagaataatatgtttactatttctacatggatatactgactataactatggaaaatatatttgattagttacatgaggctctcatggtaaatgtgtcagatatagtcaatattttagtattgtcatgtagtattaagtatttttccatcaatgattagaaagttatgattttttgttgttcagcaaattatcatgaaaaattcaataatgttgctttttctttttgatagccagaggaagttagagaacagatttatctaacactaaacggtcactggcaagaaccttttctttgtaacatgttactttgttccctaacctcattctcctccacctgtaacaatggtgaatatgaagcaagtgttcagtatcctagctttctctaattttctgggacgtatctcttttagtctccgtatattaaatcttagggaacctgaaaggcttctttattagccttttttatttctccctaaaagtattgatgtttttataggaatctctgctatccagggataaaacataacatgcaattaaaaaaatttcagccattgagaatgtttttataaatggacagatcagttacttaaaaagttctatagatttgtgattaaaaaaatagttccctatttgaataattgtccaggaaattagctgttgatcatatttaaaatataacataaaaatgagtcttaaaatatgtatagcttcatttgtgttgattgatgttgtaactttttttgagtaaaatgcatcattagaaaatgtatttggaattacattamaaaggtttctatgttttgtttattggtatcacacacgtgtcatgtgggtcatagacttgtttcatagtaaaacagatggcatggcaagggagaagaaacttacatgcaagtttttgcacaaatatcaaagaaattcagtgtactttcttttcaaaaaaacattaaaaactccaaaacccaaggaagaaaaagcttcttgcatttatataacaattcttaatctattagttgcagggcaaaaataataaaatattaattatatagtcaaaaatagcttttaactatgaagaagtcttcctatcaaattcttctgttcattaaacctacttttggttattatttaaatgtaattgggcagttccaagaaaagcttcagaacagctgtaattacagctgcagatttagtcaaaataggggctgtaagaggctgtttactctccttttgcrtctctttcacccccaccccaaataacccaaatttagttgtaaaagtttttggtaagctcaggatttctgaaactggagtctatgtatttaactgcatgcagatgtgatgattacatgtgacttttaaggttcccataaccttttagttcttgtattgctctatgcacagttaagtgatttttgtcagctgtgtctgtattgaattttacagatacacrtatattttaaacacagtttagtgatttttatcaaggcccaggcatctgctcaaactactgagaagggtaatagttttcaatctaaatttgagctaatgttgacattattacaagttgactggaaacatttacaaaagcctgtatctgtgttaaaaaaatatatttcttcaaattttactctactaggaaattgcctttgacttcatctgaaaacaaatttggcaaatgtcttaatttttagagaaagacctactatgataaatcaaaaactaaatacacatctatgtcacatccctccctcctcccagagctttgatctggggagttgatggcattctaaggtctggtttttagttaatcagtcagagattatatataagggttatggaagactgtggcaaaaagcaaggtttagagcctttttccctttccgagttaattaccatttcttttgcagatggcagttatgctgaatattgatcataagatacaataacatatcttggattctcaccacagttttacagtgttacctactcagaatctggttcaaaattgtagtgacttgttgaattgcacatagggaaatttgaagagccttctgctaaagccaacaatttaacacttttagttagaagaccaagtgaaacttgcctgtatttgcattggaccatattaaaactggtaagggtataaaattatataggacatggttcttacctcaaagtacagtgggtagacaaggtgcaaatatatgcattaaaataatacatcaatgattagggtaaataaacttacttttaaatccccagactcaacaactctttaaatcttgaattctaaagatcgagaccaactttcttacagatgaggaaacatattcagagaagtgcagtgaattgtcattaatcaaagggggtttataggtcattctaaatatgagctcagtaatgacaataggtagcaagttaactttgctttttaaatcttgaatgtcagctaatgttgactgattgcttgtttcaagtatttttacagagaaacttctggtccttttctcatgtgagtccagtgggaatatcagcagcatggggacaataggttattttcagactggataaaattgaacagaagccatttcagagaatactggagaactgaaaagaataataaaacacattcattaaggcaaaataagggaactatatttataaaatcacataatttttaaagcacgaattgatttataggtatgaggaaaggtagcaggtaaaatgtgatatggaatataattttgatgattaagtataacttaataattatgtgaggaaaaaggaattaacagaaaatcttttaggaaggtaaatagaactttgagactttagtaagataggaaaagtgaaatgtgaaaaacaagttaattttatatagggaggctatagatttaactcattgttaaaaacttgtcatcatcacaatctttttgtgccttcttccttaccccactggttctctcttaagagaagctctggtgtcatgtgttgtgatgtaatatagtgctgtaaagttctgattttgtcacttacaaccagcctggtcttggaataaaattttgcttatgaagacattaaaaaaatgaataattttgaattagttacttggacttgtgagcttcagttacttagcaaaaaatgagattatgtcttcaatgtgcctaattatacaattgttgggacaatcaagtgaaatcacatgaaagtgttttaaaaaccaaaggtaagtaatatttttttcatattaaaactgtagattcaatccaacatgacagatatttataagcatgttaaatcaagtttagccgaaagctgccttcttacttcagtttagcctaaaggtttttgagctataacaagtggaggcatattgtgagctataacaagtggaggcagaaacagactgtagccacacttgtgccagtcactaagttttggccaatcaaatgtagtcaactgttcaaactgtgttcaaataaggcaaacaccaacctgtaaccagtccagctgtttttgtacgtcacttcctttttctgtatgtcacttcctttttctgtacatcactttcctttttctgtccttaaatcttccaccatgtggctgtgctggagtctcagcgcctactctggcttaggagcgtgcctgatttgcagattgttcattgttcagttaaactcctttaaatttaattctgctgaagtttttcttttatcaagtacctaatatgtcagacgcagtgttgtagactttagatttcaggagaaggaagagaaaggaaataaaacataatgtaaatgtctataatatatgacagaatatgaaaagggtaataagagattcagcttacctatattttggcttaggcaaagagttacccacctgaatctgctctaagtccatgaggcttgtttaccacaagtggcaaagtaggaattttgaccatttcgtgtctctgtctctccctccccacctgcttcccttctctcctcccctttatctccccactccctctctgtctccccatctctctccctgccataaggtgaaagtttaaacttgggctctccaatagttgcagataggagcttgttgatttttttgtgtacaagcgtgaatcagtggccaagtcaaagtgccataaggaatgtacaatttttagactttggtgagtattgccaatgatatagcgtctagattttaatatctgcattgtatacctttccagggcatagaggattaaagggggactttagaaacaactatttcagtcatctgtgaagatactttttacagaatcccagacttagcttgacggctttttatagtgaggaatctttctatcatgtaatgcagaccactttattatgggctccagtatttggagttcttagtcccaaatgaccaccttctccctctgttattctgtattcttttcattttgttagatatattttggcttgactgaagagagaacctgttgatggggaagctaggaatagaaagagaagggataggttcaggaagcttgacaaaaaaggaaataatggtagtaataatggttaataattcttagcactgaagtctcaggtactgtgctaaatgcttttcttatattataacctatagaattgatgttttaatattaaatattaattaaatgaaagattagtttgatagtaaataatagtatttaccctctgttacagaaaagaaactgagctacaataatttgcccagcaaaaggtagagttcttgctgggctattgattctagagaccaaacctttaacattgccatgtattgtctcttagggataaccttggaggcctctttgggaaaaattttctccttttttttttctaagtatgatagtgtttggaaataaaagattaacatttcaaggctggtaatttgggtggaagtggggaggaggtgaataaaatttattcaatattttaaggttagatgaagagataaggaaaggaaggaacctggaagcagatgagtgaatgtaatatgctttgttagtcagggagaaaggaaattttggtttagctgttgtaatgactacattttataatactatataaacatgcaagtttgatctttgtatagtttagtaaaagctatggtcattagtttatagtccagtgctgtccaatagaaatgtagagtgaaccacacatgtaattttttaactttttgttagctacatttaaaaagcaaaaagaagcagttaaaattggtttcagttatttaacgtaatgtattcaaaatatttcaacaactaatcaatataaaaatatcaattagagttttacattcttttattcatattaagtctttgaaatccatgtgtattttacacttatagcacatctcagttcaaactaaccacatttcatatggctacatttggctactgaataccttaccagacagtgcatttacatactattagaagagaaaaggtttattgtagttgctatgttcataaaaagtttctgattgaattacaagtagatggcttattctscctctgtatgtaacaaacaaggagtgaagaggaatctggggctgcaaagcatcgctctccagttgtatccagagaatctactcaggaggggcaacgtatttttttattttttattttttaaattttactttaagttctgggatacatgtgcagaatgtgcaggttcgttgcataagtatacatgtgccatggtggtttgctgcacctatcaacccatcatctaggttttaagccccgcatgcattaggtatttgtctgaggaatgaaactataaacatattaaatcctataaaaagaaaaaaaagtaaggttctgaagggttccagaattcaggagacggaagagaaaggatattttttatacttaaggaagtggggaggaaggtttaccaaatgtttaggtttctgctgattgaggctttgttgtatagttagaaggacttccaagagactccagaatttctgctatcgtagttctgggctctggttttacctaaaaactcaatgctttttctctagatagagctctggaggagaggcacacagttcttacttagtgtgaaacatggtgtttgttggtttagggactttgtacctctttctggaacctttcagaacctttttttttctttttataggatttaatatgtttatagtttcattcctcaggcaggaattactgaagtttgcttttcccttaaaaaaaaaaaaacccagtaaattaaataatcacatttaaaaaactatagcaaatcttttctaactatgaaagttaaaaaaagtcatgtattctttgtgaaaagttaggtaattgagatacctgtttttacatattaaatgaacaggtctcaagcagagttttcactttggctgctgcttcttgcactggggttccttgggcaggagcactctggtgaatcatcacctctggtttggatgtagtagtactggatattttgtttcttttaaggagagtgtgaacaaatgggagttatgtgttcctccggggtatggtccatttgtatattgctctttatctgtgtatcatattttatttggctaagagcctaattataatatatttaatttttaaaaatcttagctatttgtagggtttaaaaaactaaacaacagcaatagratttgtattgctaattgagagataccaggttaaaatacaagttttctatataatttagcagaataaaacacacttatcatttttccattttctgaatttgtaatatgctaatgttatcagtatataatattttttgctatgactaattgtgttatatttgttgtgaatgtagtcttggttcaagtaggggtaaggaggtattttggaaaccagtgcttaccattttggggataggtggtgggaatagacaagctagaaatacacttggaaggaagaaaaccatttagtaggaacttgagatgaggggagaaacagacatttttaggaaagtgtagtgttttaaaaaataaatttagacacaaaaaattaatcattaggaacataatcagattttagaaaaatttaagtagaaaaaaatcacgttaaatagataactttgaagtaaatactaattatgtttatattttgaggggaggaaataagtctcttagttggcccccttgaggctgcctagatgtggagaaccataagactgagtttgtaccatctttgagttaaaaagctaaccctgagtgattttggaatagattcctttaacatattttcagtcatattccttttagaattattattacatagatttcctaatttgtaattctcaagtgctgtgaaacattaaacatttttagcaacctcaacccatcatagtcctatgactgcccttctttcacttttagtcatataggaacatttataagagtatctgatatggttagactttgtctcctcacccaaatctcatcttgaattgtaatccccataatccccacgtgtcaagggagagacctggtgggaggtgactggatcatgggggtcgttcccccatgctgttctcatgttagtgagttctcatgagatctgatggttttatacgtgtctgacagttcctccttcacccactcgctctctcttgcctgccgccatgtaagacatgcctcttccccttctgccatgattgtaagtttcctgaggcctccccagccatgcagaactgtgagtcaattaaacctcttttctttataaattacccaattttgggcagttcttcatagcagtgtgagaatggactctggccatgattttcttggtatgactcaggaaaattcttctatggggtatggctgtggagtggttttgtgcttgctgttgttgccgtggtgcttcagaaagttagcctagattaaagagttcaggttttggagtcacatgggttgtcttgaattctgtctctgacccttaactacccctgtgacattgggcaagttactagacctcagtttcctcaactgcaaattggaaataatagcaaccacctcctagggttgtgatgaagtttaaggataaatgctgctctttttattgagcatttatttattccagccagacactgtgttacatacttcatatgcagtatataatttaatttgtatgtgtatattagagtatgtaaaagttcatttccaacggtaatatatgtccagtaaccggttgctattactttttctatatgttgattccttaatcagaagttgatgttcctaagatgaaagatgggaatgggcattttgatcagatctgaaggacttgtttggaagttgacagtggtttgaaggtgaaatatttactagagtgtggttcaaggataatctgcatggtaattaccttggaagcttgttaaaatgtagagttttgtgtttgtcatctgaaactctgagtctgaatcaggatctctggccgtggagcccagaccctgcagttttataagcttaatcataattcttattctctatgaagtttttgaatcatctttttaatttattcttcccgatgattaaaaaatgattctaatgatttttaaatatttttatttgatgtaatgagctttccattttattggtaatggaggtggtaaattttttccatttaaatgtttacatatatgtgatttttgtatgttataagagtttaatgggtggtgacattcattcagctaatgtttagtaaatattaaaatattaaaatttataaaatacaatttacttatttggagtattttaaaatgaatatatcattttattcagttattcaaacaaaatgattgttgagactatgagtaaaatagtctcaatttactataaaatatgtcatattttactcagtttatagtctccgaatagggtgggaaaggagagcagattgagaatgtgctgttatgaagctaggtggagaggggaagggagcgattttctgctgctaactagaagaaaagcataactacaaataatttatataactaataagatttcaaagcagatagaaattttcagggagttttggtcagagtcattttattagtcatattatttaatgaaagaataatcaggaatgctcagcctctgtgttttctactattgctttgctccctaagaacgctcttttagattttatctgtctattcttttgagttttatctttgccttcctgggaagtctcactcgactttttaggaaatcaagttgtatccccacagtgcttcacatgaccttattttttttagattcttcaagtaaaatcttactcaaaggaaccaataaattgcctcacgtcataattttaaacttaagtgtttggaagactaatttcagtgagtctttgcattggtatctttagcccacaaatctttttggctccagtatccactttaataattcttatgggttaagtaactgtatttttaatatctgtagttttgttcattatcagaaactaggtcaccagggtttgttgtgtcattgttaattaaaaaggtattgtatgctttttttttggaatgtgcttgtactgaatgaagccaaaatatgttagtaatgctctgctttaaatactcatagaatataattttgcatattttaaactcaatctatctgccagtacaacaatgttatttatytctgagaattttgactattctttcatgctatttagaattcaatgaattgttaaaacttctagtaggctttttactgacagtctctgtctgacttctcctttacaagttttcctcaatattttcagaagtaacatttgggtcttactgaaataggaatttttggttctatagtagcagatggaaacagtagacttttttagaggttggaagcagtgggatacagagaaggagaaaaatcagactaaatttatgtcatgcctctttcattgtgaaaaataattatagcctcatgtacattacttttctgagggttgtagtggtggtaatggttgtggaagtagtaatagttgtagggatgaattaaggaggcattgggtaagaacgtgtctcccaacataggatttcagttacttcccaaatataaataacagtggttattaccaaaaatttttcttcaagcgacagtgatctcactgtatgttgcccaggctggcctgaaactcctaggctcaagtgattctcctgcctcaacctcccaagttgctgggactacagacacacacacacaccaccatacctggctgaatttttttttaaccagagaagagcacactaattttttctttacccttatagcattttcattaccagttattatactttcattctgaatgatttcagaatgtttggggatggtgttgataaactagaattattttgtggttaagtagaggccctcaaacagagtacagctcaagtctcaggtttaccacttttttttttaagtagtacatggggcaaattatttaatatcttattttgccataactaattattaataaatatctactttataggtgtgttgatgattaaatcaatttgtaaagaataatgggctgggtgcagtggcttgtgcctgtaatcccaacactttgggaggccgaggtgggaggattacttgagcctaggagttcgagataattctgagcaacaagcgaggcctcatatgtataaaaaatgaaaaacttaggctggtgcggtggtgtgtgcctgtagtctcagctacatgggaggctgaggcaggaggattgcttgagtccatcgaggtctatccaggctgcagtgatctgtgattgtaccattgcactccagcctgagcaacacagcaagaccctgtctcaaaaaaaaaaaaaaaatgccagcaaatagtatgtgttgaatatttagttataagtattattcactctctaaaatagtcttcttagtaaactctaattgaccttagggtaaaaaaatttttatatttaaaagctcagaaaaattcagcttagttatttttaggctggtgtttggtctcacatacacacttaacgcccctttcaaactgttatggaacaatgtttttcaaactttaatgtgcatatgggattgtgtagggatcataataacatgtagattcttattcagtagttttggaataggatgagatgttacctttccaacaagctcctgttggtaatctggatgtagctcattcttataacacactttgagtagcacagttatgcagtgttccattaagtggttctcattcctgctttcagtatattataaacacttagatattttttgttctttatgccttggctctgtgtcataccagttaaattagagctttgcctttggggttctgggcatcatcgtcgtcatcattgtcgtcatcatcatcatcattttttctttcggtaaaaatatcctggatcattctcttgtgaaactagcattaagagccaccactttagttatctgaaggagagtcataagctaagaagctacattttaggtcttctcttactttgttgtcttccattttaagctcatttcctctgtagagatgatggtggacagctggttagaactcttaaactggaaggcagttaatatgttggcctgaagttttcttttcgctagactaaaaggtttgactgttgaacctttctttatggatcctatttcctatcccttttcatcatttgtatagtcttctttggactttccctaatttctcaatagtctccttaaagtgtaataacccaaactagatacaaaactgctgtaacaaaactgaacaatggcagaggcagaagaatatagatctaaaaatctgtggttttcattagcgttgaaaacttgtatttgcttcagactttttattggccttttctttatgtttttcagggttaaaatgtgttttatgccatgatatttgtttcaatatattcctttcttaggttatgcttcttctttcttcctcaactgtgcttcttgtatccatttcccatcttgcacctattttggaggagaggcagtaaatattttcttatggacttaccatgtttsggaagaccgttttccaaagcgatcaagatcatgttaaattttattccatctagccatgatggctcagttaggatcaggtcaggaaaacagtccacactaaatactcgaggcaggaggatttcttgagaccaggagtttgagaccagcctgggtaacatagtaagacctgtctctacagaattacaaacaaaaacaaaaaatttcagcccagaaaatttaatacagggaagggattatacaggtattggagggctgaaaaagcaaacagggaacactggggtaacacagagacaatatttgcaggaattagccactattcatatggttgagggggaaataagaacttggagttgggacctcatagaattggggttcaaaacctctggagggggtacttcctgacagctgttggtatgtctgaggggaatttctgagagtgccagaaaaagctggtggttatcactgctactgctggggtggaggatctatgctgggcaatgctgactggaaaaagcatgtactgcattctccctctagtgtccttattggcagtgtgaggaagctagctgcagaagagaaaagtagttttcagagttttattttcagtattacaaagatgagtattaaagggtagatttggatctgagagaaaatagctgaataaccagtatatatagccttctcttctggtcaaaggaggccataggcctttggtctcttggtctcttttcctagctacttggaccccagacccagatattcttaatgctgagggtttggaaggaaagttgttattattatttaaaaaattaatttgtttagttaatgtgatgggggagggggcatgagacgggtctkcttttcttttctttcttttttttttttgagacagtgtcttgctctgatgcccargctggaatatagtggtgtaatcttggctctctgtagtcccgagctcccaaactcaagcagtcctctcacctcagccacccaagtagctgggactacaggcacctgccaccacacccagctaatttttgtattttttgtagagacgaggttttgctatgttggccaggctggtctcgaactcctggcctcgagtgattcacccatgttggcctccaagtggtctgggattacaggtgtgagccaccatgcctggctgggtccacttatttattgttatttttttttttgagacagaatctcactctgtcactcaggctggggtgcagtggtgggatctcagctcactgcaatctccaccccccaggttcaagtgattctcctgcctcagcctcccgagtagctgggattataggcacccaccaccatgcctggctaatttttgtctttttagtagagacagggtttcaccatgttgcccaggctggtctcgaactccagacctcaagtgatctgtccgccttaggctcccatagtgctgggattacaggtgtgagccaccgtgcccggcccgggtccacttattctgagataattctgttacagctttttttggtaacttacatttaatcattagatactccttctttgcctcttgaggtatttctgttttttaaaagcccttatttaaaatgtaaaataaataatggtaaaagtaatgatgttacccataaacaaagttttaaaattggttgcttattagccaaacagtggtctgcagtggtaaccaacctctgaaaagattatgccttttttactcattcaaaaattccccctcctgcagagcttcttcaattttaatgtgtatatgaatcagttgaggatcttggtaaaatactgattctgattcaatatgtccctgggtaaggcctgagattgtgcatttctaacaagctcccaggggaggctggagctactggtccctagaccagactttttwaactcccttccctcccttgagaactactggtttggcttagatccagtgttggacttggatggttgagtggtgagtgatcataaagtaagagtttctattgtaagcctgcccgtctagaaatattttgagcaattttagtagagctatttatagctgtttctttccaggtaggatcagagaaatatatgcttctgaataggttaaattttcttccataatataatgctgccctgaatgcagaaatgtgcctatcacttgtaattttcctggaaggcgtgagactgcttggtaattgtgtacatatttaagggaaactgagtaatggaggacagaatagaacaattaacaaattcatgcatcagataacttgctttcattaaagccattgttactcttatttattgattgttcctgatgataggacatctgcagatttcaaaaagtgtgtttagtgtgaatttcatactgatggcatttctctgcttttgacagtttcatatacttaaacttgycattaaaacacagcatcttgccttgagccaaatgaaactttgaatagagcccaaatttatgaaattgttaatttctctttacatctagattttactttcagtaatttctatctgctaacacaaatagaaaggtaatctttcatttggttgccatccttcaagagcctctctctgcccttccctccctsccttcctggatctttccttttgtctttacagacctagattttgaaaggttctaggttccttttgtctgttgatactatgtgaatgttatccttaagtttttaattcaggctacaactagacagataatgtgtctcacaattagctggggtgagagagttaaaatggaagttaaggattcaggggattcctacagatgggtgaagaaaaaagctcaatgttaggatccttaacaaagcattttgattggcatatggagacctttgcgtgaacacaaatgttcatatttgaatatttatagaagataatctgtcaaaattactgttattttaatttgccaagcttggctgattgccgcagttggatgttagttgaattcaagttgaagagttgtaaatatgttctggtgtgggacatgctttttgtccttgaagctgtttgaatttcttacttctcccacctacacccccttctttaaaactgcgaggcttttttgtattagttgaactttcatgttcttttttaggaaaaaatattaaagtaggatgttaactgtatggattaaaaattttttttaactaaatttgttgacatttggtgatcaggaattgtttaaataattttaactatttgtccaatctttgcttcaaaggacctgttcctggagactcaaatgtagggatatatatcttatttgaatggttttgtgtgggatatgtttcacattaacagcaaagaaaatgtagacttctagataattgatgtttcccctttcttttatctcacttgaacagctaataattttagtgacccagattcaagcaataatacctgtcttcataattgtcatgtggttttgtcagcttcttatattctaggggaaggaagataagacttttttaaatatattgaaataacttggttaataaatactttttttctctttttagaagccaggaacctgttctctttccatagtgtctcctcactcagaaaacgttgtgttctcctgcctcagcctcctgaatagctagggttacaggcgcccgccaccatgcccggctaatttttttttgtatatttagtagagacggggtttcaccttgttggccaggctggtctcaaactcctgacatcaggtgatctgcccgccttggcctcccacagtgctgggattataggtgtgagccactgtgcaggagaatggcttgaacccaggaggcagaggttgcagtgagctgagattgtgccattgcacgccgggctgggcaacaagagtgaaactccgtctcagaaaaagaaagaaagggaaaaaaaccccaacacactgtattaattattgatgcagtatcactattcttactgagactacattattttagctttagagatgatatagtggctttcttaaagttatatgacatttttttgggagcagggctgtattctgtgccccatgtactaagctatcttgtctcatttaactagccactgttatctgaatagttgagttttacatgygtaaccacttgacctgattagtcttaatttttttcctgatgtttttatttctttatctcttagaaaatgacataattgaatcagttttgttggttattactttagctagaaactatgtcaagtactacatttcagttttttttttttttttttttttttgagacagagtctcgctctgtcacccaggctggagtgcagtggtgcaatctcggctcactgcaagctcctcctcccaggttcacgccattctcctgcctcagcctcccaagtagctgggactacaggtgcccgccaccatgcctggctaattttttgtatttttagtagagacggggtttcaccatgttagccaggatggtctcgatctcatgacctcatgatctgcccgccttagcctcccaaagtgctgggattacaggagtgagctaccgtgcccggcctacatctcagttttatttagactttgttttggagtttcaggaatttgaggtttcaggaatgtattttgtatttagaaaattaagagtggaacttttatartattttctgtctttcacaatcatccatcttcattctcatttgacttttttttgctatattttttttctagaagattttatataatcttttcctgttactacttttgcccattctttttgtgaccatctccaagtcatttcccttgtatctcaccstcattccttattatcttcctaggaaaacttatttgtccaactctgtagctatcctctggctggataacaaaattattaataattccttaagatgttaccctagctactaattttgtaatagtccaccatgtgttcactgtgtaaagggttcagaggtgactgttgtacctaatgcaccacagatgtggaagtaataataaaatttacatatatgtaaggtgaaaatattgctaatacgttcccttgggtctggccattctgatatgcttgctaagtttggaggcttattttgtaatggttctttcggatttcttaaggtgaattagacattatgtttaccttgaattttaattggtatacttttggttaagtaggttaaaagtcaatggaataaaagttaagccagaaatataaaaagtaataagccatttttcagtgtgatttgaaaaacaatttagctgtatttcttgctataaaaaaagaagtaaagaacactatacagtggactaagattttctaagtaaactaattttgataaaggttaattccatggtgatagcagatgttggggattggcatccatatgtcagatttcacataaaaatttagctttctactgttttttatttccttaggaagaactataaaacttaaatttgtatagaaggtatgataatgctattttaataaacagaatttgttattttgaaaattgggtagtaaggacaaccagtgaattgtactacttattgatttttttaaaaaaatgtatttttaattttcgcgggtacatagtaggtatatgtatttatgggatacatgagatgttttgacacaggcgtgcaatgtgtaaaaatcacatcatggacaatgcagtatccctcccctcaagcatttatcctttgtgttacagacaatccaaatacactcttagttatttaaaaatgtacaattaaattattgattgcggcagcacccctcacacaggggcaccagctgccggggtctgcccatagaccctgacccggccacggatgaataaagtacactgacacacagatattctgttttgccagtccagctgagggtgtctcagctgtttacagactccctggagggttctgtaaacagttgtgaccatgacctcgatcagcaagtgagacttgcatttatgcggtaagattaattaacaaaggcttgagtcaacaccattagaggtaattgacattgtggactttccaagtaaaaagcccttaatcacccatggcacatcaaaggttagtcttaagattatatgagtaaacaagctagctaggtaaactactctgccttcctttattactagtttaatttgtttaaaggtaaagatcaggttgccttcaaccatgtctattactgaagttatgcaaactctcggccttccaagaagatttgtgtctgtctctataactatcttcaatatttttcccaccagcctgattgaaccccagtaattgattatagtcaccctgttgtgctgtcaaatactaggtcttattcattcatcctgtttttttgtacccattaaccatccccacctctccctcatcccaccactacctttcccagcctctagtaaccatccttctttttccatgggttcagttgttttgatttttagatcccacaaataagtgagaacatgagatgcttgtcattctttgcctggcttatttcacttaacgcagtgacctctggttccatccatgttgcacatgacaggatctcattctcttttatggctgaatagtactccactgtgtatatgtaccacattttctttgttcattcgtctgctaatggacacttagcttgctttcaaatcttggctattgtgaacagtgctacagtaaacatgggagtgcagatatctctttgatacactgatttccttttttggggctatatacctagcagtgggattgctagatcatatggtagctaaatttttagtttttttaaggaacgtccaaactcttcttcatagcagttgtactaatttacattcccaccaacagtgtatgagggttctcttttttccacatctttgccagcattgattattgcttgtctttcggataaaagccattttaactggagtaagatgatatctcattgtagttttgatttgcatttctctgatgatcagtgatgttaaacacttttttttttttttttttgagatggagtcttgctctgttggccaggctggagtgcagtagcatgatcttggctcactgcatcctccacttcctagattcaagcaattctcctgcctcagcctcccgagtagctgggactacaggcacacaccgctatgcctggctaattttttgtttttgtattttagtagagacagggtttcaccatgttgccgaggctggtctcaaactcctgagctcaatctgcctgcctcaacctcccaaagtgctaggattacaggcgtgagccactgtgcccggccgaacactttttcatacgtgtgtttgctagttgtatgtctgttttttttttgaaaatgtctgttcagaacttttgcctgtttttaaattggattattaattttttcctgtagagttgtttgagttttttttttttttttttttttttttgagatggagtttcgctcttgttgcctaggctggagtgcaatggcataatctcggctcactacaacctccacctcccgggttcaagcaattctgttgcctcagcctccgaagtagctgggattacaggtgcctgccaccacgcccagctaattttttgtatttttagtagagacggagtttcaccatgttggccaggctggtcttgaactcctgacctcaggtaatccacccgcttccgcctcccaaagtgctgggattacaggcctgagccaccgtgcttggcctagcttcttttatattctggttattaatcctttgtcagatgggtagtttgcaaatattttcttccattctgtgggttgtttgtttgttgcttgtttactttgctgtggagaagctttttaatttgatgtgatcccgtttgtccagttttgctttggttgcctgtgcttgtggggtattacttaagaaatcattgcccagaccgataccctggagagtttccccagtgttttattttagtcatttcatagtttgaggtcttagatttttgtctttaatcaatattttgatttgagttttgtatatggtgagagataggagtctagtttcattcttctgcatatatatatccagtttccaagcaccatttattgaagaaactgtcttttctgccatgtatgtttttggcacctttgtcaaaaatgagttcactgtaggcgtgtggatttttttctgggttctcggttctattgttctgtgtgcctgtttttatgccagtaccatgttgttttgtttattatagctctgtaatataatttgaagtcagttaatgtgattcttctagtttggttctttctgcttaggatggctttggttattctgagtcttttgtggttccctataaattttagggttttttttatatctctgttaagagtgtcattggtattttgatagggattgcattgaatctgtagattgctttgggtagtatggacgttttaacaatattgattcttccaacccataaacatggaatatctttccattttttggtatcctcttcaatttctttcatcaatatagtatagtttctgttacagagatctttcacttctttggttaattcctaggtatgtatttatttatttattttggtggctattgtaaatgggactgctttttaaatttctttttcaatttgttcacatttcacatatagaaatgctacttatttttgtatgttgattttgtatcttgcaactttactgaattagtcagttcttaatagtatcaattctaatagttttttggtggattttttatgtttttccaaatatatgatcatatcatctgcaaacaaggataagttgacttctcctttacaattcggatgccctttatatctttctcttgtctaattgctctagctaggactcccagtactataatgaataatagtggtgaaagtgggcatccttgttatgtttcagatcgtaaaagacaggctttcagtttttccccattcagtgtgatactagttgtgggtcttttttatatggcttttattatgttgatgtgtgtttcttctatactcatgtttttgagggtttttattagaagggatgttgaattttatcagtgttttttcagcattaattgaaatggtcatatggtttttgtccttcatttgttgatacgatatatggtgattgatttgtatatgttgaaccattctggtgtcccagggataaatctcacttggtcatgatgaatgatctttttaatgtgttgttgagttcaatttggtagtatttcgttatggatttttgtatgaatattcatcagggatattggtccttagttttcttcttttgatgtgtctttttatggttttggtactagggtaatactggccttgcaggatgagtttggaagtattccccctcctctatttttcggaatagtttcagtaggattggtattagttcttctttaaatgtttggtagaattcaacagtgtaaccattgggtcatggcttttctttactgtcagacttttaattatggcttcaatttcattatttattattggtctgtttgggttttggatttcttcatgtttcaatcttggtaggttgtatgtgtctaggaatttgtctatttcttctaagttttccaatttattggcatatatttgctagtagtagccactaatgattcttcggatttctgtgatatcggttgtactgtctcctttgttacctctgatttatttggatcttcttttttccttagtctggcttaaggtttgtccgttttaacttttccagcaaccaactttttgattcatcttttgtattttctttatttcaatttcctgtatttctgctctcatctttattatttattttcttctactacttttgagtttgttttcctcttgcttttttagtccttaaaatgcattgttagcttgtatatttaaagtttttcttcctttttttgatgtaggcacttgtagctataaaattccctcttagtacagcttttgctgtattccataggttttggtatattatgtttccattatcatttgtttcaaggaagttttcaattttcttcttaatttcttcattgacccacttgtcattcaggggcaaatcatttaatttacatatatttgtatagtttccaaaattccccttgctattgatttctagttttattttattgtggtcggagaagatgtttgacactatgtgggtttttttttctttaaatgttttaagacttgttttgtgacctaacatatggtctatccttgagaatgatccatatgctaaagaaaagaatgtatattctgtagctgttggaagaaatattctttaaatatctattagatccgtttggtctatttctttgttgattctctgcctggaagatctgttcagtgctgaaagtgggatgttgaaatctccagctattattgtattggagtctttctctctttagctctaataatatttgctttatatatctgggtgctccactgttgggtgcatatatattaaagtacttttttatatcctcttgctgaactgacctctttattattatatagtgaccttctttgtctcttcttacagtttttgtcttgaaatctattttgtctgatacaaatatagcttctcctactctgttttggtttccattggcatggaatatcttttccatttctttattttcaatctgtgtgtgtctttataggtgaagtgtgtttcttgtaggcaacagattaatgggtcttctttttttaaatccattcagctatcccgagtcttgtgattggtgagtttagtccatttacactcagtgttattattgacaaacaaggacttattcctgccattttgtaatttgttttctggatgttttgtggtcttcccttacgtctttctttccttcctgtcttcctggatgttacagcctactacccacctggggtatatggtatagcctattgcttctaggctacaagcctgtacagcatgttactgtactgaatattgtaggcaattgtaacacagtagtaaggatttgtgtacctaaacgtagaaaaggtacagtaaaattatggtatttataatctttatttttgtagacagagtcttgctcggttgcccagggtggagtgcggtggcgcgatctcggcttactgcaacctgcgcctcctggttcaagcaattctcgtgcctcagcctcccaggtagtagctgggattacagatgtgcaccaccatgcccagctaagttttgtaattttagtagagacgaggtttcaccatattgtccaggcaggtcttgaactcctagcctcaagagatcccctgccttggcctcccaaagtgctggaattataggcataagccttcgtgcctggctgggtatttatgatcttatgggaccactcatatatgcagttcgttgttgattaaaaccatcattatgtggtgcatgactttactttgtatgacaagttactgaacgttctaaaggagatatgaaagtaacttaggtttgatttttgtttgaaattgtgatatttttgccggctgtggtggctcatgcctgtaatcccagcactttgggaggccgaggcgggtggatcatgaggtcaagagttcaacaacagcctggccaagatggtgaaaccccgtctctattaaaaatacaaaaattagccgggcatggtggcgggcgcctgtaatcctagctactcaggaggctgaggaagagaattgcttgaacctgtgaggcggaggttgcagtgagccgacatcacgccactgcactccagcctgggcgacagagtgagactctgtctcaaaaaaaaaaaaaaaaaagaaaaagaaattgtgatgtttctttcccattccaagaccatccttttcttagtactctttctttcctttagagctaggctagtggggagcagaatcatgagcttaaattagtggaatatgtggacattgggtagcatggggagaagtgtttcagcttctttctctaaactttaatttccattctttggtgcttaaagtggtgttttaatcacttgcatctggttcaagagggtgtctgattctttgcaaagctattctatcgacaaaaagcattcacagtgttttcctagtggattaatattgggttgacatctatttgcatgttaagtgctgtattgttatcatttggcatttattaactagccttgatatactgtgcattagttggcatttatacatgttttagtccctgctctagagaaaatatcctaaaagggagctaattgtgggaaatagagccttttctcacatatccagctgcctgggagctttcctctaaagacctttaagcattggaaagtcattcytcaagtagttaagataggaaatgacagtcgtgtaaaatagggccttaaaaacaactaccaggtagactcatgatagtgaccctacagggaattaacaacatagatatgattttctcaaggagttgggaatcttcttattaaaattagagcagtgaaattgttcccttctctgtagaatataaaaacaaaatcaaaaacaaaacaaaataaaaaatcgatcaaacttctctccgtgtgttaacaaaacgaccatgagatctgtggaggaaggaaaaaggagaaaactttattttcagagtaacaatctgcagataagggaaagtaacctctggtggaactgtaagcacgtgcttcaccgaaggggagtgaacagtagtatttaagccttctagggtttgttttacatgcatatccatcatgtaatatgaattgtttgaggaatgtctatgaatatatatggggaagtctagtgcatgcacagtgagttaacatataagtaacatacatcccatcttcgcttcagggcacaattttagcattaaaatgaggtggaattcagctctttatgtcaacaggtgaactatagagcacaaagatattttgtatgcagtctctataagctggctaaaactggcttagggtctgtagcattttagcaggaaagaatgtttgtaggactggcctcctgtcctatcagtgctgttggtaggaccctcaaggcagggttgtcccagttgtctttatcaggcagtttaccaagatcggttgggcagtgtttctctagaacagatttctgcctaatagaagaggaaaacttcatggcagttaataagaaagaatgtttgtaagaatggcctcctgtcctatcagtgctgctggcaggaccctcaaggcagggttgtcccagttgtctttatcaggcagtctaccaagattggttgggcagtgtgtctctagaacagatttctgccgaatacaagaggaaaacttcatggcagttaacaaaccctttggtagttaacaatgtacgtatgtatgaccaaacccttgttcctgctatggccatttaattttctctcttgagggtcttatcttagctacagaaagtccatcttatctatcattgttgacctttggatcacagctagtagtggtttgaggacagaatgtatcaatgtatcaatagtttctgtcttgtcttcaccgctgagtaggtatacaaaacttagtcaagtcaaatcacttctttttttttttttaaatttatttttttattatactttaagttttagggtacatgtgcacatagtgcaggttagttacatatgtatacatgtgccaagctggtgcgctgcacycactaactggtcatcaaatcacttctttacctcagttttctcctcttcaaaatggagataatgcctaccttacaaattgatggtgagaattaaatgaggaaatgtgtgtaaaaatgtgttgtatgcctggtacctctttggcatgcaactttgtgttttcctccttcctttgacattagtaatatttggatttcactctttgaattcagtggttacttggttgtggaatcaaattattttgtctttccaaacctcatttttctctaacataaaatcagtaatacacactttatgaagtagtggttgaaattcagttcctagtgtagtctaggaagattttcttgaatctgaatgtcaaattgctaaaaacttgtataaatttgtgagttttgctgtgtagatcttttggacatgaaaatacaatatctttttaagaattaaacagtaggagaaatatactaagggaaagtaagtctctagaatgttttttgggggactctacaatagcttactgcattacagttactgtaattcatcaagataatagggaaattatgcatccaaaggatttatttacttgaaatagcacctctagaasggatattcatagagcagtaatataagaagtgagacacttgaacatacctttttctttgctttttttttttaatcttaggtaacttcagattttaataagatttcactatataatgttttgtgggcagatattgtaaaatctactgaaaatttcccagtttagtaattaccaaagaaataataaaccaatattaaagttcagttacaaaattaaagtcaggactcayaaacaaatcatgttaaatgagttatgaattaaattagtgttattgttgagtttaactgtgtgtcaaatcaatataatttctttgacataatcacagaatagaaatcaatgtatgtgtggtacattgtattgaagggttacaaagtgatgaactagtgagtatgtatttttaaggatgttatagacctatgaatttcaattatatttgtttaaatgtgaatcacttttataagcagcagcaaaatatcattgcctttgtattttgtagcaggtgatttagcttttgtgtatattcagataaatataaattttaatttattttattttgactaaagtttaagagataatttagcatattgtttgctaatcacttttaagtaatctcagtttagctggttgtggtaatgtgtgcctgtagtcccaactactctggaggctgaggtgggaggatcccttgagcctaggaatttgaggatgttgtgtgctattgttgtgcttgtgaataaccacagcatggtactctagcctaggcaacatagcaagacyttgtctcttataaaaagaaaaggaaaaaaaaaaagaaatttcagttaataattttatttgacatgttacagctccttatttgaccctgaaaatgttgcagtgagaatagcctttgcatgcatagtccttaaccctgaagaaaaggataaaagaaaataaaatcaaaacttagttgaaaatcaggaagtgcggacaagcttctgtcgagaaaatggaggtgaatttatgtgtaaatgttaaagacatatggatatgttgattatagccatctttaagtgtttgtgttataggcagacggtttgcagagttagagtaaatggattaaagatattgctaaaattaaaataactttatttttcaagtttttttggtattatgtttgttttttcaggaaaccagatacttaaatataaaactcggtaattatttttgtaactattttattaataatttaatgttaactactagaagtctataattttacattgaatatacaaaatattatttgggcaaatgattattaaaataatatcatagtaatatacatcccccctttttrttatggtaaaatgtacataacacaattcaccatttaatcatttttaagtatacagttcattgttatgcaaccatcatcactatctccagaacgctttcatcatcctgaaatgaaactgtgtgcccgttacataataattccccgttacttattatctcccctttaatcactattctactttctctctctctgattttgactattctaagtatctcgtatgagtggaaccacacaaaatatgtccttctaggactggctcattgtatttagcataatgtcttcaaggttcatccatattgtagcatgtatcagaatttcagttctatttcacgatgattaatattccgttatatgtgtataccacattttgcttatccatttatctatcagtggacatttacattgtttctacttttggctattgtgaataattctgccatgaactttggtatgcaagtatctgtttgagtgtgttaatatattttctatatattttaacagaaatttgttagtttacatatttttacttaaacgagctaaatatctgaattttcagtgttatcagtgaatatttattgaataccttgtatattgtaagtattgtgggggtataaagagttacaatatcatgaaactattgttttaaagaatttacagtctaataacagtaatagggtgtgtttataaagacacagaacctggtagcatatgctttttgaagctgaagagatatctgagctctgatgcaaaccagcatcgtttcttgccaaaatttttgtttgttatcctgagcagttaggaggcagatacatggccacagtcaacatatgcatattccattcaagcatagcatttaaccttcaaggatgaattttggggtgatcatatcaacatggaaattagatcatgacatatctttaaagtcttctccatggaccttatctttaggtgagttactttccttctaccaaactgccaccttaactctgacctcatctcctatcccctactcccaccttgcactgggtaattttttgttgtggatacatttcttatgtatgtaaactggcttaagtgtaaacaaggtaaaagtcataaggaggaactacatatatgtttcaaggttctttccagctttatgattctaatttaatccctgtggtacctgtgtgttgccagtgaaagaaaacagagttagcatgcttagaggtttcacagcagagctgctttgtggtgattttaaaggctaaaactttgaaataaaaacagtttggtatgtttcagtggtctctttttcttctctttcagagtacttttcctggaaaagcagaataagtcttttatgaatttagtcataactttgcagtttaattggacttttagggtttttctatgtgtgcaagctggaccttttgaagtttaacactggaatactagcatgagagtgttcctactcttaatttccactgagttagaccaaaggaaaacatatattttagattcatattttctttgaatgatgttttggagctcaagatgaactttaaaaaacacagctaagcagagcttctaaaaggtaatactgtagtagtatttttttcctccatgttaatctacttggctccccatagtgagcttgaactgtgagtggtaaagactcattactttgtagggtgtcctggccctaaaaataaaacttctttctcatagcctacagcctaygaatgtgattattctgtaagcctctgtaagtcactgtaagaacagtgactgtggcttcatttttatttattttatttttcttatttatttatgagacagtctcactctgtcgcccaggctagagtgtagtggcttgatcttggctcactgcaatctctcctcctgggttcaagtgaatctcgtgcctccaccacccaaatagctgggattacaggtgtgcgccaccatgccaggctaatttttgtattttttttgtagagatggtgtttcgccatgggcctgtctcaaactcctcctctcaagtgattcacctgctttggcctcccaaagttctgggattataggcatgaactactgtgccaggcttgtggtttcatttttgtaaaacgtttagtagagttggtgccttgcacataataaaatgtatcttctgaggttatgattccacataaaaaatgaaaactttaggagataattacagaagtgaagaaagatgaatgaacaaggatggccatctattcattcaacacataatgaggtctactatgtatcagacacaccactaagtactggaaatacagcaatgataaattagataaattagggaatttaggttgtctagaacagtgaatggcatgtaataggcgcttaaaaatatttgaatacatgaaggtctgttttgtagaaaatgatttatggtatggaacattttagtgaggaagtggaacgtgtcccatcgtattagggacacgttcattcattaaaaaaatggaaacaaactgtttattaatatggagactacttaagtcggttatggtaatacatagaatgtagtacagaaaagcccttaaaaaatgagatatttattggctgacacagaaagatgttctaatttacctaatgttgaattaaacaaagtaagctgttgaataggatgtatggaatgattcctttaatgtaaggttatttatatttctataaaatgtcacaaggtatggtggagaaatgataacaatgaatgattctaacaggaggtaagtttttcgctgatctttgctgtattctttatgcacttctgtgattgttttaccatgatcatgtgctactgtttaaaaataataaagctgcttaaaaatgtttctggataaatttttttaaacttaatattctatctataaatagtgttactggttgatggtccgttgtcctgtaaatgtaaaagtgttattaaagaattctgcattttctttctaaagaaatatagttaaccagagttcactttgatactcaacatttacctttaatgtttattatttattattcattttttaatatatttttttgagacagggtcttcctctttcactgaggctggagtgcagtggcatgatcttggctcactccagcctccattttctgggctcaagtgatcctcccacttcagccttccaagtagctggggctacaggagcgtgccactacacctggctaatttttgtaatttttgtagaggccgggttttgccgtgttgcccaggctggtctcagactcctgggctcaagcagtctggctgccttggcctcctaaagtgctggaattacaggcatgagccaccatgcccagcctacctttaacatttaacaacatttacctgtaacactcatagagtgtagttttaaaatgaataatagcatttacaaatgtgtagtagcaggaatatatttaataataattttaattttgttttggaggtactttgagggaggtatgtctacataattaaatggcaaagaacggaagtttttaagtttttttgtatacttataaatttaatttggatttagttattaataaatattaggttgaactgcacttttaatctaaagatttattttggcactcatttttgcttattatgacttctcattttcttaattagaggagagaagacatgttctttgggcgtcctggttatgtctagtcaatagtcttagttttcacaggatagtacggaatgttaaattattaytacctattttcttaatttatttcaataacttgctgtttttatcaggaaaaattaatgaactaatcaaaatgttccattctatacatagtttgctcataacaaactcattttwttagaaatgttatagcaaccttattttttttttatcctccacaagatcattttagtgtagttactggagtttcaaatcatacgtaattcagtttgaaaactatgtctatggttctgtttagtaacattttagatgatattatttaaaaaggttaacattgcttagttaaaagttatcattattcttttaaaacaagttttatttttcagaccacacagtcctttgaattctgatgcatcaagtttcaaacagttttttgtttttggggatacttacctatgagatctccagaaattgtatatttagctatgaaaatcttcagaaactgtgagcatattaagcacacatataagactgtaaaccttagaggatgattttagatttctttctcttttttactttttatttttgaaaaaaataagcccattccagtttaatgaatatgataatttgaaatccaggtagaataatgtatctcattttcrccctcatattttaaagtgagatagtttataaaatggagaataartcatgttgttagatgttgactcttatagtataaaagtatgaatcttatatagtgatattctattttaaatgctttatatgtttaaataatttagaagaagggaattatagaaaaactgaaacaaaatgcttgaattaatactataaacatgatgttagcatttataattgatattttaaattgttacataaaratgtatgagtatggataaaaacatatatattagtctaaatgaaattaatggcttcttttatacactcacaatatttatacttttctttaagtatatcagatgttgataagtgttctagagaaaagtaagtacattagggatggtaataaggaatgttggaattgggaagatgccatttttatatagaatggtcagggaagatttcactaagaaggtgatagttgagtgatgctctgaatttggtgagggacatagctgtggggatattcggataagtgtgtttcagacaagatcaaaagccctgtgttgagtgcaggctctgcatatttagaaacataagaaatttaactgtgcatggcacaaggtggtcttatatgttaaaaaaatacatttttttggtttcatttttgctttcctggtacattctaagatatgctgaaattgagatttacttgtcttgcttattgtatcttgggcacccactacagtgccaaacacatggcaggcaatttgttgtggatgatgagaaagaattttggaggaatcttcttcttttttttttttttaaattcatactaccaaattatttcaagctacagaggtctttagagatcatttagataactcttttggatgttatgcatgagaagacatgtcattaaatagaatgacttccaaaagtcaccattaattagtagcaatcttgagttggcaaagatttttggtctcttagtctaactttagtccattgatggggtgatccttttgtttcagttgtctcatctatgcatgggaagatacttgctatggaaaacctccttgctgtggaagaactccttgcatctagaatcagattgcttggttgaaattcctgtttgacagtactagctttgtgattttctccctctccygacttttccttttggtgccctggttttcttgtctgttagacagatattgttattctcattccagtattctttacaccataaacattttctcattaatcttctaatttaccaactcagagtgttatttcctttttttttaaagggatttatgatgaagagaataggagtttgaaattaggtgttcttgggttctataaaaatttaattcttaaggttatttgttagtatgtatcaaactcttatttaatgaatgaggaaaacatcagcaagacaaaagaactgctttcaagagtatttgagcatcaggagttcatgtattcatttaggaaaggaatgtcaaaataaaattttttaaaaattatactttaagttccagggtacatgtgcgcgacgtgcaggtttgttacatatgtatacatgtgccatgttggtgtgctgcacccattaactcgtcatttatattaggtgtatctcctaatgctatccctcccccctccccccaccccgcaacaggccccggtgtgtgatgttccccctcctgtgtccaagtgttcgcattgttcggtttccaccaatgagtgagaacatgtggtatttggtttactgtccttgcgatagtttgctcagaatgatggtttccagcttcatccacatccctacaaaggacatgaactcatccttttttatggctgcatagtattccatggtgtatatgtgccacattttctcaatccagtctatcattgatggacgtttgggttggttccaagtctttgctattgttaatagtgtcgcaataaacgtaacgtgtgcatgtgtctttatagcagcatgatttataatcctttgggtatatacccagtaatgggatggctgggtcaaatggtatttctagttctagatccttgaggaatcaccacgctgtcttccacaatggttgaactagtttacagtcccaccaacagtgtaaaagtgttcctgtttctccacatcctctccagcacctgttgtttcctgactttttaatgaccgccattctaactggtgtgagatggtatctcattgtggttttgatttgcatttctctgatggccagtgatgatgagcattttttcatgtgtctgttggctgcataaatgtcttcttatgagaagtgtctattcatatccttcgcccattttttgatgaggttgtttgttttttttcttgtaaatttgtttaagttctttgtagattctggatattagccctttgtcagatgggtagattgcaaaaattttctcccattctgtaggttgcctgttcactctgatggtagtttcttttgctgtgcagaagctctttagcttaattagatcccatttgtcaattttggcttttgttgccattgcttttggtgtttcagaatgaagtatttgcccatgcctatatcctaaatggtattgcctaggttttcttctggagtttttatggttttaggtctaacatttaggtctttaatccatcttgaattaatttttgtataaggtgtaaggaagggatccagtttcagctttctccatatggctagccagttttcccagcaccatttattaaatagggaatcctttccccattgcttgtttttgtcaggtttgtcaagatcagatggttgtagatgtgtggtattatttctgagggctctgtcctgttccattgatctatatctctgttttggtaccagtaccatgctgttttggttactgtagccttgtagtatagtttgatgtcaggtagtgtgatgcctccagctttgttcttttggcttaggattgacttggcaatgcgggctcttttttggttccatatgaactttaaagtagttttttccaattctgtgaagaaagtcattcgtagtttgatggggatggcattgaatctataaattcccttgggcagtatggccattttcacgatattgattcttcctatccgtgagcatggaatgttcttccatttgtttatgtcctcttttatttcattgagcagtggtttgtagttcttcttgaagaggtctttcacatcccttgtaagttggattcctaggtattttattctctttgtagcaattgtgaatgggagttcacccatgatttggctctctgtttgtctgttattggtgtgtaagaatgcttgtgatttttgcacattgattttgtatcctgagactttgctgaagttgcttatcaggttaaggagattttgggctgagacaatggggttttctaaatatacaatcatgtcatctgcaaacagggacaatttgacttcctcttttctcaattgaatgccctttatttctttcacctgcccgattgccctggccagaacttccaacactatgttaaataggagtggtgagcgagggcatccctgtcttgtgccagttttcaaagggaatgcttcccgtttttgcccattcagtatgatgttggttgtgggtttgtcataaatagctcttagtattttgagataagtcccatcaatatctaatttattgagagtttttagcatgcagagttgttgaattttgtcaaaggccttttctgcatctattgagataatcatgtggtttttgtctttggttctgtttatatgctggattatgtttattgatttatgtatgttgaacgagccttgcatcccagggatgaagcccacttgatcatggtggataagctttttgatgtgctgctggattcggtttgccagtattttattgaggagttttgcatctatgttcatcagggatattctctttttttgttgtgtctctgccaggctttggtatcaggatgatgctggcctcataaaatgagttagggaggatttcctctttttctattgatgggaatagtttcagaaggaatggtactagctcctccttgtacctgtggtagaattcggttgtgaatccgtctggtcctggactttttttggttggtaggctattaatcattgcctcaatttcagagcctgtgattggtctattcagagattcaacttcttcctggtttagtcttgggagggtgtatgtgtctaggaatttatccatttcttctagattttctagtttatttgcatagaggtgtttatagtattctctgatggtagtttgtatttctgtgggattggtgatgatatcccctttatcattttttattgcgtccatttgattcttctctctttacttctttattagtcttgctagtggtctatcaattttgttgatgttttcaaaaaaccagctcctggattcattgattttttgaagggttttttgtgtctctatctctcagttctgctctgatcttagttatttcttgccttctgctagcttttgaatgtgtttgctcttgcttctctagttcttttaattctgatgttagggtgtcaatgttagatctttcctgctttctcttgtgggcatttagtgctataaatttccctctacagactgctttaaatgtgtcccagagattctggtatgttgtgtctttgttattactggtttcaaagaacatctttatttctgccttcatttcgttacgtacccagtagtcattcaggagcaggttgttcagtttccatgtagttgagcagttttgagtgagcttcttaatcctgagttctagtttgattgcactgtggtctgagagacagtttgttataatttctgttcttttacatttcctgaggtgtgctttacttccaattatgtggtcaattttggaataagtgcgatgtggtgttgagaagaatgtatattctgttgatttggggtggggagttctgtagatgtctattaggtctgcttggtgcagagctgagttcaattcctggatatccttgttaactttctgtctcattgatctgtctgatgttgacagtggggtgttaaagtctcccattattattgtgtgagagtctaagtctctttgtaggtctctaaggacttgctttatgaatctgggtgctcctgtattaggtgcaaatatatttagtatagttagctcttcttgttgaattggtacctttaccattatgtaatggccgtctttgtgtcttttgatctttgttggtttaaagtctgttttatcagagactaggattgcaacccctgcctttttttgttttccatttgcttggtagatcttcctccatccctttattttgagcctacgtgtgtctcttcatgtgagacaggtctcctgaatacagcacactgatgggtcttgactctttatccaatttaccagtctgtgtcttttaattggagcatttagcccatttacatttaaggttaatattgttatgtgtgaatttgatcctgtcattatgatgttagctggttattttgcttgttagttgatgcagtttcttcctggtatcgatggtctttacaatttggcatgtttttgcagtggctggtactggttattcctttccatgtttagtgcttccttcaggagctcttgtagggcaggcctggtggtgacagaatctctcagcatttgcttgtctgtaaaggattttatttctccttcacttatgaagcttagtttggctggatatgaaattctgggttgaaaattcttttctttaagaattttgaatattggcccccactctcttctggcttgtagagtttctgctgagagatccactgttagtctgatgggcttcactttgtgggtaacccgacctttctctctggctgcccttaacattttttccttcatttcaactttggtgaatctgacaattatgtgtcttggagttgctcttctcaaggagtatctttgtggcgttctctgtatttcctgaatttgaatgttggcctgccttgctaggttggggaagttctcctggataatatcctgcagagtgttttccaacttggttccattctccctgtcactttcaggtatgccaatcagacgtagatttggtcttttcacatagtcccatgtttcttggaggctttgtttgtttctttttactctttttttgtctaaacttctcttctcacttcatttcattcatttgatcttcaatcactgataccctttcttccagttgattgaatcagctactgaagcttgtgcatgtgtcatgtagttctcatgccatggttttcagctccatcaggtcatttaaggacttctctacactggttattctagttaatccttcgtctaatcttttttcaaggtttttagcttctttgtgatgggtttgaacttcctcctttagcttggagaagtttgatcgtctgaagcctcttatctcaactcatcaaagtcattctccgtccagctttgttctgttgctggcctttggagggggagaggcgctctgatttttagaattttcaacttttctgctctgttttttccccatctttgtggttttatctacctttggtctttgatgatggtgacatacagatggggttctggagtggaagtcatttctgtttgttagttttctaactaacagtcaggaccctcagctgcaggtctgttggagtttgctggaggtccactgcagaccttgtttgcctgggtattagcagcagaggctgcagaacaatgcatattgctgaacagcagatgttgctgcctgattgttcctctggaagcttcatctcagaggggtacacggccatgtgaggtgtcagtctgcccctactggggggtgcctcccagttaggctactcgggggtcagtgacctacttgaggaggcagtgtgtccgttctcagatctccagctctgtgctgggagaaccactactctcttcaaagctgtcagatggggacatttaaatctgcagaagtttctgctgccttttgttcggctatgccctgtccacagaggtggagtctgcagagrcaggcaggcctccttgagctgcggtggactccacccagtttgagcttccaggcctctttatttacctacgcaagcctcagcaatggcaggtacccctcccccagcttcgctgccaccttgcagttcgatctcagactgctgtgctagcaatgagcaaggctccgtggacatgggaccctccgagccaggcgcgggatataatctcccggtgtgccatttgcttaagaccattggaaaagtgcagtatcagggtgggagtgacccgattttccagtgtcatctgtcacagcttcccttggctaggaaaggggatttcctgaccccttgagcttcccaggtgaagcgatgcctcaccctacttcagctcacgcttggtgggctgcacccactgtcctgcatccactgtctgacaatccccagtgagatgaacctggtacctcagttggaaatgcagaaatcacctgtcttctgcgtcrctcaggctgggagctatagactggagctgctcctrtttggccatcttggaaccattgaggatcaaaataaaattgataagatacacagaagactggttaactttctgtatgacaatgaagccatataacttaagggaaactgaagttatatggcttcattggaaacttggatgtaaatctttgaatttaatttagatatcatcaagatctttatcatcatcttgagtatcataagatactggattttatcatctctaggaccaagtatattggttttattgattttagcagattctagaaacttgccatatgcctttagacttctagcttcatgtgcatggtattttaaaataacatcagatttgttatcctaatagtctcacagaccaaccagtataatgtctgaggtatttattcacttcttttttctcaattttcctctcatatgacataacctctttacaccatcaaagcacattgattctaatcatctgttttccttcattttgattacctactcttgtctatcccctttatataccaactctcctttttggggttcttatttttactcctgcctctatttttctttttctttttctttttttttgacacagagtttcactcttgttgcccaggctggagtgcagtggcacaattttggttcaccgcaacctctacctcatgggttcaagcgattctcctgcctcaccctctggaagagctgggattacaggtgcatgccaccacaccctgctaatagtttttatttttagtagagacggggtttcaccatgttagtcaggcttgtttcgaactgccgacatcaggtgatccatccatcttggccttccaaagtgctgggattacaggcgtgagccaccacgcccggcctcctgcatctgtttttacctcccttaccttactcttgggcatggcagcaatggcagccttacggtgtcctggactcctctctggtggttgtgttggctgtggtggctgctattttgaggggtgtgcatgaatatgtagtcccaggaggcttggtcacttagcgggggatgttttgcaaccaaggtctttagaggcatgctcagtggcagcaaatctttaacttcttttttcatcttttgttttttgtgctaacatttttaaggttttctagggcagtctagagtaacatttactcttgtgcattcttaccctcatttctaagatggacctctattgagtgactctctgttggatgtcccaaggattcaytgaggactctgtcttgcctgtgagaacttaaatgattcctggccctttgtgagctctggaaattactcagcactaactacatcataatttttctttcctggaaattggttttgctctgtatcattggtttttaccctatgcacatgtagattagtattgatattcaggtaatttaaggatatcctttttttaaagaaaataggtctttctgtaactctctcacttcaggaactttcccccaaaattcttgttgtgttggcctttctgtattatgacctcttgtgttttttaactcagcaatggcactagattctattagggtttcacctcctacatactacagtcccaaaagtgctttcagagagaaatctcaggcaattatagggctcacctttttgtttgtttgtttcccttattacagaaatcagttttgagctgattttcaatgtcagatcatcagttgtgcaatgtcatatacattgtttgtccagttttctagttgtttacatttggagggtaattctcgatcctattactgctgcatgggtgaaggtagaggtctcctaatacttttaaaattgagaaaatccttagcaagtgatatgtctcacccatttcaaagtgagttcaaatgctattatatgtaaaatttcatttttaaatgttatttaaattaattttagtaacaacatttgtgttattctttcatacatagctgttaagtaaagcctgctttggctgcttttcatctaatattagttaccagtcaactgatgcgttaaattaaagttgatataactctaatgatttataagagttgaatctttttagtactttaatgccctactgaagatcactgcctgttttatggtgctcttgcgtgtatgctcttacgttctctctctcgctctttctctctctctctctctccctccctccccctctcttcctctctccatctctccccagaatttgatgtaacaacaccaaaaacctcatgactttaccatattttactgtatctcaacagatagaatataagaccaatttttttattggtaaaaagtatgggaactttttaccaataaaaaaattggtcttatattctatctgttgagatatagtaaaatatggtgtttaagtttactacttcttactctttcaaattccttcaagtagcttaaaagcattggaaattgtaagcagaatgctaatgtaaattggtgggaagtaattgggaatgtctcattaaatatgacattaaaaaaaggacgtttaaaaatttttttcgaaaggatatgaggtactcacgaaagatttaaattaatggctcttatgcttatgattgagtcatttggtgacattagcttcattctttattatttagtgcttacaatatttgagttcctgtactaggtgtgaagtgtaccatatctgattattatatgtttatgctattcttagaagaggaacttgaaaatcttaggggagtgtttgaagatgagccagttaattagcattgtgatttaggtgttgtgtgcccagggcatcagaattgtacattgtgagtcttaaaaaaaaatgaggaaatgtagagccataatttggatacctctgaagagatgagggtcagggttgtaattttaggtgagaaaactacaaatgcattaattctgacaaatggccacaaaatttgatttcattaccttttactatttttgaactattagtttaggttcagaggtatctgtacaggtttgttatatacgtaaacttgtgttatggggggtttgacatacagattatttcatcacccaggtactaagcctagtacccaatagttatgttttctgttcctctccctgcttccactctccaccctctggtaggctccattgtctattgttcctttcgttgtgtttatgtgttctcatcatttagctcccacttataagtgagaacatgtggtatttggttttctgttcctgcattagtttgctaaggataatggcctctacttctatccatgttactgcaaagtacatgatctcatttttttttatgactgcatagtgttctgttgtgtatatgtaccacattttctttatccagtctacccttgataggcatttaggttgatttcatgtctttgctattgcaaatagtgcttctgtgaacgtaggcatgcatgtgtctttatgatagaatgatttatgttcttttggttatatacccagtaatgggattcctggatcgaatggtagttcaatttttagctctttgagaaatggccacactgctttccacagtggttgaactaattttacactcccaccaacagtgtgtaagcattctctttcctctgcaaccttgccagcatctgattttttttactttttaataatagccattctgactaatgtgagatggtatatcattgtggttttgatttgcatttctttaatgattagtgatgttgagtgttgatcaatgttgggctttttttcatatacttgttggctgtatatatgtcttctttggaaaagtgatcacatcctttacccactttttaatgtgtttatttttttcttgtgaatttgcttaagttccttatagatgttggaaattagacctttgtcagattcatagacctttacagttgcaaaattttctgtcattctgtaggttgtttgttttctctgtcgatagtttcttttgctgtagagaagctctttagtttaatgagatcccatttgtcagtttttgcttttgttgcagttgctttttgtgtctttgtcatgaaatctttcccaggtcctatgttcagaatggtattgcctacgttgtattccaggctttttcatagttttgggttttaagtctttaatccgtcttgagttgatttttgtatgtagtctaagaatgtgtccagtttcaatcttctgcatacggctagccggttatcccagcatcattttattgaataggaaatcctttctccattgcttgtttttgtaggctttgttgaagatcagatggttgtagatatgcagtcttatttctgggctctttgttctgttccattggtctgtgtgtctgtgttttttgttttgttttgtttgtttaccagtaccatgctgttttggttactatagtcgcatgatatagttggaagttgggtagcatgatgcctcctgcattgttctttttgcttaggattaccttggctatttgggctgttttttggtttcatatgaattttaaaatagtttctctaattctgtaaaatgtcgttcgtagtttgataggaatagcattgaatttgtaaattgctctgggcagtatggcaattttaattttaatgacattgatttttcctgtccacgatcatggagtgttttcccatttgtgtcatctcttgatttctttgagcagtgttttgtaattctcattgtaaagatctttcacctctgtggttagcagtattcctaggtattttattctttttgtggcagttgcgaatgggactgttttcctaatttggctcttggcttggctgttgttgctgtataggaatggtagtgatttttgtacatttaatttgtattgtgaaactttgcttaagttgttcattagcttatggtgcttttgggctgagacattggggttttgtaggtatagaatcatgtcatctccaaacagtgatagtttgacttatgccctttatttttttttctcttgcctgattgctcttgaaaggacttccaatactatgttgaatagtaattggtgagagagggcatctttgtcttgtgccagtgttcagcttttgcccattcagtgtgatgttggctgtgggtttgtcataaatggcttttattattttgatgtatgttccttcaatacctagttcattgagagtttttaacatgaagggatggtgacttttgccgaaagtcttttctgtatgtattgagatgatcatgtggtttttgtctgtagttatagttgtgtgatgaatcatacttattgatttgcataagttgaaccaaccttgcatcccagggataagccctacttgatcatggtgaattagcttttcaatatgcttccggatttgtttcgctagtattttgttgaagatttttgcatcagtgttcatcaaggatattgacttgaagttttcttctcttttttttccttgagaaacaaaggtactttttttttgtctttgttttttgagccagggtctcactttgtcacccagcctggagtacagtgtgcaaacatgactcactgcagccttaacctcccagactcaagtgatcttcccacttcaacctcctgaatagctgagactataggcatgtgctaccatgcctggctaatttttattttattttattttttattttattttatttttagagatggagtttcaccatgtcgcccaggctggagttctctttctttgttgtatgtcttccaagttttagtatcatcatgatgctggccttatagaatcatttagggaggattcccttaccctcaatttttttgtaatagttttagtaggtatggtactagctcttctttgtacatctggtagaattaggctgttaatctgtctggttcagggctgtttttcttttttttttttttttggttggtaggctatttattactgattaaattttggagctcattattggtctgttcagggattcagtttcttcctggttcagtcatgggagggtgtatgtgttcaggaatttatccatttttttctagactttctagtttttgtgcctaaaggtgttcataattgtctggttatttgtatttctgtccaatctgtaataatatccccctttgttgtttttgattgtgtttatttggatcttctctttttttctttattagtctagctagtggtctatgaatcttgttaattttttcaaaaaacaaactcctgacttcattgatcttttggatgattttttgtgtgtgtgtttcagtctccttcagttcagctctgattttggttattctgctagctttgggattgatttgctcttgcatctctagttcttttagttgtgatattaggttgttaaattgagatctaatatatatgtatatatgttatatatacatatgtatataaatgctattttttaattttattttttattttttattttattttattttttttgagacagtctcgctctgttgcccaggctggaatgctatggcacgatcttggcccattgcagcctctgcctcccaggttcaagcgattctcatgcctcagcgtcatgagtagctaggattactgacgtacaccaccaagcccagccaattttttatatttttagtagagacggggtttcacaatgttggccagtctgatctcgaactcctggcctcaagtgatctgcctgccttggcctcccaaagtgctgggattacaggtgtgaggcactgtgcccagctctttctaactttttgatgagagtgtttagtgctatacatttctcccataacactgccttagctgtgtcccagagatgctgggtatgttgtatctttgttctcactaatgttaaagaacttctttggtttctgccttactcagaagtcattcagcagcaggttgttttatttccatgtaattatatggttgtgagtgattttcttagtcccaacttctatttttattatgctgtgttccgagagagtagttggtatgatttccgctcttttgcatttgctgagaattgttttttrtctgactgtgtggtcagttttagagtatgtgccatgtgcagatgagaagaatgtatattcttttgttttggggtagagttctatagatgtccatttggatctatttggcccagtgttgagttcagttcctaaatatctttgttaattttttatctcaatgatctgtctaatactgttggtgaggtgttgaagactcccactgttattgtgtgggagtctaagtctctttgaaggttcctaggaacttgatttatgaatctggatactcctgtgttgggtgcatatatatttaggatagttaggtcttcttgttgaattaaaccttttaccattatgtcatgcccttttttgtctgttttgatctttgttggcttaaaatctgtttttttctgctttccatttgcttggtagatttttctccatctctttattttttagcctacgggtgtcattgcacgtgagatgtgtctcttgaagacagcataccattgagttgtgcttctttatttagcttgccattctgtgccttttaattgggggcatttagaccatttacattcaaggctagtatggatatgtgtggatttgatcttgttattgtgttgttagctttttattatacctacttgtttgtgtggttgctttatagtgtcacttggtctgtgtacttcagtgtgtttttgtagtggttgctaatggtctttcctttccatatttagtgcttctttaaggggctcttgtaaggcaagtctggtggtaatgaattccctcagcatttgcttgtctgaaaaggatcttatttctccttcacttatgaagtttagtttggccagttatgaagttcttggttggaatatcatttcttcaagatattgaatatagacccccaatctcttctgacttatgaggtttcttctgagaggtctgttgttagtctgttgggcttccttttgtaggtggcctgttctatctctctagctgcctttaacatgttttctttcatttcagcctcatagaatctgatgattatgtatcttgggcataatcttcttgwaaagtattttgcaggggttctctgcatttcctgtgaatgttggcctctctctataggttcagaaagttctcatgatggtatcctgaaaagtgttttccaggttgcttccagtctccccatttctttcaaggatgccgatgagttgtagatttggtctctttacataatcccatatttcctggaggttttgctattcccttttgttcttcatcttcttcttctttttttttttttttgctgactgtcttatttcagaaagccagtcttcaagttctatgatttttttcctcagcttggtctgttttgctgttaatacttgagattcttatagaggttttttcagctctatcagatcaattatgttttttctgtactggctattttgtctttcagctcttgtatcattttattgtgcttcttagcttgcttagattggcttttagtgttctcctgaatcttgatgctcttttttcttatccatattctgaattttatttgttgtttcagccatgtcagcccagttaagaacccttgctggagaactagtgtagtcattgggaggaaagaagacactctggttttttgagttgttggagtttttattattattactattattactatgattattattattattacttacatattttttttgacggaatcttgctctgttgcccaggatggagtgcagtggcgtgatctcagctcactgtaagctccgcctcccaggttcacgcctttctcctgtctcagcctcctgagtagctgggactacaggcacctgccaccacgcccggctaattttttgtatttttagtagagactgggtttcaccatgttagccaggatggtctcgatctcctgaccttgtgatccacccaccttggcctcccaaactgctggaattacaggcatgagccactgcacctggccgagttgttggagttcttgtgctggttctttctcatctttgtgggctaatgtttcttcagtctttgaagttgctgtcataagaatgggtgttttttcttttattctgtttgacgaccttggggctttgattgtggtataacatgggttctgtgaactgttgtgctggagtggccgaggtgccctcggactgctagtcacaacactttgataggtggtgccagccaaagcacttcatagggtgatggcaacgggatctatccttgttcgcatgtgccagcggcagtggcaatgtggcggggtgcatgttcattggctgtagcagggtgttagtgggtgctggcctccctgcaggcattcggagcagtgagttcaggtctgactctttagtcccctagggccaaagtctcctatgggagcaagtcgagcctagtgggttaggtgtccctggctgtgctccactacagatgctcccacaccaaaccctctgggctctatccttaccacttctcgaagcagctttccctgccaactcaagtgtccatggtgtttgaggggtctcctcctgctgggattccagaggcctgtggccagagtgggtcgctccttgcctgttcaactcaccctctccgctggagttgttggggaccaataatgagccttagtgtgtggtagctcctgaagggtttccagcttcctctctcttcacatcagcccctgttctttcagtgccttccctctgaagatctgctagaagtgtatcagtctccctgatgtcctggtccctcagttagagaggttcctcctggctgcatctggtcgaccatctatggctcctggagctgaggacatgaagcagtgaatacaggaccccaagctctggctggagtgagacaaagaccccaccatatccctggaagtcgctactgatatctttaaaaattgctgcttctaggccgggaatggtggctcacgcctgtaatcccagtagtttgggtggccgaggtaggtggattgcctgaggtcaggagttcgagaccagcctggccaacatgatgaaaccctgtctctactaaaaatacaaaagttaagtgggtgtggtggcatgcgcctgtaatcccagctactcaggaggctgaggcaggagaattgcttgaaccctggaggtggaggttggcagtgagccaagatcgcgccattgcactccagcttgggtgacagagcaagactctgtctcaaaaaacaaaacaaaacaaaacaaacacaaaaaaaacgctgcttctagataaatccattgagtttggtgtagcaaaaaattgttcccctttaattttctgctggccgatataaaatgaagacatttaattattcaagatcttttagatattagttgttantcatttgtgagaaaactcacatcgatacatggtagtcactacatacacttgccaaaactgcttttgtttttgttctattatggctaaaagagatgggtctacctgtagtgttacctaggcaatatggatgtacactgtatttcatcgtcctaaattgcttaccattgaaattcatatattatgtttgttactttggtagtgtgttcccttgtaactctgcccgtgaagagtaataatcccttggtcagccataccgtgtttctttgattcatttgaagttgagagcaagggcttcatcattaaataaatctttgctcttcctggttttgtgatcttaggcaaattaattaaccttttgtgttttacctgatattagcatagttcagtagttgagtggactctagagctagcttgtagggatttgaatcctggctctactacttaaaagtatgtacgactctgggcaagttactaaattttttgcttcttctttcttatctgtaaattaaggataatatgggtacttatttatgtactaatagagataatagagaatgtttattgagtgtttactatgtgccagatttaaacctgggtaaaaataacataatagggttgttgtgaggcctgaatgaataaaataagtaaaacactttgtacaggttcctagtacattttcagccaattatgtataaaatggggttgtgataattataatgaagcatatatgtctgtggaataagtatggatccaatatttgtggcagaaaaagaccacactgtgtaactccattgattggctaattggtggagacacacagaatgagtcccaacattcttttaggtaacttgtataaaacatattaacttttctctcccagatcatgtgcaagatatggtagatccaagaatcctatccaatgatacttcaaaattgtaaccttagtatacctgttgtgttaaaagtattgtttagaattggccacactcgacagatggccagggaagtaaaagcacttattggggatagctttgacaccagctgtattatattaaagatatgatataaaacttttctcaacatcagtagtgattctgaagctgtcagaaatagatagggagtcatgatgcccctaaagttcatttcccctttcctctatagtaatagaaccctgatttttgtttgtttgttttaactgggtacatggatgactagaagaaaagactatttcccagccatgtgattaaattctggcaaaaaagagatgaaagcagaagtattatgtgtgtacttctaaaagacagtggctcagctgggaaggcatacctttttaccattcagttttcttccactttattgaaagtgtaataactggagcattaacaatcattttgtaccatgaggcagtcttgaagatggaagccaggcatctagagtggtggaagagaaagctagaagcttgggtccctgaggactttgtgcaaccatcatctctacttcacctatctccagacttcttttacaaaagaaaaaaccaaatctcaatattgcttaagctattgctatgttgagatactctgtaatgttcagaattgtatccctataccaagaggaagaagtgtaaataatgaaacactgttgagatggaatggtttatgtacacaggagcatgtgttgtgtatggagagctggagagtagcataaataactaacgaagtgagaagattgtagatctactttaatcatgctagtgaaactggaatattgtattaaaggaaaatgtgaaactttggaaaaaaggaaatatgtaataattcaatgacatttgtacaactagttatcaggtcacattttgatggatattggggatggttaagaaagctaggcggcacagatcactctggtctttggaatatagattaatggtttttcatatgattctttgttatgccattgttaaatgaagtgtttataaccttatttttttctggtaaatcatattttattaatgagacttcaagtgtcttatctcaaaatgttggattggtaaatttgaaaaaaatgttagaaaacattagctatttcctgagggagaggttgagcctttacaacaaatgttgatattcttttacttgttaatataaagatgcgtaattgtcagggttgtctagagaaacagtaccaatagggtataaataaatagatacataagaggagatttatcatgggattatagtcattcaagatgtcccaccatatgccatctgcaggctggagaacaggaaagccagtggtgtgaattagtccaagctcaaaggccagaaaaccaggggaacccaaggtctaagtctcagttcaaggyggaaggccttcggaggggattgctgctgctggataagtcttggagtctgaaggcccaacaattagtagctctggtatttgagagcaggaggtgaaagtaccagctcaagaagagagtgagaattcacccatcctcaacctttttgtttaattcaggtggtcctcaaaggactgaatgatgcctgctcacattggtgagggcacatgttctttattcagtctactaattcaaatgctaatctcttctgggaacaccctcactgacacacccagaaatgatgttttaccagtgatctgggtatcccttaacccagtcacgttgacataaaaaattaaccattataagatattttggttttcattcacaaatcataaaaaatatttgtggttttcactcacgaatataaaaataattgtggggttgcctgtccttgtgttaaaagtatacatagaggagattttctagttttctcttgcaattcttaaagccagcatgttcttaataatagaaaaaagctgccattgattctggttctgctacttactggctttatgaccttggggaagttatttaaattcagcgtaccttaattttcttcactgtaaaatggggataataatacctacctacgtcgtaagggtattgagaggattaaatattatgatatctgtgaagcaattagtaaagggccttgcattcaggaaacactatataaatgtaatcgttattattatacttaatgagagaccagcgtaataggaattatgacggtcattttaaagacaaagtaatgcaggttcggatatgtcctgcttgattctttactgtcccatttctatattagcggtgccaggatttagaccttgttctgtctaaccttagagcctgtactttccaagatcttataccatcatccaacattatcagatccctctgtgtcctaactgttcacctaacatattatgtgtatttgtctttagcatatcaaactgagccatagtatcccacaatggttgtaccataatttatttgtttcccttattttgtgagatatatactctatgccactaatctggcctatgtgttagtgaattgaataccagccagtgataccattatgatattcttcatacatgcagtagtaaagattagcctttaaagggctttcatgtctcttgtatgaagagtgcatgtttactgcacttttgaatccctactattctgtagaaacagttttgaatgtgtttgaatttgcacctttgaatctattgttctttagaaactgttccctggaaagattgttaatgtttattcattatttgtgttgtatatgactaggaattttttatttttttttgagacggagttttgctcttgttgcccaggctggagtgcaatggcgcgatattggctcactgcaacctccgcttcctgggttcaagcgattatccagcctcagcctcctgagtagctggggttacaggcatgcgccaccatgcctggctaattttgtatttttagtagagatggggtttcaccatgttggtcaggctggtctcaaacccctgacctcaggtgatctgcccgcctcgacctcccaaagtgctgggattacaggcgtgagccaccgcgcctggccatgactaggaattttttttgcaatccatttatctctccttataactattaaatgttgtgtttaaggaccctgcagcttatcaagagttgatttgaatgcaagttatttcttcgaaattacatttggacctatttctgaacatctgcttttgacattttatgcacgtaaatataaatgagtaaacatatgaaaatgactttgaatcttagttctaattcttataaggcctgatttaatttttattttgcttgggattttgaatataggtattaaataaatataaatttggataatatgtatgggcttattcaacaaatactaataaagagcttgctctgttttaggtgctatgtatacttttagctcttgctctactgatacataccttttagtataggaaatagataaataagccaatttgtgttataatagagaataatggaagagggtgagtgtttttttaaaaaaaacatagagtgttgtatgtagcattcttgtagggtattgtagtcattctttygttctttcttgtttttagggtcccagttttgttttggagcctaccctcagggataaattctgattagtctaagctggtaatgggaatctattccatttgtcagtgattgagtttacaagggacagatgactcaatcttggctaggaagatgtgcaggtcttcaggggagatgactgtcagtggtttcctctctcttaaaattaagagacagattcccagttgttcttttgcacataattgcatatggctggaattgaggcagctaacttgctaccaggaagaaagttagctagaggacaaaaacagatatgctaaggtagaatagaaagatgaaaagggatttttcacagtttcattgaaccccattgaattagcttttttgctgttgagaaactaaaattttcttatttttaaagtcaccttgagttgcaatttctcttgtatcctaatgtgtcgtaattgatactagttgtcaggggctgttttttggaaaagaagtataatataagtagagatctgaattataagaatgagccaaaggtggaaggaatagcaagaacaaaggctgcatgttgggtaagaacttggcatattccagaaactggcagaaggctgatctacttggtttctaagcaagggaaagataataactaatatttatagattgttttactgtgtacaaatcacttttatgcatattatcataatcttcacaattatgtgagtttctacgattatgactcctactttatagcagggtaaactgtccatatgtgattgatttgaaatggttgctctttctaatattaacacatcatggtgccaatcaagtatatattatttatgtgcacacacacacacaatcggagaaaatggtgatatatatacacatttcatttgaatttactagtattaccatttttcagcagtattaatttatttagggctgaaggtacagatggcaagtccagatttctagacccatttgagtagttaattgtatcagtaaacacagcctggtgtgttattgtgtgtaattgttaaggtgagtgagatattcttgataagaaccttataaatgtgattatgtgtttgtactttataactaggaagattaatttctaagatattggctgatttcagtgaattagtattttgtattcatgtatttatgatgctggcattttaaattcatatgtatatactatgacactactgataagaaatatgaagtatgatagatgagtataagtaatgaatgaaaatcaaattttataatcttggtaggatttatatgaaaattttcttttctctgtcctgctctgccctcttttcctccctgtcttaccctcttcttctctcttttcatcctctcctcttccttcccctcctctcctctttcttcccctccctttcccccacctctctttttcgttgtcttcatttcagtttagttggttttaccaaatgcttttacataaagtaaaagtttatttcagctagcattaaaggacccttttaatttataatactatttttacttgttcctttctacttctttcttacattaataaacacattatttgtaaattacccttttcccgtatagggagcaaagcaataaaaaagattttaataaattctgtaacaatatttagttaaaaaatgaattgcgatcaaaggagaagatatttaaaaaatagagtcttgggcacatattaatcctgaataggattggattatgtatgtactatatatggctcttaaaatgtttgtacattataattgataattagcttttctttaaaagttttatttataattctctttatcaacttgaaaaatttttgttttctagtagattgttaatgaagaaaatgagtgtgaaatatgtcatgctcaatctgttaccttgtaacagtcattcgttaaatttgctaaataaatgacttcacttttctgttaaatttttcagtttattctattatgttgaattacttcaagaaacactttgtaataatgattttggtttttactcttttcagttgttaaaaaagtaaattgataactcttataactgcagtgtatattttaatttaggaaatcactattatttgaataatttatgatgattccttttattctgagaaaaggttaggttagtaagaatgttcagtacaatttctctggtttgttaattatattactagttatttaagttgattcttattgtctgaaatttgtgaaaaatatagttttcactttaacatttggaaagtttattacatctatataataaatgctgttgaaatttttttcattaaaagtaagaatgtactaggtgatgatttgctgaaaaaatctgtctcattgmaacttaaatgcaaggacataatttaggcatttaatgaaataacaactttcaattattgacattttcaattatagtcacaaaataggggtaatttaaactttctcttaaaatttttgtcaaccttattggaacataatttacatcagtgaacccatattaagtatacagttagatgatatttcttaaatctatatcctcatgtaactgtcatttcctttcttaatcagtcatcttcgtacttgctggcaagtactagtctgatttccatcactatctgttagtttctttgttgtagaacttcataattttatgaatttaagtttttaagtcattaggctattcaagtaatctattctttattgagcttcagtagtttgtttcttttagggaatctgtccatttcaggtatgacttcatatttattggccgaaaatagagtcatacagtgtgtattttttttgtccctggcattttttgtcaggcatgtttttgagatttaaccatattgtgtatactggtagttgttgtttttttaaactgatgaacagttttccattgtatgaatgtgccataatttgtttatccattcacctgcttgaagatgcctggattgttccaaatctttggctgttgtaaataaataaagttactatgaatactcatgtactagtctttgtatggacatacatcttaagttcctttgtaaatacctgaatagaattgttgaggtatacggtaagtatatatttgcaagaaattgacaagctgtttatttttctttttccattttctagaactctttgtgtagaattgttgttatatctaccatgttatgtaaatggtagaattcgcacataaagcaatatgggcctagagttttcttcatgggaagatttacaaatacgcattcaacttccttaagctttaagtttttaagtcattaggctattcaagtaatctattctttattgagcttcagtagtttgtttcttttaggaaatctgtccatttcaggtatgacttcgtatttattgaccgaaaattatttgtaatattttcttattactcttttgtagtatctctagtaatactacagatagtgcctcttacattcctaatattagcagcttatgttcttttttttttcagcttgtgtccttatgcccttgattagtccaactggaagatttttaattttattgatcacttcagggaacccattttttgttttcattgatttttctttgttgtttatcggttttatattacattcatagagcttacactgtgaaccttttacgtatttcaccaaactttcaaatacttttatacctcttgaggtataatatagggactttaaaacagtgtccttccttttttctgcttgctatgttttgtgtaagtattgtcatatattttactattgtgtgtgttgtaaaccccataatactttgttattattttagctttgagtcaaatttattttgaaagaaattagaaatgaggagggggcwgggtggaaaaaagagaaattagaaatgagaaaaaattttatttgtatttacccatatatttaacatgtctgtttaaatccatcatttacattcaagtttctatccacaatcatttctttcagcctgaaaagtatccttttaaatatatcttgtagtatgtatcagctggcaacaagttctttccatttttttgttttccaaaaatatacttattttgcatttattttttaaaagctttttgtttcagaataattttagaattatagaaaattagcaaagagagtacagtcactgtatactctttgcccatgttcccctaatgttaacatcttacgtagccatggtacattcatctaaactaataaattaacagtagtgaaatactctaaactacagactacatttggatttcagcagtttttccatggtgtccctgccctgttccaagattcaattcaggataccacagtatakttagtcattatgtctccttagacttctctaatctatggcaatttctcagttgtttgtttttatgactttaatagttcaatacttttgaagagtactggttaggtattttgttgaatgtccccagatgaggatttgtctgatattttcttttattattagactggattcatggttttagaggatgagtactacagaattgatgggtccttttttagtatcatttagaatagtttcatcatataagttactcttgaagggactttataatcatcccctccttgtactttcaactcttgggaaccactgaactatttttcaacctatagtttttccctttctgtaatgtcatgtaaatgaagcacacaatatgtagtctttggttttgtcttccttcacttagcaacatacatttaagattcattttgttgagtaaatcaatggcttatttctttttattactaactagtattcctttgttttctatgtatcatgtttgttaatctgttcacctgttgaaggccatcttgattttttttttgcagttttttgtctgttatgaataaagctgctgcaaacatttgagattaattttttgtggaaaaatatgctttcatttttcttgggtggattaactttgaaacctcaaactaaaacttcttaaagaacccataggagaaaatatatgggactttgggtttagcattgaatttatagacatagtaccaaaaccacagtctataaaagaaaagaagtcagtatattgtattatatttaaaaaatttaaaaattttgctgtgtgcaagatactgttaaaagaataaaaagataagccacagactgggagaaaatatttgaaaatcatatatttgataaaagacttatgttcagaatatataaagaactcaagtctcagcagtaagaaaacaagcaatctaaaaaatgggcgaaagatctcaaaagatactttaccagagaagatatacggatacaaaataagcacatgaaaagatggccagatgttcagtgtcatttgttactagaaaagtacacattgcaaccacactttgataccactacacagctaccagaattgcctttaaacaaactgacaataccaaatgctagggagattgtggatcaacaggagttcttattcattgcttctgwcaactcagaatggtgcagccactttggaatagagtttggcattttcttgtaaacatacatttttcatgtgacccagcaatcctactcctagctatttgacccaagttagctgaaagttcacattcacagaaaccttttatttttgaatatatttttactgaataacaaagtgtagttttgtcattttttttttttagcattttaaaaagatgttgtcccattgtcttactagattgtatttttttctgattagaagccccctgcatttctttgttaccatgtatggtttaccccccaatcttgtggctgttttaccctctaaattatggttttatttgtatttaaaaatagattggaaattctrtatatacccatggttaaacatattttcaatgtacattacttcaaatttgatgataaattttgttctgagaagtcctttwctgaagccaaactcaaaaatggggaagtgcttacagatttccaactggccccaaaacggatattgtaaatggctttttgcctaactaatgatgatggatgagtttcatttgccttttatcatttgaacggttttttgttcacaataatagttactgtaaggtgatgcagctgtggtgaagctgtaaaacactgtagtatctgacaataagtcctatcaacagtggctacctgtattagtctgtttttcattgctctgaaggaattcctgagactgggtactttataaagaaaagaggtttacacagtgaaaacctgtctctactaaaaacacaaaaaatcagttgggcatggtggcgcgtgcctgtagtcccagctacttgggaggctgaggcaggagaatcgcttgaacccaggagttggaggttgcagtgagccgagatctcgccactgcactccagcctgggtgacagagcgagactctgtctaaaaacaaaacaaaacaaaacaaaaaagtttacttggttcccagctttgcagtctgtaggagaagcataatgccagcatctgcttctgggtgagagcctcaggaaacttcctctcatggtagaaggcaaagggggagccagcgtatcacatggtgagaaggggtgcaagagagagaagggaggagataccaggctctttttaacaagatcattgtgtgttctgatgaacccatcataagttgaaagtatcatgagtcgcaatatgtttaatacacctaatctgaacatcatagcttagcctaccttaaatgtgcccagaacacttatattagcctacagttggacaaaatcatttaacacaaaactattttgtaatgaagtgttgaatattttgtaatttattgaatactttactgaaagtgaagaacaaaatggttgtagggttactcagagtggtttctactgaatatatattgcttttataccatcataaagttgaaaaattgttaagttgagccattgttaatttgaggaccatctatatgatattttttgttctacaagttatacatttttattgtagttttcttttttcaacattttcattttttcttttaaatcctagcacatatttcgatacttgtttcagcgctcttgtctgctgtcatcattgtcatttctgttttctggatctgtttaaatggactaattttctcctggttatgggttacattttccttcttgttggcatcatagtataaaatacatatttttggcaaagtaattaatactttattcaactgtacttctgttgatgggcaattacgttgtttttccagtttagtgctgttgcagacaatgatgtaaagagtatgtgaatgcattttgtttacatattaaaatgcatcttagcataaatttttgcatgtggaatttcttgtcaaagggcatgtgtatgtaaatatttgatatataatgccgtattaccctttgcatagggtacacatatttttattatttaaataagtgctgaattatttttgagtttaaaaggcaaccctcctttgacatggctcatagcacaacaggccaggcttttatcttcagcagattgtcgcatactcatcttctggcctcagcatcaaagtcaagctgcttgaatatgattcttggaaacatccttttcacacagtcatatgccaaatgtggccattgttcattttcttgttagacttaagaagtgtcagtttgatcgtattataaatggwwctgcattttttgttatgtctaatggaataattgagctatatctatctttaggaaatgtaggagggggaaatgaggaattattagtcaaagggtacagagttttggttataaagataagtctcagaaatcttttgtacagcgtggtgcctatagttaacaatactgtattgtatggttaaaaatttcctaagaggatagatcttacgtaaagtattcttactacaaacacacaaattagtgatagtaaataagagagtgggagaaaactgttgcagatgatgaataggtttatggcatagattgtggtgatgagttcacaggtgtctactttgcaaactcatcaagttgtatatattatgtatagctttttgtatgtaaaacatgtttaaaagaatgttgaattttaaaaaagaaaaagacaacacatcctagcctgcttatatttttggggagttatgatgatggtaatggtcacaacaatgacaacacagttatcgtaatcattgtaaatttaatagagacttcgttctacttctgaaaatttttttcagtatggttggatcttacaaaggtgctaaatgtttgtgataaaatagcttagtttcagctctgcggtaaaatcttgacataatgatcatctgtttatatatataattttaaacattgtgtaatacataaggattttgaagattgcaacaataaattaccatgttttattctgacactgtacatatattttgattttcaaattatagtattataactgtggtatgcaggtggcagtgttcaattttatgcttaaaaataaaatgatagcaaaaaatgcaattatttgtggaatagtttatattcagtttctgttgagtcactcagaatgttagttgctgtaagaagaggctttttttcttttttggttgtttgttttagtggcattacttcactttgcaattagaacccactgtaatattacctattgaaggcagggatttgtgtctgtcttgttcactgctgcatcctcaatgcctgggatatgtaatgtattttatgtaatagaaattgaatgattagtttttgaacatatgagtgaatggatcatagtgttgtatagatttaggtagatttcttccagttgctttccattataaatgttgataagaaccatgctgcatatttaaaaaataaaatttacataacatgaatgactgcactaaatgaagtatattatttaggaggtcagttacttactgctgacatagtagaggatgcttccgaagtgatcatcctgaagaatggagactgcagctcattgtcatttcttttattaatacttcaaatgtgctcccttctctactgcagctgtgaaactttttctggtcttctcaagaactttctcttctctgttttttctctaatgaattatactttcattttttaattccattttatcttcaccactggctttttctttgctatacctttttattttatttaataaaaactacttgttgctctgggggaatgccatctgatgttggaaatgctctgtatctacaccattcgtaatggtaaccactagacacaggtagctattgagcaatcaaaatgtggcctactgtgcctgaggaaatacgttctttttttccsccagacagggtcttgctctgtcacccatcctggagtagaatggtgtgatcacggctctctgcagcctcaacctccagggctcaagtgatcctcccacctcagcctcccaaggagctgggactataggcgtgcaccaccagttttaatttatttatasagacagggtctcactatgttgctcaggctggggaaataaatttttaattttaattctaatttaaatagttgcatgtagctattaaagcagtgtagctctggatctttatatatatgtatatgtatatataaaattattagtctactttcaaataatatagcagttcatgtgtagtgagacaacttgacttttgtgcacttccatttcctccgtctcatcttttwaatattctgtcatatgttttacatctacrtatattataaacccagtgatacattattgccatttttgagtttaacagctttttatcttttaatgtggttaaattaagggaaaatagctctgattttttagatttcatcatttctggtgctatttttgtgtgtgcagatctgcatttttatctggtatcatactcctccttgaaaaatttcatttaacattttttatagtacaattttgccggcacagaatattttttaactttttttttctggaagagttttgattttgcctttatttgcctttgttttgccttcattttatccagtgaaaggtattatctagaatgctcagttgccgtttttccccccttggtattttaaagatgatgctccattgttttttgactggccttctttattacatgtagtgtgttctcatttttttttctctgtatgtaatatttcttttttcctagttacctgaaagatttttctctttcagtttgttttttagcagctttttgtctacattttaattttgccctactagcaattctctgcatttctttgacctgtggtgttttatcatttttttactttggaaaattcccagctaacatctctttaaatgtattttcttctctgttcttgttttcttcacattattaaactccagttacacctgcactagatcattggatattatactacagctttaaaattcctattctgttttttaaaaatttcaatctgtttcttctctttgcgtttcattttgaataatatctatttacctctcttcaagctcactgagtttttagctttgtctaatcttctgataattctgttgaagattttctgatatagtccatttagcatttcttctttgccgaatcccttatctgtttttgtattttgttcatatttaccatgagatcctttaatatatcaattacaattattctcttttctgtctgatagttcaaatatctgattcatttagaagtctggttttggtgtttgctttgtcttttgactatggtttgggttttttttttaactatatatctatatatatattatatatatatatatttatatctatagatctatatctcatgggttttttgttgcatgccagacattttaggtaaaaggcaacaaagattgaggtgaatagtatttatgcccagaaacgggtacccttcttctttgatgatgttggtgtatatgtggattgggatggggcagagattgagtcagtccaacagtggtttgagttggatttgtttttttgttgtgattgtaatagttaaattcactgaatcagaaacttgaaattcctgcagtagtggactgcttgctgcttcttcattcttggtttggagyctcggtgctggagtctttcctctgtgttccagctccatccttagcttttagcaggtctttggatgcctrcatcacagcatgacctctgttcatattctttgtaacttttgwtaaaatgcaccttctagttttgattgtctgtattttcttatctttctttgaagattgttgagttttattttgacaggcagataatttacttttggattacactgatccttttgtagcttgtttttaagctttgttagrgctcttgttggcatagcttttattctataactggagtcagtagactttggtttatgagccaaatctggtccacagcccatttttgtatagctcatgagctaagaatggatttttcatttttaaagggttataaagaaacaaaaataaaaattaagaagtatatgtgacagtgactatatatgcctcacatagcctaagatatttatcttgccctttacagaaaacattttctgatcctgcttgcttaattttaatttctaaggtgttttatttcttggatttttaccgaatgctgcaggttttctctgtggtatttttattgtacctggttggaactcayaggtctgtcaactttgcctratctttgagatgtgttcagcttttagctacccagtatttaatttttctatttctgataattgtcctttgcaagcctcatgagttcttactataacttagtttcctgccaaagacttaaaggatctcctatgcaaattttggagctttctgagtatctacctcctctttagtataatgacctgcaaattccacctaccttaaattccctgaactttggtctttgtcttctcacctgaggaagatggctgtgttttgtttgggttcttcctttctgtgctggtgttcagcaaatgcttctaggcagaaggctaaagtgatcatagggcttacttttattgttaattttctctcagacattacagtcttctttgacctttgcccaatatctgaaaacagtttttctaaatatgttttttaaagttttctagtttatatgtgaggctaatctagtagttattctttcatggttggagatggaactctgtttagcagctattaataaatgtgcttttttacctctggtattagtataaaaccaataattgtaattgtatctgttaaatctcttatttgctgtaaattgagttttgttttatggtatgtataagaggtattagcagaatacataaggaaatgtgattaagactcagttctgtcctgcaacttgaatgcctattctgtgcccagggctttctataacttgctagagacagaaaataacacatgaagtgaagatcaggcttttaacctactagaggaggtagacatatgtattaattatttattgctatgtaacacattacctttagactaagtggtttaaagcaacaatttattatctgttggtcagaatttagggatggtttagctggatcctctggctaagctccatctcctaggtgagggtctttaaaaagcctgcattcaagatgtggaccaaagctacagctgtcttgaggcttgactggtgatggtgcatttctaagcttgctcacgttcactggtcattggcgggattcaacaaccttgtgaggtgcttgtggtcttaggactgagcactttawatcttcgttggctgttgtctgaaggctgccctcagctcctttccacatgggcctctcagcatgatggctgacagtatggtagcttgtatcatcagaataagcaagcagggacaatgtgagcaagacacagaagctccagtcttttgtaaccttatcttgsaaatgaaattctgtcacttttactgtattctatttaagaaacaagtcactaggtgcagccaacactcaagaggaggagatgatacaagggcatgaatagtggacgcagagatagttggcaaccattttagaagctgcctacaacagcatgtggcatattaattatataaagaattgtaaatgggtctataaaataatgtaacaacrtcaatatataccacataataatttgctgcatggtatgctgaggtgcctcaccactgatgattattttatttaagccttttccagtattctctgggagaggtggtatttattatctccagtttacagattgatgttcagtgaggttacctagctatgatgtagcagaactgagactccagtctagacactgctgattctagcacccatacttttaatttctatgtcttgtcagcattaaaataaaattactttttttggagcacttcttctgtgccaagcattatgataagtggtttatatatgttaaccttatttaaggctcgtggcaactctattaagtctccttatcttactgatattacactcgagcttccagattcagaaaaagtactttgaaaaatcaaatatrtttattgttccagagacattaaacaaatattacccaaagaatctctgtaaatacygaaagaaatgaatcatttaaataccttagtaccttaaaaaggtgatatcaatctagcctaggcaacatgccgagattttgtctctctctccccttttttttttttttgagacagagccttgctctgtcgcccaggctggagtgtggtgttgtgatctcggctcactgcaacctccaccttccaggttcaagcaattctctgcctcagcctcctaagtagctgggattataggcacccaccaccatgcctggctcatttttgtatttttagtagaggcgggggtttcaccatcttggccaggctggtcttgaactcctgaccttgtgatccacccgcctcagcctcccaaagtgctgggattacaggtgtgagtcactgtgcccagccaattttgtctcttaaaaaaaaaaaagtgatatcactaattaaataaatttgcagaaagaatcctggcacatttcagtacatttagtatatttagtattttgcagaagggtactttgtgagtcttaagtagtaataaatttataaattcttgaaagcccactctgagaagaaatctcaacaaacactgctatataaattttagtcagaaattagctgatatatgtaatttttaaatatttttacgaatttgaactatttttactaatactttcacaaataagttgagtggttgtcatatcaaaggctgaacatactttcttcagttatatcgttgtctttgcaaagtgaatcttctaaatgaagaaaataagatacattattttttcatggttaaaaggtaaaccataagactctcttggctgggtgtggtggctcacatctgtaatccctacactttgggaggctgaggcaggtggatcacttgaggtcaggagttcaagaccagcctggccaacatggtgaaatcccatctctactaaaaatataaaaaatgagccgggcgccacagcagacacctgtagtctcagctactcgggaggctgagacaagagaatctcttgaaccctggaggtggaagttgtagtgagccgagattgtgccactgcactccagcctgggcaacagagcgagactcaaaaaaaaaaaaaaaagactctcttggtcttttaggccaattaaatttaatcaatcaaggaatgtctttataagatatatgttgacaataataaatatgaaagtttattaatgactttatttttgaaccatttccttataatagcattctctcactttctgcattaccatttgctgtcttaagtagggcataaatgcagtttaagctgtatttattagtgccaactaagtgccaaataccgttctgagtgcctgggatacatcagtgaacacaatgaacaaaaattatggcgtttgtattttagcaagcatggttcagrcaataaacagtaaccataagtaagtaagcaagcattcattgtagttagtagatagggaaaaaattctgtacttgttcttttaaaccttgcagaggaaaattgcatagaaaactatttgtttttcagcttaacttggttttcttgaccccaaaactggggatttaaaaaatactggcaaagacaaaaaaaatcatgggaaacattctctccaaaaacatagttcaaatgatgctattaattagaaaatgaccatgttttgctcttataaaaatgtattgctttttaaaactcaagtattatcaatattgatatataatatagtaatttaatctcttagatatttttggtaatggtttataaaaaatggaaagtattttttgttgtacaaattttgttattcaaaatgtatgtttctgtaaacttttgttactattcaagttatgctggctttaaatattacgatttttatggtaatcccaaggaaaatgtttcagcatgtctttttattatttaaattactcttttaaagaaagctacctttgctttggttgtttatctcagttgtctgttttctgcgttacttttgcagtgaagggaaagaaaaaaattgtaatatctgatatatagtttaccctctgtagctgtagttttagtattcttgattcagccaactacagatcaaaatatttgccaaaaaatacccccaaaattgactatctacatagcatttacgttgtattaggtgttataagtaatctagagatgatttaaagtatttgggaggatgtgtgtaggttatatgtaaatactatgccattttatgtaagaaacccgaacatctgtggattttggtgtccgtggagggtactgagagacaactgtatatcttaatagcttagaattaactaggatatagtacagtttcagcatataagtatagtaacattttacagtgttgcatatgttgtctcaaaattactgttaattgaaatattaatacttatattttttggctgacgtaccgaattgaatcaatttcttatgccatcagaatgaattcacttcttatttggttttaaagtcacagagccctggatttctgtattttttttacataagatgaaaagtaggggatacctgagtttagaggagtggggattgagaaagagttttaagaaagggacaggataaacaatggagtcagtaaaaagagtgttcttgatagatttaagaatagttattaaaacaacagacaactttttacttggattattcctttttaatttggttttcaaacagttctcagcaagtacaattcttttcattctatgttttagccagtgtaaatcagtaacattaaggtaaatgttgtaggagtaaatgggaaggaagtagagtgtttctaggacagccctttgattttcttctctttgaatattggtgttttaaaaacaattgagatttaaggtgcaaacatagaaaaatagtggccctgtgctctgatttttgaagcctcttctccatcttttctgctcatctttttaccactgtttgatttgtggtcaagtgcccctcacattcagtctcgtatacagaaactatttcttgttttttctctcttctcttgtatatggaactctgtctagacatatgatttctcttctatagctttaaaattatcaaaacatttttaaaattaaagaaaaaaaaatttttatagagatggggtttcaccatcttgccagattggtctcaaactctgggttcaagcaattctcccgccttgtctccttctaaagtgcagggattacagatgtgagtcactgtggctggcctgtcaaaaggttttaaattatatttttgcctacaaattctctcctggggagaaaatagttttgtttccaagggaattctaagcctaatgatggagaaatgacaaatgatacttgtaaccaagcctggaaaagaatgtgcatttgtagtttaagatgcacagtaactaagatgtaactggtgctagacgtttgttgcaattgttggtatttttataaatttgaggaagcagtagtctagcctgatccatttgaacctttgcttctgatatttggaatgactgccagctggttaatggctatgataacctttacttggctaatatgcatgtcagttttagaatttatcctaaaagtgacaatttgcctgtcacctgcagagttaagtggtataatggcagctgaacaatgagggaggagagtggagttgagaactggtagaaatgaaatcactcatacagggaacatgttttttcttgagataatgaacatatagcccaaaatatgtggttgagtacattttgtttttgattgattgttcaaagatataatttttaagtyttcatatataagttaatgtataattrtgcaagaaggaaaagaaagtgatgatggcactttgaggactttcaggcttagagctaattagtctgttatctggtagagcactaatgtacatggctgatttaatatacagattaacagatttaaagcttttaccctttacttgttattaggcagttaggttatcttccaacttgttggccagtcaacaccaatgtgtttcctccaagaatctcagtatatgctattttatataccttaaataatttaaatacatttcttactctttccacagcatgtagagcgcatgaagtacaggacaataaagcttcctacacatatcaccaggaggatctctttgaaagattcactgcaggactaccagagagaataatttgtctgaagcatcatgtgttgaaacaacagaagtctattcacctgtgcactaactagaaacagagttacaatgttttcaattctttgagctccaggactccagggaagtgagttgaaaatctgaaaatgcggccatggactggttcctggcgttggattatgctcattctttttgcctgggggaccttgctgttttatataggtggtcacttggtacgagataatgaccatcctgatcactctagccgagaactgtccaagattctggcaaagcttgaacgcttaaaacarcagaatgaagacttgaggcgaatggccgaatctctccggtaggtcctaaaatactgaaygaagaatgatgaaatattgyactttgtttttaggtgtagggcttcattccgctaggaaaaatagttaattatttttataacctgctgtctttgccacaacttagcatgacagttttctatctctgtgtatttaatacagaacaagcttgtccaacccacagcccatgggccacaggtgacccagaacagctttgaatggggcccagcacaaatttgtaaactttcttaaaacattctgagatttttttatttttttttaagctcatcagctatcattagtgttagtgtactttatatgtgccccaagacaatttttcttccagtgtggcccagggaaaccccgatataatttctccatagtggcatcattattttgcatatgcattttaatgtagaaaaactatgccatttcatttatatacttacatttcatttacagttatgtatttaaaaaaattgatatattaaatccaaactatgttttaaactcatgtatattaaaaattttatatgaactgtaacaaagattataataactgggaggctgagttagtctaactagaacttattaaaatgcagaaacaaaagtttatcattaaacaactggatctggaatgcggagaatgattatcattgctatttctagtctgtaaaaaatgtgacatatatctattagaaggcatcaactgtttgaaaaccaaagtctcctatatattttcagggagcaagtaaacataatattacataggcgatctctgtatttttttccaaagttattgaggtaaaacattacctagtatcttatatgcgaagatgatcatgtagtactcactctctcaaactagagaagctagaaatgaagatttgagaatccttactccagaggtggtaattgaccctaagggaagtggtatagagaaaaagagctgaaagttcatttctctttgagaaacacataaattaaggagtagaaagtggaaacatccaattgtacagaaagcctttagaatagttggggaagaatagtgggacagagctgttacggaaactgaggaacattctgtgaaggaagaatgtagttggcagtgttaaattacccttgatgctatagagaggatgcccatggtgctctcattttctactctcactgcccttcactctttgtttagaactcggatttttccctttgtctagtttcataactttttcttcataatattatttgggtccttttatgtcctttgaaagacaatgctacgtgttaagacaaaaatgaatgaaacattattcttgtcatttgtaccattcaagaagatagcaagcagtcagggattagaaagtggacagaacttcttgaatttgtctattattttctttcctacttggggtactcagggaacatcatggaggaaggtgatctttcagtagagtcttattcattcattctaaagattgataatttaggggttagtaataatagctgtcatttattacatgccaggtactgtgccaaggactttgcatggatcatctcactgaatttcacactatctttatgagatgttagtaccatttttgtaaccattttacagattaacaattatagagatgttaagtaatttaatttgctgaaggtcacacttttcacaagtggtagagcctactttgaatcccagtagtatgactccacaacctaaactctgaataactgtattgccttcctgagcagaaaacagagaaatcagtgacctaaacatcttaggtatgagatcaccaagaatagctactattctagttgattttggagtttgctttgattgtaatcaaatctccttctatatcatgggaattttgctcctaaaaagatttttccccttaacaatttagacttataaataattgctcactttccttatggttccatcttcaatactgatatttcaatttgtttatttctgactgccaaatgtcttgtttttgttgcatgaagggaaagcttgctttagtatgggtttttctttctgcaaaataatctttaggtctattaagtcactttctttatattcttatatgttgaaattaatttctcaactacatttaaatgtagagactactttcaagagctgaatcacctaagtcatgtggtaataccatgtaattacagtctgaaaacagactaagcaaataggcccatgtttatataagggaatataatttcaggaaaatagtttatagttattttccctcaacctcattgggccctttcattgactttactgctggggccatttgtwtttcttccaaagggatgtcgttttagagccctctggcatgaaaggaagagcaatggaggtgctactagcattgggatttttttccccttatagtaattaagttaatattttgtactcaatttgctatgtctttttcatataagaaaatgtgttcacaagtcagactacaaaagattaattcagatgtttataactaggtcgtttctttgagataaggcatatggattggagttggaaagcaacacaaaagcttgaaactacaattttttagattttctagattcaagtcaataatctgaaaagccattaacaaatctttcggctagaattttctgattttgttgatagttttagaaatttaggaaaataatttaaatatcgtatcttggagggatgcaaatgtagaagcacaatatataggaggttgcagtgtatttgtgtaaatctgatctattgatgagtaatgtctgtacataaaattcacttcctttatcgtagatgtctgtgagttttggcaaatacagtcacgtaaccatcacaaaaactatagatgaattctacctccctctagaattctgttgttccctcttatggtcaaattctgtcccgacctcctgtccctggcacttaactgatctgatttctgtcacacttttttcctgtttcagaatgtcatataaattgaattacatagtatgtagccttttgagtctgtcttttttcacttactataatgtttttgagtttcatcaatactattgtctgtattagtagttcattcttttttattgctgagtagtatttttattctttttaaatgttgagtagtattccgttatattgatgtgtcttagcccatttagcattgctatcacagaatacctgacactggatagtttatagagaaagaakttatttggctcatgattctggtggccagaaagtccaagattgaacagctgcatctggtgagggcctgaggctgcttcaattcatggtgggaagtggaaggagagtaagcgtgtataaagagatcacatgataagagaggaagcaagacagaaaccgaggaagccagacttttttaaacaacctgctcttttggtaactattccattcccatgagaaggagaactcagtcatctctgaaggaggagcattaatttattcatgagggatctagctccataacccaaatacctcccactaggtcccacctgccaatactgccatgttggggatcaaatttcaacgtgagttttgatgaggacaaaccacatccaaatcatagcaagatatatcacytttttttttttaatccattcaccaattgaagaatgtgaggttatttccattttggggcagttgtgaacaaagtcactattaacctttgtttcataaacttttgtatgaccatagtttttatttctcttgggcaaatacctaggagtggaactgctgggtcatatgttaactgcatatttaactttataagaagcaacccagttctttttctagagtacctgtaccgttttgaaattcctaccagaaattcttgagagttctacttgctctcctcctacccagcatttgctattgtcagttatctttattttagtcattgtaacagatatataatactatctcattgaggtttcaatttatatttctgtaatgaatgatattggccatttttttaatgtgttgatttgccattcatatgtcatctttggtgaagtgtttattcacttcaccaaagaatctgttgtctattttaaaaaatcaaactgttttcttttaataagttctttgaaaaaattatttttaaaaaacatataaacacaaaattatatttattagtaatataaaatatggtataatataataaaaaacaaaaacatggtggcataaaacaatcatttatttgctcttgatttttccaatttgggttaacttcagctaggctttttttctaattataaatagggtcactcatgtggctgcagtcatctggtggcttggttatggttgggcagtccaagatgacctcacttacatatttggcaattaggtcgaccattaactggctcacttccatatttcttttctggaaggatagcccagatttcttacatgatagtgttccaagaggaaaatagcaggaattgcatggcctcttgagactgagcatcagaagtaacacagtgtcaattctgccacattctgttcattgcaagtcaagaggcctacccatattcaaaaatggaagaaatagatactgcatcttggttgatggaactacaaagaatgtgtaaccgcatttaacctaccgttctcaccacagaagggaagttgaatagattggattaggtcaaatcatggtgggcttatatagccagagttatgtatagacccgattgatagataatagagaacaatagttggttttcagcagaggaatgacacagtgaaaatggttgaggaagatttagattttcaggtggatttggtgcatgtgccagattggagttaagatatttcttgggaaactcttaaagtattaatctagataagaggtaatgcaacttacactgaaattaatgattgaatcagttgactttgatgcttaggttttcaacatgcctgtatttagagtttcccagacatctctttctttcttgttcattggtatcatgttagaacacatgtagtgggcctttaaaaaatttagaaattatcactttctcagtccttttatgcttcatgttcgttttgtttcaagtttaataatgtgaaatagctatttgctcacagaatttttgctccttgggacttgaaccagccatgttgcttcctagagttgaaatttaccagaaaacacccagaaaattgttggtttgtgcagaaatccccttgagcagtgaacctcaacctggttggatgtcaatctcatggagttgtaaaatctaaaaagtgcttaattgacaactttccttttaacctaatccttgttattctagggacatttatttttgagaacagaacttaaaaaaattcaaatgtggcttttggccttttggccgattaatagtttttttgtttatttgtttggtctaggaaaggagaagagatttcttctagaatttagatgctagctgtaaaactgtaaatttaaaaaccacaaagaatgtatgattaatttccgattacctgtttttctgagctgtgtgtcatctgccaatacgggttacagacaaagcacaaatcttctggtggaaaaatttgtcccaggcaacagaagtatactgagttgggtagaaaggaaactgaagtggttcttcacaggtcatgttttactgttgtttgagaagattgtgttaaaaagtgggttgcctttgttctagttggttggttggaagattttgctctagaccgtcttctctataactcctagtctctcatataagaagtgtacatatattcttaaagccagtgagatagattggaatgtgtacagcacctgccatctaattataacctttcatgatatctgccttttgctttttcaatcttgtatccattattcctcatgttatcaagaatatcttatttttaagatataatgaaagatactccttccctgagaacattacagtgggaacaacattcctatccygataggcctgattaagcagatattctctccctggaatttcttgtaactttttaacattttactggattaaatttgctaacattttgttttggattttttctatataaatgagatgtttatttatgatttttccttcttgtgatgtctttcaggttatcaaggtttatgcaggccaattctgttctctggaaaagtttatgtaaagttgatattcattttcttttaaatattataattctaccagtgaagttatctgggcctggagtctttttgtggggaagggtggtggcgaggaaggagaacatatgggaagattttagattctggatttcatctctttaatataaattggactgttcagctctttttttttctcatgtcaattttggtgagacgtgtttttcaaagcatgtgttcattttatcagcatgttcaaatgttctagcttaaaattgttcttagtgccattttattttcttctccatacttgtatatctatagtaatgtctcctttttcattcttaatattggttgtgttttctccttttatcttgctaacagtttatcaatttaatttgctttttcaaagaaccaacctctgtgctttttttttctttattgtatatctgttttctattttattttcttttatgtcctggaaagccttaaatttctctctaagcacagctttcagttgtattccataagttttgatattctatttttgtcattaatttaaaatactttaaaatttgtattgtgattttttttttctatgacccataggttatttagtagttgttacttaatttccaaattgggctattctgtttatctttcagattttgatttctagtttgttcttcaaccagatagaattatattctatatttcagttctttgaaatttatttaatggcttagcaaatgacttatgttgttgaatgcttaagaaaygtgtattctgttgctgagtctgatctagtatatatgtcatttaagttaggttggttaattaagttattcagatttattaatttttataaacactcatattcttttataattggccacatattttttctttctagtgttctttactccttcctgttattcagttctttcatgttgaatcatgttcttcagccttaataatatcctatagtatttatagtgcaggtttgatagcaataaattcagattctcttttttaaaaactttatctttcattttgttagatatttctattgagtgtagaatttactttagcagtaatttttamaagcatttaaaacatgtcatttcattgattcctgcctttcatagtctctgagaagtctgcaattttaagaagcgtatctttctctttggctgagtttacttttttttttgtctttggtgttaagcacttgactatgagtgcctagatatggctttatttgtttttattcagcttgaagttcactgagctgcttaaatctgggagttgatgtattttatcaattttggaaaaccctcagctactatttcttcaaatactgcttctgaagccattattttttatttttttccttatggaattccaattatatgtattattaaacttatttttatggtatctcacatggctttatgtgtctttcatgatctaatttctctttgcactttattttgtattattttctattgaactggcttccaacttatttcacctgtcttctgttttgttcattgtgccgttaatcacacacagttagtaattttttatattttttgattctagaatactcacttgattctttttgataatttcaaatttctttggaaattctccatttttcatctgtcttgtccatgtttcttttaatttcttaaatagttattctaatataactattatattttctcctaatttctatttcatggatcaccttttggttgatttcttttgatatttattttgattgttagtcaaattttctgcctctttgcatgtctagtgattttaaatttaatatattgtgtataaaggcactgtggaggctacagaggcttttctctgttggagattgggcttaatatttcaatccagtacaatcagtgattgaacatggctgtgttttagttttagtaaaacctagcccactttgtttcttccttgttcctcaggtataattcttctaggctttttattgacaatttggtagatttctcttcagatttgaagtataggacatttcttctgcccttcagaggttttgagctttgctctttggtctcttgctccakgtagcatctaaatttgacatacattgaagagaaractagctgtgagtttaaggtagacctcaagcaggacttcatcctgtaaatttcgtaagactatgagaaatttcattctgtcttaaaattactgtctagccttggagccatagaatccagcaaatcaatcatggagaaaactggctatgtgtttactgctcttgcagtttccaaattttcacaccactcttctgtgtgatccctacccagaatcagcaaatgcttcccaagtaagaacatagctagttcagcctgctctggaattttagttaatttaatccctcacttccacagctctctaatgcctttaaaaggattatatttgcaagttttttttttttctgggagtggtggggagtgcttattgtcattattacagtgagaatgagaatagggtttgccatgttatactgtattctacttataactacatatactcctacatatactctacctgtattaaaagtggagttcatttatcccagtgttgctgacatacacgatttccattagttcctgtgcctagatctctggagacttcttggttcttgctcttttaatgacctggttcttcaggctttcctttgattcccttttaaccttctattgtataccttaattgtgtggtaaaggaaaggaagagtttaagtggattcaaagtttgtcgtgttaaagtgaattaaatatggtctgagaaggactttgtactctatatttgagtcctagtggacgaactgtaacctaacttaataggtagacaagatcgaaaacctgacttaggagtatgcgcctgtaacaatagctgagtcttgcccaatcccagcagccatatttcaaccattcacacactgctgagcattcagactgtgttcaaataaggcaaatgctgagctgtaaccaatctagttgtttctgtacctcacttctgatttctgtatatcactcccccttttttgtctataaatcttcttccaccatgtggctgcactggagtctttctgaatctgctgtgattctgggtgctgctggattcgtgaatcgttcattgctcaattaaactcctttaaatttaatttggctgaagtttttattttaacagtaactgtcagtaatctttttcaatgactgatataatgaacctgttaggagaaagaccaggatgggatttaggtaggttgaacttgatgtgcttgctgaacctatccaaaagaaagttggaaagtgagtctagaactcaggaaaaaagcccaggtgagagagaaatatgactttgggaatcatgcacatagcagtgattgccagaaaatgtgtggcacaaagtaaaaatttctccatgcacttcagatgatccatagtttccctaaacactgtggacttgcagagaaggaagtgtgggaacagcatcaacatactcttacatacagggcctgcaagaatctcacgtggtaggaaaattcatttttcaaccactacacctgttctatgaatacagcaattggttatgtgtagagaagcatagcatcatatgtatttttacatactattgccattactaggttttattagggacagaaccttggtagaataaaagcacatttagaatataatgctactttcatcatcatttgttatattgtcttaatattcttcacacccaagacttgaatatatatatatatttacatggaagtaaagtttacatggaacaatgccaaggaaggggttttcaggcaacaaaagtattatatcagttgttctatttagaacactgtgttatagcattgttacctgttttttcttgtgtactgaaaagtataaccccacttaaactcaatatatgaaaatctaggtttacacagaagataaaaggtaaaatagtctttataaaatagcagactcttagtgaatttggattcaagatttaacaatccactttgcccatagtcttacaagttttttgtaaatctaggcctaccagtgtataggcacagtgaatggcttataatcctattcataggagagttgcagctcataatcataattttatgacacttttctcaaggtctcatgtggcaccctatcaactagatgttggattgcagtgggaaacaatgcaagaagagctgttagcttgtgcttttactcttagcatctcgattgtcctaacagtaacattagcagcaagcaggaacagcaagacaacaaaaacaacagctgttaatatgtgttactatgtatcaggtcacattctaagctttgtgtatgtatgaactcatttaatccctatagcagccctgtgagtaagtactcacattatccccattttgtagatgtagacagagaagtacagttaaatagcttgctgaaatgtatacaactgtgagtgatgaatgtggagttcatcttgcttcatattccacattcttaatcacgttggtatggtggctctaaaagtcactgctttttccacagaaaatgtgcaacaatccttttttgcctaacaccctttgcgtgttttgtatatgggtccagtagactagaccatagactataatgtacattctctttctaccagattcctttcttccccatttatcattaagcagacttagcaaggaaaattatcagcgataaagatgggtcattctgtagtgataaaggagtaatgaggacataacagtccttaacatgtatgcacataacaacaaagtgtgaaatacctgaggcaaaatatgtgagacaggagaaatagataaattcactattatagctagagacttcagcacctctcttacagtaattgaaagattaagcaggcagaaaatcagtaaagatatagctgatgtgaatagcattttcttcaatcagcttgacctaattgacatttacagaatactgttttcaacaatagcagaatacacatttaccattgaaaacctgtctgtcctgatggactctgatatttggattggggagtttcttgtaaaaggctgtcttgtcataatgaatagggaagtctgtgtatttggagttggctcagtggggagggatagagctgtagaaatttattcttatttatagtatcagctagaagtctatcatgtagagaaacatttcttttcccgttcatttcaagctttgcctgctccccacccacaacaaagatggttcagatggttcagtagaaactggttatgtggaatgtaaggtaagatcatgctttctcattaggagtcataatcactttcctcattcatattaatatattcatatataataccaaaatcaccaccaagaaaagaaaattagagtaaggtaactttcaatatttggaaaataatacatgtgcaagacttctggtgatagctatatgattttgaagagaaagtaaaattttttataaatcaaaaagtataaaccattaatattacaaataggagggaaattgcaaagcttagcgaaaggcactggatagattgtggcatacaaaagggggtccacgttggatgcagtggcacaagcctgtagtcctagctgctaggaaagctgaggcaagaggatcacttgagtccaggagttccaggctattgtacccaatgatcgtgcctgtgaatagccactgtactccagcctgggcaacacagtgagacccccatgtctaaaaaaaaaaaaaaaatagggcgtcaggtttagtgattcattcatttattcttttaattatttattttaggttcattagaactattagagaataaaatgcatctgattgtttatatcttgtctgttaaatggtatttagttatcttttgctgttcaacaaattaccaacctagtggtgtaaaacaacacaaacttactatcacacagtttctgtggattaggagttcttgcacagtttaggtggtgtctctgctttggggtccctcacaaaggtacaaaaggtgttgactgggtctgcagtttatttcaaggctcaattaaagaaggatacagttctaaaatcatgtggttgttggcagaattcacttccttgatattgtttggactaagggcctcagtttcttgctgtctgccagaggctgccctcagttcctttccaagtggacctctccagagggcagctcacaccatagcttgcttcatcaaaaccagcaaggaagagaatctgctagcaagataaagtttcagtctttttaaacacagtcatggaagatacattccatcatctttgcaatattctattgattagagcaaatcacaggtcccatttacacttggggaggcgattttccaaggtcttgaccaccagaagataaaaatcagtgggggcatcctacagtcaaccaccacagcagggatcatgtgtttttaacatgttttattgtgctcgataataacatcaaagttttcattgtgtaccaacactttacataaattatcttattcagaagttaagtgatttgcctcacaccacatagtaagtgctaaaaccagcaagagctcaaagagtctgactctaggtattatagaataatatatttttaattaaacatgaaaagctttaaatggtgcttcttgtctgttttaaaatgttctagaattgaggtgggtagcatttttacagcaataagaatgctaatctggttattaattgttaccacatgatttcagactaaacatttcaatcacagtgaacttcattgtttgtggcgcaatgtcttgcttcccttggttcctagtacaaagattaaaggggcaaataatgagcagattctgtgaaacatatcctctgaggaggaaccataagcatggcttgaaggcagggttgctgaacagatacttcatttatttygttgatgttgcaggattaatattgtatactctttttgtggatgatggctttggttactggattccaaaggccagtattcttttctatgaaatgttttctaattcgtataaagcgaattctttttcctcttcattcctgtattttattttattttattattttatttattaatttattttattttatttcttataatagtctaggagtgcctctggacggctgtgtccaagggtataaatttgcaagtagtaaagaaatttaccattacttaaaaatcatttaccttcgttgtgaagttcctttcctctctctccctcctttcttccttccttttctttctctcttcttccaatttagagtgattacatatggcaagactttaaattattgtactcagggattattttgaacttgcctttaatttcatttatgtgtgactttttcctgtaattatatgtatacagtacatatgtaatctttcatacatgggcattaatttcatagctgtgagtacagaaaatcccattttgatagratatccaaataggatactttttggatagtctgaccttttgctcatttaatgacaagttggttacctctgttcacttagaaccaacctcccttcctccctcccttctttccttccttccttcttccttccttccttccttccttccttccttccttccttcctctttttttttttcccccacactcttgctctgtcccccagactggagtgcagcggcacattctctgcttactgcaacctccacctcccgggttcaagcaaatctcccacctcggcctcccgagtagctggaattacaggtgcgcgttgctgtggcctggctaatttttgtatttttagtaaagacgggtttttgccatgttggccaggctgatctcgaactcctggcttcaattgatctgcccgccttggcctccccaagtgctaagattacaagtgtgagccagaagcagatatttttgatgaatactttataattcagttttcaaaatatagataaaaatacaaatggaattagtcaacagttggccgcaagtaagtatagcttttatataaataatcacaactattcaaatgtaaattaaatttgactttctcctcactacaaatccttataatagctcacttgctgtgaatagttgtctgctttttttggtttgcttagctttaacaggggttgacaaactatggccgtgggacaagtctacctttctctgttttttgtttgtttgtttgtttctttttcaatggcttccaggctaagaatggttttacatttttaaatggttggatcaaaaacaaattcaaagcagaacatgtaagaggccatttgtagccacaaaacctacatagtttactctctgaccctttatagaaaaagttgactaacaaggtttgtgtgaaccaggatggtttcattattttcattattaagtcttgtcttttgtagtctctgaattgttaggcatgttacatgttgatatagacatgctctgaaataaaggtccaaatagtaatattattcttaggctcttgttttactgtacatcttttgtacttgtttccgtttttgtttttttttcccaagacagggtcttgctctgtctccaaggctggagtgtagtggtgcaatcatggctcactgcagcttcgatctgctgggctcaagcgatcctcctacttcagcctcccaagtagctgggaacacaggtgtgtgccatgatgcccagcttgctttttttttttttgagacagagtctagcttttgtcgccaggatggagtgtaatggcgcgatctcagctcactgcaacctccacctcccaggttcaagcgattctccttcctctgcctcctgagtagctgggattataggcacgcgtcgccatgcccagctaatttttgtacttttcatagagatggggtttttaccgtgttatctcctgacctcgtgatctgcccacctaggcctcccaaagtgctgggattacaggcatgagccaccacgcctggcctatgcccagctaattaaattttttttttgtagagatggggtctccctatgttgcccagggtggtctcgaactcctgggctctagcagtcctcctgcctcagccttccaaagtgctgggattacagatatgagccattgcgcctggtcttactataaatctttataagcttacattttacctcttatttcttcttgcttttattatatgttcagttattctaatgtgtttgtgtctctgcctcctaagaggcaccttgtatttagtgctgaagtggctcttaggtggaggagatctgatcggttatgcttagaaaggaacaatctagtgaaatgaaaggcctgggcttctcagatttggatttggatcccaagtcgaccacttactaacttagtgatcttaaaaaagtcatgtaagggggctttttgatcttcagtttcttcactttaaaaatggcaataatatctattttgcaataagtttaaaatgagattaaaaaaatagaagatttttgtgtattagtaggtcctcaataaacagatttttagctgctaatggtagctgataatccaaaatgcatgattttacatagttttatagaactcagaatatgttttcattttttctaatgtaaaataattaacacaatggatgagataatttggaaaacttgcacattcttcagaatgattgctcaccctgagataaatcacttaacctctttgggtctaggatctacaattgtaggaaaagtagaytggggtaggtgatcacattcaataaatgtatttattgaaacagaatagttaaatatatactaggttaaatagaagcatagaatgggctttatttctcataattcttctctcataactggacaatatgatttttaaaactgatgcttctaaatatgggaattataattgcccaccctgagctttatttagaatatagaaattttaattattcattatcactacccagacctctagggaagaacacaccattcttggagaaaggtgtcacatgaaaaaacatcttaaataactaaattgtaaaaatttaaactttgtatttgaatttttttctcccgtatataaatgctacataggcaaagtaaattttcattaaatattttatttaatataatgtatgaatagttgagctgagggacttgattaaacattctttatattttattcttttacccgactatactgagctgatgatgacttcaataacttcttgataattgaagataaataatagcaggaaatacagtcattgtggcatattgatttcagtatcacttgatttatagatgacacatctgctacaaagtctttagaaaaaaataccctgggctatttcttacgtttctttcaggcaaatttgtatttcagtatgaagatttattttgtttttgaaattgttatattgacgtcttttaattcatttagctcaagcttgtccaactcgcatgtggcccaggacagctttgaatgcagcccaacacaaattcgtaaactttcttaaaacgttatgagattttgttgcgatttgttttttaagcttatcagctattgttagtgtattttatgtgtggcccaagacaattcttcttcttctaatgtggcccagggaagccaaaagattggacacccctgatttagataacataatgaaataaaatggttgtttagtttggagatcagtattctaggcaaagctgtctgaaggagaacaaatataaatagatttcaatatatgtattagagctagcctgtgaattacaatggctacaaggaaatataatgtaaaatascacactatgcttttcttgttattgttgcttgttcaaatagaatgaatttgattttaacatagtctttctgttcttttttaaaaaaatgtatgcaaaagctgttgcttggcgggggtattttacatcagaaatgcttaagagattgtaataaggttggtgaaaaactgaggtacatttaatgaatatggaatgctatatctgcaaataaagacaaaagggactttcaaaagtgtaatttaatgttaattctcagttttacttaatagcacttcagaaatattatctattttaccatttgttatgtgcagaagctaagagacttatttttctgcaggtcagtggcagaagaagaaataaaaatcttccaaagaattatgaagttgtatctgattttcagtgtactgccaacactgtcctcttttatacttttaagtttcccttccttttagaattaattcaggacagtatggtttattagcctatagataatgacagaatatccaattttatattacagttacttttggcatttgttttgtgtgatcagagatccccatgtaacagtattgaaaatggccacttgaatcattacatctttgttatatggatatatctgtataagcatatagagaccttgtttaatatttattgagattaaccataatgataggttagtgtcttataaataagtagaaatgccacattaaacacaagtttgctagattaggtaattgctgtatttcatgtgggtcatgggtctctgggaagaaaccacatactgtaagttaaaattaagtccccagtttatttgatcagtaatacaaaagcttattggacatggtaatgccatatggagtagaaatagatatagtatatctaaaaatagcttcctgtggtcctttagagtccccagtggggtcataaactgcctgtgcagttgtccacacaaggtaacatcttgccagatctaagctgatttcttgctatgccgtaatccttttatacctggagctgatgtcacctttctacaagaatatgcacaatttatgcacttccatttaaaggaatgtgtacaagcttctaggatctattagttcttaaaccaaacctgtgtcagtaataccctattctgatccttgagaagaaagcaaaagtcatttcaaggtatctcaataataaatacacctttggcttccctgcactatgggaagtgcatctcttcaaaatactgatagtgctatattttatatatatatatatatatatatagtcatgcgttgcttaagggcgggattacattctgagaaatacgtcattaggtgatttttgtggctgtatgaacatcatagagtatacttacatcatagagtgtagtaggctagtgtgtactacatacctagggtatatgatataggctattgctcctaggctacaaacttgtacagcatgttgctgtactgaatactgtaggcagttgtaacacgatggttaagtatttgtgtaaacatatctaaacatagaaaaggtacagtaaaaatataatcttgtgggcctactgttatatatgcggtccattgttatgtggtgcatgactaaatatatatatatgtgtatataatactgtatataatacatatatatgtattttctatcttgtagaaaatacatgttatgtgtgcgtgtatataacacactatgtatacacagacacgcacatacaaacacacatggaagtttgttgaaaaccagcaagttggttgatcactcattattatttgattgtttttgataggtattggtagcttccaataactagaggtcagtgaaaaatataggcttcctcccccataattctgctaacatttaatatgttacagtgaagacaagactcaaawtggggaagttcatactctgtctttttaggtgttcctgcaatatcttatatgaaagattatcttgagaaagttgtgaccttattccaacaacaggatttgatcatccttctgttcaggcatcagataataatctgaatcagcccctagacacagtgtggattggaatctaagcctagagcatcattccaaagagtattggctactggatttactaaatacttacatattgttctcaaagttggtagtgcttctgtaatatttctaggtatttcacataagttaattttacccagcaaaatactatttctagagtccatttagcttacaataaacttgctggtttttataggaaataaagcttactgaacagcttgatattgctgctgcctttgggatgtaggtgtttgatgatgtaatagttaattaatcctgaagtgttaattcccagacctactgagtcataaactctggtgatgaggctcagtagtctgtattttaacaagctctcaatgtgcatctgatgcacactaaaatttgagaaccactgtcctaaagtacaataacattttgatatttaaattaccgacagagaaaattcataacagaataagaagactaacaatgagtcatctttgggattttattataaccagttagtctcaggtacctggtatttacccgtgaagtaaacatttattatatcttgtgtcctgttaagtatagcacataatgcattatgatgggactgaggttcagttcaaaaactattcagcaccttctatttattcattttaggatactgctgcttttgtaagacttaactcatttatacagccagagcttttagtcacagcaagagccttgaaagaagaatgtaaatagaatattgctatgcatgtttgtgtcaaaggatataaactgacacatgtaaattttaaatataatttactttatccattccagtcgtgtccagttaaaacctactggaatctttttttttcatagtttatccatgtatgatacgtgagtttgtatattttattattaatggatgtcaaccatttttaccttttttgttctacccataattttcttcctcgaatgatgccactattgccaaattagcaagaagatatttatgacttttctgttttctaagaggacttttgcatattcacatataaattgtggtttaagaaagatacacattgacattttgacagattttaattttcttaggcttggcaggatacaactactttgtctgttacatctggatgagaccattagaatcttgttgctataactgtaagtcatggtgttgaatttgcctttgcggtatagaaaatagagcagtgtacttgaatatactctgcagcatagagacatagcgtgaaaggagcataagtgtcacatgatgagttgagctagcatttttttcttccatccaattaaaataatatataaggtcatgaatatccagttatggttgtatatccatattctatttgtgatgaacacatgatttcttccattttaaatttatatattttttttcctggaagtgttatactattctgaaatattttgatataagaatatatttacttcattatttttagacaaatttataatgttggcgtttcgtgatctctgttcacctcattaatgtttactcttaatactttctaatttgcatcctaaacttaagcctttatgctgaacaacccactatgcttcatgtctgtgcctttacacattttactattttactgattcagccccatccccagctgtcctaagtatttttagtaagtgttggtggttctttaaaattcaacctaagcgtgtcttcttctgagaatcctttcttgacctcattcatctgaattaggtgccctttctatatgttcacccagcagccatggcctgctcctgtcattgtactctccacagtttgataacttttagtgcatttgtcttttagctgaatcttaagtgagtattttgatggaatggattatatcttattcatccttgtatcatagtgtttagaatctggcgtctttaataaagtgaattaaatgctcattgaatgaatgaatgaatgaatgagcccagttgatttggggaacattgtacctgattaaaaaatcattctttgtattctcaggagataacggtcatcttagacatgctgatctatgcctgttatatctttgatcccacttattacttagtccagtacctctggcatagtgaatgctgcatgaatggattggaattaagggctgtattttatataaatcataaacattttcttctgtagatttaattattttataattaaaacttaacatctttagatgccatctttttttagaaaaagattttattgatctgccttttaccactttgatcaaagtacaccttttgggtttcatggttttatttctttttcttttgtttttttctttttagacaagatctcactctgttacccaggctgagtgcagtggtgtaatcactagcatgctcactgcagcctcaaccacctgggctcaagtgatcctcttggttcagcctcccaagccagctgagaccacaggcacatgccatcaggcctggcaaatttttgggtttcattacatttgactttttgttgttgttgtccagccatagaattcttgtcaatattatatagtagtttcctctgaaattttgcattttcatgtcattgtgaaaggtattagagataatattttttgtaggtcaggccacaatcacagttatcactgtgataaaataaaaaaatgtacactgccattcataaccaacaggaagatctggtaaaactctgataagtaccttatgggctctaggcaacataagcgacatttaatttatttagattgctgaaaataataagcaaaaaaaaaaaagaaygctgagtcaaatgcaattaatttagcatctatagtaacttggttttagtgattttaatgattaattagaaagtgcatagaagctgtgaagctgtttgctcttcccaaccctatattttgatattaaggatctcatctttgttgtgtagaataggcaaatatttaggaagacagcaatttatttccattaaaatatccgaattagccagctaagagtctttgtttactttttttgtgagatggagtctcgctcattcacccaggctgaagtgcatgggtataatctcagctcactgcgagctctgcctctccggttcacaccattctcctgcctcagcttcccgagtagctgggactacaggcgcgtgctaccacgcctggctaattttttgtatttttagtagagatggggtttcaacagctaggaaggtctcaatctcctgaccttgtgatccgcccgcctctacctccacctcccaaagtgctgagattacaggtgggagccaccacgcccagcctttttttttttttttgagacagagtttcactcttgtcgcccaagctggagtgcagtggtgcgatcttggctcactgcaaactccgcctcccagattcaagcgattctcctgcctcagtcccctgagtagctgggattataggcggccaccaccacacctagctaattttttgtatttttagtagagacggggtttcgccatgttggccaggctggtctcgaactcctgacctcaggtcatctgcccgcctcggcctcccaaagggctgggattacaagcatgagcctccgcgcccagtctgtttacttcttaacatcaaactttgaaactccttatttaaaagattaaagaaagtgaattactgtctatcactgttgctgtttgcttattagggatataaaaaatgggataaagatagaaatataatagatcaggtggtaacagaaggaagtagagaaattcaagagattgaagacatgtagattcagagtcaagttctaatattttaatgcatcttctgtgttaggatctaagtactttcacatatattacttgtaatttaatatcaagtgaaaattagtttgttttgccttaggttcttctttgtcatctttcagtacttaactccttagtttgtrtatgtttgtatttggcatccagtttgtaagacttcatccattcacgtagtccttcattcaggctttgtagtcagacagatctaatttatattctatattggctgtgacaatttcttaaaataagacaatagtacgtattgcattttggaaatatatataacctataattattttaacagatattcctaattgtttatacatttcttgattaaactaatttatttacaaacagatctgtttcatttgcctcccaactcaactgttaggatgtttgctcctgcacgctttcatgggtttgcatttgccccctccccattttataattctctaacctacagaatgattgatttctatattatttatttattttaatttttaaattaagttttctttaaaggcagggtttcactctgctgtccaggctggaatgcagtggcatggacatggctcactgcagcctcctgggctcaagtgctcctcccacctcagcctcccaagcagctggaggacaggcattgagycaccatggctggctaatttttaaattttttgtacaggcaggatcttgccatgttgctcaggctggtctcaaagtgctagtctcaagcagtcctcccaacgtggcctcccagagttttgggattacaggtgtgagtcactgcacccagctggaatgattgatttgaaatgatagccagtgtaaagttctgtctatataaataatatgaaatgacaggaagtaacataaacatgtacttctaaaagtatggatattttaagctgtttgttcttttgatgcaactatgattacttgtgttttaaaatatacttttagacaaggaataaaaaaagtaaatataaatgctttttcataaattgttaaacaacagtgaagattggaaattggtgggcatgtctaattagcatagtttccttcggaaatattggcgtttgatttcctcaaagctgacacaactcagcatgtggaagtcaggctgccttgccccagaaggaaacttgctgcatggtgccttgtaacataattactgaaacagtaagcaaagtagtagaaatagcaagggatggaaacagttcctaaaaattaaatattgagactgaagaaagacttgacataatcagagagaatatggacaagcaagagattaaaacatagagaatgaaatagatatggataaccagtaaagatctagcattaaaataattgcatagagaatagaaaatatggaagagaaaaattattcaaaataataaagacactttccctgaaaaggagaaacacatcctcaggtcaaaatgatattttgggtcctgtgaattttgattgcttgacatatctaggttaaatrataaaaccgatatttctccaggtatccagaaagaagaatatatcatttcaaagagggggaaatcaggctcttgctaaatttcttcctaggaacagtcagtgctgragatgaatgtagcaatctttttacatttctgaaataaagaaaatgtgatctaggaatgcagttcttagctaagacaccagccaartatagattcaataggcaggcattcccaaataccctcagtctctcttgaaaaatatatcatttaattaggrtattgagccatttaaaagataaattgataaaattggcagtaacatcatttaatatgaaatgctagacatttatgtaagttatgattttggaatctaatgtatttgatataaagtttaaccgtgaagaatagcatgccaacaaaatttggagttggaagtattttcatgtttctgttaataacatctaaaatttaaaatataaagacattagtccagtatattaatgtttttgacagttttttaaccttagatctttttaaaaatatccatttgaaattgaggaactcatgcattttcactgaatttgtgcttctatcaaataaaagtaaaattaaatgtactatattttaaaaggacaaataatttcctctaattttgtaaaagctttttaacctattttgacatatttgaggggttttcccccctacacgttttcatctctgtaattcttttaaagagtatgtgctgggcgctgtggctcacgcctgtaatcccagcactttgggaggccgaggcgggtggatcacgaggtcaggagatcgagaccatcctggctaacacggtgaaaccccatctctattaaaaatacaaaaaagtcagccgggcatggtggcagatgcctgtagtcccagctactcgggatgctgaggcaggggaatggtgtgaacccgggaggcggagcttgcaatgagctgaaatcgtgccactgcactccagcctgggcgacagagcgagactctgtctcaaaaaaaaaaaaaacaaaaaaaactaatttttacaaaaataggaaatatttgtatatttaggaaaacgttattcactgcaaaagaatttttatgtattcaggaaatagttatgatcctcacagatgagaaaaagtgaagttcagaaatgatatgacttaagtcaaatatttagttaattttataagcaggccaatagtccaagtcttttgaatctttggtaactgatctgttactgcgttacacaagtgataatatttaggaattaatatatttctagagcagtgccatatgtagccacagtgtgtcacaaagagaacaaatagtatgtgtgtgtataggctgaaaaattttaccaagacaaacgtctgtatagtacctgtgctattaatattttatgaataaaattatattgtctaggtaacttttaggcataaagatggcaacacagtggatctgtgagattcaggacactgaatctaaaagtccacttggactattaaaatattgctaaatatgaatatttctggggcttagagttgcacaattactttgaatgtatgcatgcctgattttataaaggcaaatgcatccatgtattagttgtgtggttggtagtcagtctgaattaatgacaaatgtgaattctgtaacatttgatgataaatacagctttattgctttcaggttcatgtaaaccaaagtaaatctttactgtttccaagttgacagcccactgaatctgatataattaatagatgatggtaattggtaaatagtgccatccatttttactgataattaatgtattcacttgtgttctgaagaaatttgtttttaaaacactgccaccaacctttaccccagcaaatatttacagaatttacttttaaaacaaacattattttagagtttaagaaaactgacactacctactgttctagcttaattttccactactcctccttccaccttaacctcccttttcatcttcatttcctgttctcccctgtaccctatgctctagccatataaaataagttcatttttactgaatgtggcatgctctttcacacttcttttcctttgcacatgctcttccttctgtttgaaatgtcttttccttcatcccccaacagacttttccttgacatggttcactatggctatccttttaaagttcttaattataccaggcattatttatctcttcttgctatggtctaaactctcataccaaattatcgctgttattacatgtgctgcaatttgtaatttgtgtctgacttttccacaaattatgaatctgacatttccagattgtaaaatatttgaggatagtggctgtgtttgtttcatgtttgtgtgcttaagtacttggcatgtaacaagtacttggcaattttttaaaaatgagttgtgactcttagtcctgcagagatcatattactgtggtcccctttatccatggttttgctttctgcagtttcagtatacacagtcaactgtggtctgaaaataagwttttgagagagagagaatgcaagagaaagaccacattcacctaacatttattacattatcttgttataattgttctattttattattattcttgttaatctcttagctgtgcctaatttataaagtaaacgttataataagtatatatgtctaggagaaaacagtgtatataggatttartactatctgcaattcaggcatccactaggggtcttggaacagtatccccacaaataagagggaactactatgtcacattttccttttctttctcagcccctttatttcgctcctttttcttgtcgctctcaatctcttttactttcctcctctttcccctactccctccttttcaactttgttcttttcttcagtgttacacaaaagacagacatttttagaagtgtttgccaggaaaagagtgttataaaatccaccaatgggtactgcttctttgtttttacatgtaatctaggtagatttatttatgatgaaatatttagaaaaggaatmctgatttcagtagaaacttctcttttaaatgtcaaaatctacaatagcattatttaatgaaactcacatagaagaaataaaggatcatgggcctatgtaaacttgaaaataagaacttggcatagagacttagaattctatagagaacaccatggcacttcccagacctttgctttgatattcaccctttgcttgtcaagggccttgccttaaatctttttttttttttttttttttgagatggaatctcgctctgtcgcccaggctggagtgcagtggcgcaatttcagctaactgcaagctctgcctcccgggttcacaccattctcctgcctcagcctcccgagtagctgggactacaggcgcccgccaccacgcctggctaacttttttgtatttttagtagagacggggtttcaccgtgttagccaggatggtctcgatctcctgacctcgtgatctgccygcctsggcctcccaaagtgctgggattacaggcctgagccaccgtgcccagcttgtcttaaatgttttgactcagactggttcaacttcactcactcagtttaaagacctctcttctcatttctttctcttcacagtaataaacttactttaattaaatttttgacacaacaagagattttcattttttaaaagatgatgcatagacatggtaaaccatccaaagagtacaaaaggggtatacattggcatgatatttctgccacaaacccaacccctcagtttctctttctagaggtaacatcttctattagtttcttctgcttcctttcaaagatatcctccctatcttaggggaaagaaacagaaagatacgacataccaatgggtaacaccatctgttggagtaatttcctagcattttttttgttgagagctctgattacttgattttgtccttataagttaacattttttttcttcataaccttgcacaaaataagaatcatttgatgaccatgagttcatggcagaaaattgagtattttaataaccgtttgaaacaggaaaagcattgattggttctcagtctttggaattagaaactttgcaatgagtatgttttcacccagcatatccagttcatttatcacatggtataaaaagaaactcacatggaaggggatgagtttatgctgaaatccaaacatcttgacttaacctgcagaattgtttttatgtctttgcatcatggagtcaaagaataggtaccattggaaaaatcccttaagatgtctctctgtttctcctcttgaccaaactgggggggaataataataatgaaaaaggtttaattgcctagatgggagcctggtagaacccaatgtgtcattcatctgttacctaaatgtggattagtatctggaatacattaggtaagaatcacaatatagggtaattctcacctccatagaaaataaagggttctaaaacactaccacataacttaagggttcagtaactcagagaaatcctgcataaacgattgtttttctagtctcctggtatttgttggaaataggtttcatacttcaaggtgatacatgtctaagggcaaaggatagtagtattctttcaccttctggcactccatctccctggataaaattctccatggggaaaataggtggtggtatttctgtactttgggaattttagacatttgtcatttcattgttggggaaaaacaacatttctggttttgacttggcaaaatgttatggccttcagtttgtgttcttttacctatagtttatttgaaaaatacacatacacacataaaacatacatttttctacagtaatggaagaaaacagaaactactttgtcgacattttggaaacaaagcctagaagtatttgtgcaaaaggttaattcctccttcacacaaagaatagtgtgaatacatttaagttatttaaatgaatgtgaagttagtttaaaatttttccattttaatatggagaaactcggatttacttttggagttggtattaatggtctatatgggtttctcttggcctatcacttgtcattgttttcaataaaaggcaaaaagcagttgttcaggtttagactgaagtatttaagaacatgaaaggggcatgagattctacttctgaaagcttatgatacattatatctttgaaattcaactcccttgttctgacaagtatgttacacatcagccaggcagcaagataatatacaagaaaaatccaagtctttctttgaaaggattaaccttcagttggtaacttacctccctggggttttgtgtagcttaattagcattggcaaagcagcttgatactgttggatgaaaggcaggtaagttattagaggtaagatagagttatgattgtgattttgcaaacagataatcatttttttcattggtgacatgaggggaagctgaggaggatctttatcttgggtcttaatctcaggtagtatagtttgaagctagaatgctttatgaaggagctccatgtttaatatctcagctgaaaattagttgttgcctttctcttaaagtattgtggcatgtaaaccaagagaaatgtgcactattgaagcattgaagcaggctttttttttttttttggtgtatgtcatatataatctagtaacagcatactttacttatgtgattaacaccacaggcaagtcacatactgtaacaatttgcatgagatggttgtaactaaaaaacatgtaaactctattgcaagatacttaaaaaaaactgggaataaacaaaaggacattgcttctagatctcacctagttcttcagaaagtttcttattaactgagggattaattatgaagatttttctgcgactttgcatatgcagctgtatatacaattgtttttttgtcagcttcatttttaaaacaggcactaaatccctttggatatatatgagagctttcactttggttttgtgttataattgttcctctggtgtaaagtagttcatgaaaaaatggttgagtgcgacttgaaataaagtatatttaaattctagacaaaagaatgactagatttgagtggtgggggagaactgacctattatctattttttttccttcattcaagcataagtggcttcctatagaggaattaattgtgttctctcagagaatacctaagtggtgaggtctgcttgctagctagctagctacctacgtacctacctaccttcctatctatctgtattagatagatagatatattaaaggagctgttcaaacttcagcctttggtggaaggcaaaagaagactctaccagaggacctgatactaagcttacatttaagggattttattcttttgagtaaatagcctagttctgtctaatgatactaaaagatatttcattctgagtaggacagtttatcttctagaacatccttagaagttttcatgcatattcaatctccttttcccctttaaataatccctattgatctgcagtctgttgagttattgaaactttatttgaacctgaatgtgttgtcagcattgggaacaatgcatctcatgtatttctgtcttttgtggaagatactcctctcttctacttgttgggaaactagtatcttgagtcattctttaatgcatctttcattcaatagacatttcttggacactcactatatgtcagcatctgggctggaccaaggcatgttctatacatggtattggtatggttttggtaatctggtaatttcttttgcattttcttcacatcctctgagatcatgtaatgtatccagtttaatttctttctataatactagtctttaggcaattggtcagtccttctaggctctaatgatgtttataatcccsaacataattctataggatttccagtgtaatcctagattattgattttaccttattttctgaattatttccttgaatcactgtaaaacataatcacttgcacctcactccttttttgaatctttatgtgtcaatacttgtatgccttttacttaaagtgataaagagtagtttaatagttgtaataaagaataatataacttaaatgaatattaaagttaagaggggaatctactgcattcattttgaaataggaaaaattgcaatagcaatcaaaccagattttcttttgttcttgaaatgttcaaaatttgtcatgaacattatagattctgtgtttcatagtgtatagatacagattaatattgtctgtagaatacccatgtaagggaatgtgatattaatacagaaattaaaatagccgtaaaatgatgagcttctctaaggtgcgctcttcttttttcttttcttttcttttttttttttgagacagagttttgttctttttgcccaggctggagtgcaatggcactatctcggctcaccacaacctctgcctcctgggttcaagagattctcctgcctcagccttcccgagtagctgggattacaggcatgcgcctccacacccagctaattttgtatttttaatagagatggggtttctccatgttggtcaagctggtcttgaactcccaacctcaggtgatccacctgccttggcctcccaaagtgctgggattacaggcatgcaccaccacacctggctaattttgtatttttagtagagatgggattttgccctgttggtcaggctggtctcaaactcctgacctcaggtgatctgcccaccttggcctcccaaagtgctgggattacaggaatgagccactgctcccggcctaagatgtgctttctaacaaatttcacagtgccagatttgacttttagtaaatctgcattaaaactagtcagaaaataattagtgaaaaactgatgcaggatattttcttgacccctttgtggggtgtatgacaggggtgcctcgtttactcagcctgccccgcttaaccccttgtgggagggagagagtgtgcaaacgagtacaggaacccaactgcaggaactggccaggggcccggcagtttacttgggtaaacttactatttactttggtctgcctggctccacccctygcaggagggagcatgcaagtgagtgagtgcagggactgccagctgcttcagcgatgacaggagtaaactcccttcaggccctgtggcagcatccaggtaggggtttctacgaccccaaggccccagggggtatgttgcaatgctgtcttagctccattgtctgcagacatcagtgtgttatcagctcagtgtgtcctttgcctcattgcattgggtggctgccctctgccagtgagggcagagggccagtatgacagactttttgggtaccggcatgtggtacatcccaaattcttgtctggtgcccaagagaaatgaggtcatgcagatgaactgaaggatggtgaatatagagaattttattgagtcgtgaaagcagttctcagtggagaggggagcgagaaagggagcgggaagggcaggttgctctcccctgaagtcaagccacctctctgcctctctcttctgaagtcaagttgcctcatccagccggtgtctctgaagttaagtcctctctctttgatatccagccacttctcccctctgccggctgagtctggggtctttataggcacagaatgggggttgggacgggccataggtagttttggaaaaggcagcattcgattggtaaaaagatattattgagaaacaaccaattgggagagagcgggcacacagggatggaagttttcactttgggccaccgatttcagacttttccactcgaagttgggattttgccagtgacttgcccctgtctgcctagagtgtctctgcctcctctgcctcctgttgctgtcaaaaccactttcaaatgtgtattcttaaagtttcatcttatgcattagaatatttaatctttgataatggcatttatctggcaccttatatttactgtatttattaattattgattcctgagtctcctgaaagtgtctggatatggttaatatgagaggatgtaataatcagaatgccgttaactagcataatttcaaaaatattttcttgaaccctgttgtgtctatttgactattttaatatgaactaaaaatgttagcatttcttatttgaggtgaaattataaagaaaatttgtttccagggttyacttcatcctccttaaaagtaaagtattttgtttcctcactctcatgttatatacctcagtctggattagaactaaaaccacttacttgattttgagaagaaagttcacttcgaattaagtagaattgacatatattccttatattctttatcaaataacttgacgatttatcttctacaccattctcttttttttttttttttttttttttgagacggagtctctctctgtcacccaggctggagtgcagtggtgggatctcggctcactgcaagctccgcctcccgggttcatgctgttctcctgcctcagcctccagagtagctggtattacaggcacccgccaccacccctggctaatttttttgtatttttagtagagacggggtttcaccgtgttagccaggatggtctcaatctcctgaccttgtgatctgcccacctcagcttcccaaagtgctgggattacaggcgtgagccaccacgcrcggcccacaccatcctcttatattatttctagcctaaaacattctgctgtggctgataaacagttactatgactacctttgtttttgaaagtatcaggataaatagtatcacctgggctaggaaatataaatttatctaataacagtagaaatgaagtttgtagaatgacctgacaaactggtaatctggattctaaaacctttggcagtagaattgaagattaatttttgtcctcttcaggctctgtggggtttttttacccttttggaatgattattttaactgggttagagaaagtatacacagagatgaacacatgcacatacatatgcaaaatgaaaagttgtaattttgatgtgttttgattttaaatatagatttgctataataaaaactacatctttttatttggatgtgagtgtgtatagtttgaagattaaacatacttattaatcattgctttgacagcagcaatattcacttagaactcttgatattatcatataattttatagtattctttccaaaattgttaattcatttatagcagttatccaaaccattgttctgtaggaggactgtcttcctttcttacatgatcagctrttttaatgttactgaagtttttaagagccatctttctttcattcttcaggtttttgaaggagatgatggtatggatttgcagaatagttaggggagttacttattttttagataattttcaaccaatacctttagggtagcataagaagaaaccaaatatacaaatatccaacctcaagaatatcaactacagaattctttgatgatataacacttttttttttaaatgaaatcatagtttaaaatgcatggttgttttctctcataggacttgctatattctagtcttttgagttttccaagcatggtctatctaaacacttactgtgatatgtagaattttcttaaattttgtctagactgtagacatcctagttagctcagcagcataattcgtaagaggaagctgttatcatattccttataatccttttaaaatttgagggctataccataaaattgtttaccagtaatctgtgctgttccacaatagaacacaataaataattttgataggtaacatttattgagcccctactgttttggaacatttagtcctcaaaataagtctttatggtactattgttattttcatagtacagataaggaaacagagcttagaaaggttaaataacttgcccagagtcacacagctaggaaaagttaagagtcacacagtaagactcytactaaagtctgtcttcctgtaaaaactatagtttaaatctctatattatttttctggataatgcagctaaccagcattttaaaaggcgctgatttgaatgagcttttcagtgatggtggtggattaatctgatttatccacactatcaggccgggtgcgatggctcacgcctgtaatcccagcactttgggaggccgaggcggrtggatcacgaggtcaggagatcgagaccatcctggstagtgaaaccccgtctctactaaaaatacaaaaaattagccgggcatggtggtgggcacctgtagtcctagctactcgggaggctgaggcaggagaatggtgtgaacccgggaggcggagtttgcagtgagccgagatcgcaccactgcactccagcctgggcgatagagcgagactctgtctaaaaaaaaaaaaacataaataaaagaagaagaatggtgcatatcacagaatggcttgtcttggagtaaagtccatgatagtgtaacagaattttttttttggaggcttggaaactctaaacatctgttatacaacattgaggacagtagctctagtagcactgactaatatggacaactaaatcagtttaacattgagccaggtatttgtgactcaggccatctcacagtgaatttgttcttaatatgttttaatttaagctgttggccaggcgtggtggctcatgcctgtaatcccagcactttgggaggctgaggcgagaggattgcttgagcgcaggagttggaaaccagtctgggctacatagtgagaccttgtctctacagaaaataaaaaatacaattagctgggcatggtggcgtacacatgtagttcccagctactctggaagctgaggtaagaggacagcttgagcccaggaagtcaaggctacacagtaagctgtatttgcaccagcgtgggcaacggaaagagaccctgtctcaaaaattttattattctattatgtaacagtcatacagtttggctgtatttactaaaaaaaaattttttttttccgagacgggagtcttgctctgttgcccgggctggagtgtagtggcgtgatctcagctcactgcaacctctgccacccaggttcaagtgattctcctgcctcagcctcccaagtagctgggattacagatgcacgccaccacccccagctaagttttgtgtttttaatagagacggggtttcgccatattggccaggctggtctcgaactcctgaccttgtgatccacccgcctcggcctcccaaagtgctaggattgcaggcgtgagccactgcgcctggccacagtttttttattctgttaaataatagtgatgtggtttggctctatttactatgtatacatctatttactaatttagctttgagtgttttttgatagagatctttttctcatttctccagttcaacttcattttaattactgaattatggaggaaaataatgtgttttcatagtagtataattactattccaaaggctgaaatattattggaagatatattttatttagaagttaagtaaaaatttacaaatactttgatggttcttggaacatattttttttcccctgaggtcgagtctctgtctgttgccaggctggagtgcagtggcacaatcttggctcagtgcaacctctgtctctggggttcaagcgattcccctgcctcaccctcctcagtagctgggactacaggcatgcaccaccacrcctggctaattttttgtattttagtaaagatggggtttcaccacgtcagccaggatggtctcgatctcctgacctcgtgatctgcccaccttggcctcccaaagtgctgggattacaggtgtgagtcaccacgcctggcccagaacattttttaataagtctctgaacataaaatttaatttctgcctgagccttgtttcctaccttataaatgagaaataagcaaacacagactcagtcatcagctttaaagtaaacaaaaaaaatattttcagaatatggtatcagtatcaggcatataaataagataatcatttttctgaaaagaaagaggagaaaactaaaactcattgagcattaccatgtttccccccatctccctatacttctaacagtggttcacctcttcttcatctttattgtaaagcatttcttaaaaattgaagaagtgcttgaaaggaggcaaaagttcctttttgaaaattgatttatttcttggtttggttatgagtatttttagaaatattttaaattcttactcatgctagggaatggctggtacaggatgataggcaagctgctttagtttggacctatgtcatataaaggccttacagctctgtttcaggaagcccatacttagattccaggatacattcctgggccagacatctagagatactctttggtatgcaaggtttacaagtctgttttcaacattttgtcctaagtgttctgcttcacttcataaactagtaattgcagtgttattatcatttaccctacctttgaaccttatatttaaaagacttacagtagtgtgaattggcacataaccaaggtctttccatttcttaataaagccattaactactttctttatttggaaaaagagatttacaataatcgttaattttattaggtctgcttaatacatatgctctaacaaaaattcagtaatctgctgtaaatccagtgccataagatattttcaccaaagattcttgctcttttgagtacatgaagaaaattaaatgttactgttgagagaaatgtcattgtagtctagaaaattttttcagaaaaccgatagattttaatagtagagtaacttgataaacaggattagtattgtacactttagccaagtaaacgtagaataatgtgtctaaattccccacaacaatccatttctttctttaaagatactcatctcttaatgcaaaacctgtttgtaaaagatgtgtcaattggattttccatttacttgtatttcagtttacaaatgctctattttcacttcactgattactttagctggttatatgacagagctttgttattttgtcctgcctttaccacttcatacttctttttcctcctagctctaagtagtcagtgatttgtttgtgttacttcatktatgcaaaaaatattaatgaagcaactactatgtgtcgtgagaatgtgtcatgtgctaggtatagaatagtgccctcacagatttgaatgtagcgggatagagtgacaaataagcgcttacattaaataagtggttatagaaacaacttacatttaaatatcagtaggggatgggttaagagatgatgatgtctccatgggatgaatattttgcagctgttaaaatakataaaacatttgtaaaaaatatgcataagacgatatttgtagtaacatgggtttcatggggactagacttgttattatgtataatcttgtaccttaaaaaatttattcacatattttcagctaaactctaataagatttaaagaaaatttgcagcatatggaatgagcaaataagtaagcaattacatttccatttaaaaaatctggagataaaacattgaattattaatcactcattgccctgatttgtacattttctccaaattgccttcttttaacacatttgaagtgagcacagacaactattcgttctacattgttctgttgttggctgctggatgatgcaacagtagtctagtatacacttgtcaaagtaaatatggacacggatttccttggagaattgagccagaaacctttttaatgttgatatcatagtatcttagagctgaatttagatacagattatcatatgtgattattctgttaaaactgagattgtcgcttgtcccttttaccccttcttggtttgtgtgtgagtctgaaagttatagtaaattttgaaaattataaataaataaattcacacttttgcacattaggtaaaatggatatgtatagtcattagaagctgtttatttgaataaagtgatattttctttcaatagtggaactggcttctccatgtatcgaatttgacaaactcttataaagcttgacatttgaataaatacaattatttgttgtgcttttgctgggaatatttcagtcctatgggtgaccacttaaaattccaaccaaaacaaacaaaactgcrtatctataatttactgagtataactctacctttcagccatattagtttatatttagaagtggtccgaattatgttaatcttagtagtttgttgatataatgccactattacagattttctttatagattgtttaaaaaattttttcttattatcatgtgaaacaaaatgatgttattttagcagctgaactactatgtaaccatgactaaaaatttagtaggtgataggcaacggtgttggttaatttcttctgaataaaagacatgctatataatatttttacagtaatattctaatagtgtattactatatgatgccagaagatcagaatcaaatatcattaatgatgagcaactacttattttttatctaattttattaacgcgtttctgctgttaaagagtacttcaaatatatatgtaaagctcagaaaataatataaccccatgtatttcactcagattgaacaagtattgatattttgccatatttgcttcagattgctagaataaaatacagatgtaaccttttttttatcttttgaagttttgatggtttttaaaaaaattttttttatatccgtaagtttttggaggacaggtggtattccgttatataagttcttcagtggtgatttgtgagattttgatacactcatcacccgagcagtatacgctgaacccaatttgtagtgttttatccctcacctccttcccaccatttcccccgagtccccaaagtccgtcgtatccttcctatgcctttgtatcctcatagcttagctcccacttatgagtgagaacataggatgtttggttttccatttctgagttacttcacttaggataatagtctccagttccatctaggatgctgcaaatgccattaaattcattcattttcatggccgagtagcgttccatcaccacacacacacacacacacacacacacacacacacacacacacacacacagtttctttatccactcattgattgatgggcatttggttccacatttttgcaattgcgaattgtgctgctataaacatgcatgtgcaagtatctttttcgtataatgacttcttttcctctgagtaaataaccagtagtgggattgctggatcaaatggtagttctatttttagttctttaaggaatctccacactgttttccatagtggctgtactagtttacattcccaccagcattgtagaagtgttccttgatcaccacatccacgccaacatctattattttttgagtttttgacaatggccattcttgtgggagtaaggtggtatcacattgtggttttgatttgcatatccctgattattagtgatgttgaccatttcttcatatgtcttttggacatttgtgtatcttcttttgagaattgtcttattcatgtccttagcccactttttgatgcgattgttttttccttgctgtggattctgtatattagtcctttgtcagattcatagtttgcagagatttttttcccactctgtgggttgtgtttattctgctgactgttccttttgctgtgcaaaagctctttagtttaattaagtcccacctgtttgtttttgttacgtttgcttttgaagtcttcgcctaagccaatgtctagaaggattttttccgatgttattttctagatttttttatagtttcaggtcttagatttaagtccttgatccatcttgagttgatttttgtgtaaggtgagagatgaggttttattctgctacatgtggcttgccagttatcctggcatcatttgttgcataggatgtcctttccccactttatgtttttgtttgctttgtcgaagatcagttggctgtaagtatttgggtttttttctgggttctctattctgttcagttggtctttgtggctatttttataccactaccacactgtttcggtgacttacggccgtatagtatggtttgaaatcaggtagtgtgatgcctccagatttgttctttttgctcagtcttggctttggctttgtgggctcttttttggttccatgtgaattttagaattgtttttttctaattctgtaaagaatgatggcggtattttgatggggattgcattgaatttgtagatttggcggtatggcaattttcacaatgaccataagctcattttctaattgagcttctttggatcttctctcttcttttcttggttaatcttgctaatgctctatcaattttatttatcttttcaaaagaacaaaaatacactaaaaaaaaatccaargtatacaggcaacagataggacgatgaatggaatagtacctcacatcttaatgttaatattgaatgtaagtggtctaagtgctccacttaaaaggtacagaattgcagaatggattcgaattcacaaaccaagcatctgctgccttcacctaaaacataaggattgacataaacttaaggtacaggggtggaaaaagacatttcatgcaaatggacacccaaagcgagcaggagtagctattcttacatcagacaaaacaaaaaacaacagcaactaaaaaagacaaaaggccttgtccaacaaggccttttacaatcctaaacatatacaaggccttgtaacaatcctaaacatatacacacctaacactagcgctcccaaatttataaaacaattactaccaaacctaagtaatgagatagacagcaacaaaataagtaataataataactccactgacagcactagacaggtcatcaagacagaaagtcaacaaagaaacaatggatttaaactctaccctggaacaaatgaacttaacagatatttatagaacattctacccagcaaccacagartatacattctattcatcagcgcatggaactttctccaaggtagaccatttgataggccacaaaacaagtctcaataaatttaagaaaactgaaattatatcaagtactctcttagaccacagtgggataaaactggaaatcaactccaaaggaacctttaaaaccatgcaaatatatggaaattaaataacctgctcctgaatgatcattgggtcaacaatgaaatcaaacggaaactaaaaaattcctcaaactgaacaataatagtgatacagcctatcaaaacctctgggatacagcaaaggcagtgcaaagaggaaagttcttagccttaaatgcctacatcaaaaagtctgaaagagcacaagtagacaatctaaggtcacacctcaaggaactagagaaacaagaacaagaacaaaccagacccaaacccaacagaagaaaggaaatgaccaagattagagcagaactaaatgaaattgaaacaaaaacaatacaaaagataaatgaagtatatataacttcttaatcccactttccttcctcactttccagaggaatttttattctgagtgttgtgcatacctcctgtccacatttttattcttatattatgtaaataagtgtgcatgaaagcatgtttttatatctttttaaaatttgtaagaatgtatcatcctacatatatgtatgttttgcaacttttttcactcaacagtgtgaaattcatgtaagattattcatgattgatacttgtaggtatactttgttcattttaactgtagattaaattaccatatatgaataaccacaatttactatttattctctattaatggacatctagtgtctccttgtggacatgtgctaaaatttctttagggtaatcttagaaggatacattctcagtcttattatatgtgcattttcaactttggagcaattcagcaatattttctaaacaaattattctaatattacgttcctacctttaatgtatatgggctacctttaatgtatgttatgggcttaattgcttcccccacccatccagattcatatgttgaagccctaaaccccagtccctcagatgtgattgtatttggagatagtccctttaaagagatgattaagttaaaaccaggtcattaaggtggaccctaatccaatgtgatggtgtccttataagaaggggtaatttgggcaaacaaaagaggggaggcttgcagacagaggaaagacatgttgaggatacagttgagaagaggcagacttctgcaacccaatgagtgagtcctcagaagaaaccaaacctgctgatgccttaatcatggacttctagcctccagaactgtgataaaataaatttctgttgtttaagccacccattttatggtattctgttatggcagcccttaaaaacaaattaatatgtgagatttccagtttctctgcatccttatctcactcagtatcacactttttaattgtcgccattttaatagaggagagagtatctctgtttcaatttaaatatcctggttaccaaaaatgctgatcatttctcaggattactgatgaatgaagtcctcttctatgaactgctagttcatatactttgtacatttttctattacattgccttgcctttttcttacagatttgaaggagttctttataaaatctatataataatcctacattaattatatattttccattctcttctctccacctgtgacttgtctattaattttattgcacaaaaattgttagttttttttttttttttgagatggagtctcgctctgtcgcccaggctggagtgcagtggtgcgatctcagcttactgcaacctccgcctcccaggttcaagtgattctcctgcctcagcctcccgagtagttgggactacaggcgcctgccaccaaccctggctaatttttttttttgtatttttagtagagacggggtttcactgtgttagccaagatggtctcgatctcttgacctcatgatccacctgcctcagcctcccgaagtgctgggattacaggcataagccactgtgccctgcccaaaaatttttaagttttaaggcagtcagatttattagtctttctttttatggtttgggcttttaaaaaaaaatcttatttaagaaattcttttctctcccaagatcatgaagaatgcaaaatttcttctaaaatttttaagttttgtttgtaagattgtttgaattttctgtgaaaccatctcttattgaattatttttcctttccatattaatttagaatgatacctgtgtcatatgctaagatctctttctaggtgctttattctgttccattagtcttatctggctttgtgccaatactacactgtttccattagtaaaactttgttttgttttctgatggggggaaatcctattttttttcttattttgcaaaatgaactagcttattttggagattttgctttttcataagtattttaggatcactttgctaaatttaattaaaaaatccttttggaatttttattagaattgtatttaatttatagatcaatttgggaaacaactacttcttcagaaaatttataattttttaatgtatgaggtatgttgctgtttgttagatttattccttgaaagattatgattctgctgttactgttgtaaatgtgatattttaaaaaacacatttagtaatttgtggttgttgttgtatagagactttaatttctgtacattgatattgtatatagtgatgtccctgaactttattagtacgatttgtagattatcttggattttctgtattaaagtttatattatctgaataacatttgtttcttcattttctacacttgtaagtcttacttctttatcttattacctcagctaaggccttcagtacagtgatgaatagaagcatagatggcaggcctgtcttctattgttcttagatttaaaaggaatgctactgatgagttgatccatagaatgtgatatttattatgaatttctaatattccttactgaattaaagagtttaccttccattcattctttcttgttaaggtgtttataatgaataagtattaaattttatctaatgattttttgtttccattgagattgtaattttattttgttttaatttgttaatgtaatcaatttaaattaatagtttttctaatcgtaaaccaatgtagtattcttaggataaagttgagatagtcatgtatttttaaatatattgctgtatttactaatggatcatttgggagtttgaaaataagcttatatttgaattagtctttaatttctttgttatccttgtctacttctatatcaatcttatactaatctcaggaatggaattttagaatttcctctctttttatatttcctagattttgattcgatgttttatgaatatttgtaaaactcatataaaaatgctagaacctggccaggcacggtagctcatgcctgtaatcccagcactttgggaggctgaagtgggcagatcatgaggtcaggagatcgagaccattactggccaacatggtgaaaccccgtctctacgaaaaatacaaaaaaattagctgggtgtggcggcgcatgcctgtaatcccagctacttgggaagctgaggcaggagaatcacttgaacccgggaggcagaggttgcagtgagccgagattgtgccactgcactccagcctggcaacaaagctagactccgtctcaaaaaaaaaaaaaaaaaaatgcttgaatctaaagtttcaaaaaattcaatagatttttgaccactgaaaatttttatatattattgagttcattttgtagtttaattcctctagaaagtatgttttttatgtttttaaagcaagtgcctgaaaatatagtaatttttgatatgttttaaaattccttatctgtttgtgattctcttttctttcctaatattgtttatttgtgcctacgttctttttcttaattaagatctttattctttccaatgttcatggcataattgttgaaagtatttaagaaaggcaacctgttttacatgaattattaagtgcatttttgatgggaaaagtttaatttctcagagagccgtgtaatcatttcatttaggctacaactcactagtttttcatattctgattgcaaagcagtaatttactggttttcatattatgttttaatgcattgaattcctttagagtggggctaatgtttgggtattagaatggtacctttttgtttgaataaagattttcatcaagtttttatttgggagaataatttttgaaatacatatcaaatctcagaaaaacttaacatgtaggcatccttaaaggcttttaaaataggaatgaggatcatctacaggaaaccctagtgattagctgtttcatgttttgtgatgtcagatgtaagcagtgaaccaggccagcctatatagctattgctgcagctgcacagtccagctttcttggatttacctaataactaatgatgtctaacgtcttttagtgtgcttaattcgcctttttgtcttttttgttcaaacatttatttaaatctttttgcttatgaggttttttcttttttttcctgatgatttgatactttatgtagtctggatacaagtcctttaacagatgtaggatttaaaaatattttcttggccaggcgcagtggctcatgtctgtaatctcagcactttgggaagccaaggcgggtggatcacctgaggtcaggagttgaagaccagcctggccaacatggcaaaaccccgtctctactaaaaatataaaaattagccgggtgtggtggcgcgctcctgtagtcccagctacttgggaggctgaagcggaagaatcacttgaacccgagaggtggaggttgcagtgagccaggatcgcgccactgcactccagcctgggtgacagagtgagactctgtctcaaaaaaaaaaaaaaaatttttcctctagtctgtgggttatcttttcattctcttaactgtgtctttctaaaagaagagcttttaattttagtgaaatccagtttatcaattttttcttttgtggatcacacctttctgtcatagctaagataactttgctgaactgagggtcagaaaggtatatttcttgttttcctcttgttgtgaaaactgtctgctaaattatctttgtgactttatttaaaaaataaattgagtgtccatttatgtgtgggcctattcccggactcttttctgtttcattatgctctttgtcatctgtctttatactagtacctcactgtcttgattattgtatgtagttttataataggtctttaaaaactttttttaaattttttaaatttttgttcattcattcattcattcattcaatcagtcattcaaacaccaactcaagccagatacaataggtcttaatatcagatggtgtttgccttttagttttatctttttctgatttgtattgagtattctagatgtttgtgtttccatatgaattttattactggcctgacaatttctaaacaaattcagtgttgttttataattttaaatttataagtcgtgcccatcttttgccagattgatacttaatttttttcatttttttttgctattgtaactaataatgtggtttaaaatattaatttccagttgttttttgctagaatatagaaatgtagaatatagaaatatagaattgaattttgtatgttgatgttatattctgcaaccttgttaaacaacatcagattttcaacatagattatcatgttatgtgaaccgaggatagctttgcttctttcattccaatttgaatgcctttgtttctttttcttgccttggtctactggctagaatttccaatatcgtggtgagtagaagtggtgagagaggacatcttgttttgtttctgatattaggggcaatatatttatgctttcaccattaacctatggtgttagcagtaagtttttaatagataattgttatcaggttgaggaaatttccttaatttcctagtttctgacacctttttttttttttttgaaacaaagtttcgctcttgttgccctggctggagtgcaatggcacaatctcggctcaccacagcctctgtctcccaggttcaagcaattctcctgcctcagcctcccgagtagctgggattacaggcatgcaccaccatgcctggctaattttatatttttagtagagacggggtttctccatgttggtcaggttggtctcgaactcccaacctcaggtgatccgcctgcctcggcctcccaaagtgctgggattacaggcgtgagccactgcacccagccatttctgacactttttatcaggaatttacattagacttttgttaagtcctttttctgagtgtattcagataatgtgttttgtaaaattttgtttaaaaaaaattttgtctataggaagaattacattgatttattttttaatgctaagccaatcttggatttctaggataaaccttggttaaccatgatttactatctacattacatatggttgggtttggtttgctaaatttttttataatttttatattggtgttcatgagagatactgttctgtaattttttttcttactatatctttctctggtttgatatccagataatactaactttatagaaagaagtagtccctctaggtttttttgcccagtgtggctacaataggggttggcaaactatggctcatgggtcacatcctaccaaccacctctttttttcatggccagcaagctaagaatgattttccatttttaagttgttacattttaagtgtcatacacacacacacacgcgcgcgcgcgcgcgcgcgcgcgcgcacacacacacacacacacacacacacacacacacacacacacacacacacacacacacacacacacacacacacacaccccccaagtaatagccttgattttgcttgttggcctataaaaccgaaaatatttattaggaaaaagtctgccagtttaattgattttctttcttttttttttaaagaaccagattttagttttcattggtttttatctatttttctttttctccatttcattgatcgtctctctgatctttattacttcgtttcttccacttaattggagtttcatttgctctttttttcttagtttcttagggtagacgctacaatatataatctgcagtaaatctcattctttatatttttcatttcagacattatagttttcatctgtagtagttcaacttgggtatctattaaaattytttctttctttctttcttttttctgagatggagtctcactctgccaccccggctggagttcaaaggcgtgatctcgactcactgcaacctctgcctcttgggttcaagcagttctcctgcctcagcctcctgagtagctgggattacagacgtctgccaccatgcctggctaatttttgtatttttcatagagacagtatttcaccatgttggccaggctggtcttgaactcctgacctcaggtgatctgcctgcctcagcctcccaaagtgctgggattacaggcgtgagccaccgcacctggcctattaaaattttaacatcttttttatatcttccctgtctctaacttttgaacatatgaaatacagtcataataactgttatttctatggtgattctaacatctgtgtcagttttgagttggttttgatagattgatttcactcttctttatgggttgtcttttcttgtttttttgcaagcctggtaacttttgtggattccagacatgaattttaccttgtttgttactagaaggtcttgtataatttacaaatattcttaaattttgttctgggatgtagttatgttattttaaaataatttgatcctattttgtcttttaataattgttaagtgggacctaagcaatgtttggtctggggcacattttcctgctattgaggccaaatccttctgagcattttacccagcatcccatgaattacggttttctagtytggctgataggatcaggaactgtttctacctaatctgtatgaatgccaggtactacttcctctaatccttttagagagttctttccccagcctgagtagttccttatgtgtgtgtgctgatgagtactctgctaattccaaaatggtacctttgcagatttctggaattctctgtcctctacagttctctcttattcaaactctgtcttggtctttttagactcttagctccatttcttcaactcagtgaatgtactggctccatctgcatttcccctccatacactgtggtctggaaactctctgaatgcagtaagctgggacagtcacagggctatcatcatttgttttccttctctggtgatcactgccctttgttgcctgattgcaattttattagatcattgtttaatacatctaacctggattttgagttgtttcaggcaggatggtaaatgtcttggctagaagtggaagtcttatatatctgtatctttggcatggtgaatgtaagaaagcattctgttccctaagtattcagaaaagagactgttcgtgcatattgactcttttctggatggagtttggaaagaatagttctcctgtattttttttttagagtgatttttccagtaattttcttttccagttttttttttcacagttggattagattattaggcaatatggattactaattccattatgttttattagaattagattggaactctttgtggaaagctactgaaaagatcacatgctatttttttcatggctgttttgcctctgatgtttattccaccaatatttgaagaaagagataaaaaggagaacctagacataatctttctattgtcaatttttctatcactaacatatgttctgaaaaaggacattcctgtcctatagtatattgctgccaaaataaatcccaagagattgaagttttattctattttcaaattgtttcctagaaaccagccacctaattcacaaagagattaagagccaagtcttagaaacataactttaaaaaactatataccaggacatgcctcatttgtgaatgtatgcgtgctcataaattgggtaattgtgcacctaactactgtattcattttttattattcgctttgtgcttatacaaatgaaggctttttcattcatattctgtagccttggacactcatgattggaggatagttactttttatgctcctgttcaatgttaatgcgtacaattttacaggaaattataaaatgtctccaattactttggtatagctgtaacaatagctactttattaaacgtgttctgaagtagtgtaggtaattgacagttaatttggctttatcaggttatatagaaaatgttagagaagctataaaaaacctttcgtatcagagtgtttgcctcaaaaggctatgttggctgggcgccgtggctcatacctgtaattcagcactttgggaggttgaggtgggcggatcacttgaggccaggagttttagaccagcctggccaacccaatgaaaccccgtctctactaaaaatgtaaaaaaattagccagggatggtggtgcattcccgtaatcccatctgctcaggaggccgaggcacgagaatcatttgaatctgggaggcagtggttgtggcaagccaagatcccatcactgtactccagcctgggtgacaaatcgagactgtgtcaaaaaaaaaaaaaaaaagactgtgttgacatctgaatttaagttctgccaactataatttaaaacttaagttcccttaaactggtcatgatggtaagaatagatagcccagactttttgagattacagctcatctctaaaatgacaaagctcagatataatagtagccttcataaaatttattgccagacactgctaagtacttttacagacatttcctcatttaaatagactttgaaagaaaaatcagctatttaatctttaggacaattttgtaaaaggatcaatatatgtacgtattaatttcctattgctgctttgacaaataccacaaactttatggcttaaaacaacataaatttattctcttaagagttttggaggccagagatctgaattgagtttcactgcactgaaaccaagatgtcaggagggctggattccctagagaagctctaggagagcatctggggtatttttgtttgttcgttcgtttgccttttccagtttctaaaaatgtcttccttgctcatggttgcttcttccatcttcaaagctaacagccacataaccttttcctcttctgtagtaaaatcttcttctaccttcctcttatgaagacacttgttattacaaaatggctcacctagataatccaatctcaaaatccttaattatatattcagagtttcttttgccataaagagtaatattcacagatttcatgattaggttatggatatctttgggagacctttgtttagcctaccacgaaattgtattatgtacatcaaagtggagtacagtatactgccataagtcacataaaaacaaaacaggaacaagcacagtttggaattaagttgaacagagaggttgataatataagtaagagatcttggattgctgttctgtgttccagcttttatattattgactgattgtttttgttgctgatagaaatgaatagaacaatgatcttcaattttttatttttattttttcgagacagggtttcactctgctgcctacactagaatgcagtgacatgatcatagttcattgtaatcttgaactatggttcaaggatggttcaagccatcctccttccttagcttcctgagtagctgggactgcaggcacacaccaccatgtgcccagctaatgttttcatttttgtaatgatgggggattgctgtgttgcccaggctggccatgaactcctgggctcaagtaatcctcctacctgggcctcccaaagtgctgggattataggcatgagtggctacacctggcccaatttttttctaatatgttttatcttctactcttgtctttcttttttctatataagaccaatgcttagtagtctaatgtcatgaattgaaagacagatttacatagtctgatattataattaatttagaaatacattatatttgatgtttgagcatgtccttagacacatgttcagatatgcttcgttattccctttaagccttttctttactttttccttcacttttgttactctcaatgctaatgaataattgacctctttgccactgatcatggtactctggggatgaaagatttttaggaaacagctctagaggtttgttaactcctagaagatcatagatttctgaagtagattaatattttytrtttttcgttattatcatttcattgtccatttcactggttaatcctatacctttgaagagaaaattccatttggtactrcttttgtgctatatggttcaacaacttatggagtttacagtataaatgttttagaaagtgagcttgtattttgttgcacagtttgaaagctaaatgtttacattatcttccctaaactacaggataccagaaggccctattgatcaggggccagctataggaagagtacgcgttttagaagagcagcttgttaaggccaaagaacagattgaaaattacmagaaacagaccagaaatggtaggtgattatacagtgttttcccctcctcagtatatgggctttagcacagataattgaaagtttccttttatcaaaatgttggaaatgctacaactctctattctttgactacaggtctggggaaggatcatgaaatcctgaggaggaggattgaaaatggagctaaagagctctggtttttcctacagagtgaattgaagaaattaaagaacttagaaggaaatgaactccaaagacatgcagatgaatttcttttggatttaggacatcatgaaaggtactattctcctttcacattttatttgggctttagaaaagattataatctaagaatgagaaacagacttgttaatccatctgttgagtggtaaatattaatagcacctacaatatttaagaggcgaagagtacctgaggtcccaaaggatggtaattgccaagtgcagttcatcaaccaaaatataccaccagaaagtattaattaaaatgtatttctagaaatctttacattctaaataaattctgaaggtagtggtgccagccaacaatacattaaaatatctttctataaatgttctttatatataatcagtatttgaagtggagtgtgcagttttgcattgcggtacattggaactcatagtgagtccgatggttacatttctaattcaaacattaaaaactttaaaatagcatttttttaaggatttctaatgaaaggttaacaggattttttttttctttaagtaaaaaggagcattctgttcattgttctttcattagttgctggaaagaggtacctgagatctgcctggttaaatttgtttctcctatgcacacgttgctaaataatatgaagtttatcttccacagaaaagaaaacattttggtgctgttgtattcatgcagaacaaaatgtatctgaaaatcattataaatacagtgaaacctgtctttaggcctgttatatttaaaagtctatgtttccagtaggattctgatggcaattactgtctcattagtgaacaataaaagaaaaattgttgtattagcacaacctactactgtgaagaggaaaagaattaccccatacaagtaagagatttcatatttattaacatcagcagcaatattataatgattttgaaaaattgcttggttgttttaggtgaaattataaataaaaatctgtctattggaatcattttagcattaatgaatctacagaaatatgatagcatggatttcaaggggcagtgaattattaggccacacattggacagactttttgatatatttagcccaacttgcagtcaggccatacttagaccactaaaccaaatgctgactaattctgtcattaatatttctctaccctaaagctgattctaggcacgaagcatctcttaaatggaattttgtgcttgtgttctttgcttatcacagttttttaggccaattcacatctgaagaggatttgacttgggtagactatgctgtatgtaaaggagaattttggccactgacttctgatggaatgtttaattttaagatttgagtaattgggctgggcgtggtggctcatgcctgtaatcccagcactttgggaggctgagataagagatctcttgaagctaggagtttgagaccagcctggccaacatggtgaaaccccgtctctaccaaaaatacaaaaatcagccatgcatggtggcacatgcctgtgatcccagctacttgggaggctgaggcccaaggatcacttgaacctgggaggcagaggttgtggtgagcagagatcatgccactgtactccagcctgggcaacagagcaagactctgtctcaaaaaaaagatttgagtaatcaaataacttgagaatttaattttccagtgtttttaaaaattaattcatatatatatatatatatatatatatatatatatatatatrtatgtatgtatatatttatttatttattttttagatgtggaggtctttctatgttacccaggccagtcttgaactcctggtctccagtgatcctccctcgtcagcctcctgtgtagctgggattataggcctgggctaccatgtccagctgaattgaaataattctttaaggaattattttgtaaataataatataatttgtttatataactcgcatatgttttgtgaccatatgtacaaatgaaaagtgaatataagaaatgggcccctgagaaactgatataaatcagttttccattttgttgttgttgttgttgaattatgattccttacagtgccatttagtatgttaaataatggtagttcattgaaaacaaaaatggtaagtaaaggtacccaagtcagtttattttcctgtcttaaacagaaatgacaatgaatctgggacataacttcatagggtagtaatttaactccaggaagccagattagaatgcagtaatacaaataatgagcaaaacacaatcaaacattagagaaataacccttaaactgacggacgtacaaatagaaaggacttttattatgtagaatatacccttttactgaccattttcaagatccttaagtataagaattaaaatcaaaacaaacttttakgtttgcctctggtaatttttatatgatacaaaagtccattttatttttacattggctcaaatgatagtgtataggtttctaggtctgtagctgggaccatggtcagtgaggctgccacctgggtatgggcctgccttcttaaaagagccctcctgagtcttgggctctattagggttttgcagccttctacctgggttagaagattattagcagattattgaacttgagtagttcattgtgggagcccctgatttgacagagtgtgggtaccctggccactttgtacttgcgatggcatgtgaagtggggtgtagtattatggaactgagaggtctgggctaattctgggtagtttgtgtcactacctagttggtgtccacagagatttggagaattatctgatgtggaaaatgcacatatttggtgtcagaagtgttctgtggtgaaaaacagatcataatagtagtagtaatactaagggcagctaaagttgctggtttttgagaactacaactacagactccctgtttctctttgtgagttcaccacgatgcctgtgttgtttcctggtagaaatcgcatttctctgtaggttagtgaccccatcagtgagctgtgggggtaagactcctcctttgttgcccacttgaagctgtttcctagtagtcagggcaccatgtttcctctcctggaatctggctcctgttgttcatcacttgcattaccaggcattaaaatgcagcctgggggccaaatatcataagtttgatctaagattcaactcacctgagatttttagcaaaatactatttatttacctgattggccttgatagctaataactagtagagcctaatctctgcctgcaaccacagttgggtaatcaactggtagtaattagtaatattcttgggcttttagaagcttttacaggctgttttaagaatttagaggtgttgatggtataataaatttagagtagcatattaattattatctgctatattgatatcaagttttagcatcactagatttctaaatgatgatttcattctagtgattgcatatgaccattcttcccagtaatacagttaaatatacttgtagcttttgatatcattgatcatgaattgaccctagcctacctctttgcagtagagagaattaagcggtttagagttagtatttttgccattgtggttttaccatttatcttgtattgtaggttcagtgcttcgatttatggcagtttagatgtgtacctcaacctctaagcatatcatggagtctgtcttatcaacctttcaggctgatgcagagacatgtttaacttaatcactgttgctctgattctttttatcatcttcatattgccaaataccagtttatgaaaagggtaccaaagctgcttctttctgcttttaaaattaccatattttttttaaatttattcatttattttattattttttttaccaagttctgtttatggtaatttataacaattataaaactaaagtacaggagatgagccatttttcaactgtgttgactgaaactattgaaaaacaatctgttaaagtagcaatctcatctcccttacctagtttgcatttctcattatcagtaatatatagggcagctgtgcttagactaaattgtgttctccaaatagtgaatgatacttatgttaattatgctgatttgctaatgtacaaaaagacattgtgggggattatgtaacaaaagaaatgactgtgactcaaggggtacactgggaaagattgatagaatagcttacagattttttttaagtttatgatcatagttgttgttgcccaatagcttgtattttcattctgtttggaaggtccaagaattgatattcccactcttgaaaagttaagtttggtgaaccttcaaaccttctattctttgtgttttatttcatatacacaaaaacagagagagagacagagagaggaagggaggaaggaagatcttactaagttctctgagatgtgatttgattgagacttatattaagctgggatgtggatattctttcttgaatttcggatttgtttcaacaaaatgtttttgtatgattgtcttctaaggaatccaagcttattttcaagtggtgctagaacattcatcttaatattcatgtgcaaagggatacatttctttatgaagtcatccttattctgctcatcacttagtctctatcagccagataatgattcttcatcgcctgtaatggaacagtgtctcctaaaataaagtttgcattagaagaagaatctccaggtggaaaagggtgtttttcatctagtagttctaattctgttttgcttcctacgaccacacatcttttgggtgtgatttccaaacttaagaatgattttagattaaaaataatcacttactaaggatttcttacatgccagtcactatgataaaggttctgcattcattatgttactttatcagcacagtagtcctacaaggtatgcattatttgttcctgtttttttttttgttttgttttctgagacagagtctcgctctgttgccaggctggagtgcagtggtgtgatctcggctcactgcaagctctgcctcccggattcaagcgattctcctgcctcagcctcctgagtatctggaactacaggcacacgccaccatgcccagctgatttttgtatttttagtagagacagggtttcaccatgttggccagaatagtttcgatctcttgaccttgtgatctgcccgccttggcccgtttgtgctaggatgctaggatgacaggcgtgagccaccacgcctggcctatttgttcctctttttttttatttaagatggagtttcgctcttgttgcccaggctggagtgcaatggcacgatctcagctcgctgcaacctctgcctcccgagttcaagcgattatcctgtctcagcctcctgagtagctgggattacagtcgcctgccactacacccagctaattttgtatttttagtagagacagggtttctccatgttggccaggctggtcttgaactcctgatctcaggtgatccgcccaccttggcctcccaaagttgttcctttttgtttttgagatggagtctygctgtgtcatccaggcagaagtgcagtggcacgatcttggctcactgcaacctccgcctcccaggttcaagcaattctcgtgccccagcctccgggtagctgggactacaggcacacgccaccatgcctggctaattttcatatttttagtagagacgggatttcaccatgttggccaggctggtctcaaacttctgacttcaggtgatccatctactccagcctctcaaagtgctgggattacaggcgtcagccactgcgcctagcttagttccatttttataactgaagttatattcagttctagagaaattaggtggcttaacacaggctaagttaacagaacggttttactccaaaatccgttctcttaattgctaaatacttagcttttctgagctttttctcttctacgtacggggatataattccwatagcacagcattgtgatgattacatgaaggaaaatatataaaatactttacctagtgcgtgacacattatagattctagtaggctctggtcagacctattaatacattaggaaaacttaactcttagaccctgcagagctggcacagataaaggcagattattgaaagactcaataggaaaaatgttaaggcctggaaactaaatgtaagcctagtgaacatcactcaccaaagtaacataattgttgtcttatatatgatagtataagctatttttgttgtcatccttctggagttttccccacctgtgtcagttgtcaagatggtggcatcctaaagttcctccttgagataagggaggcaataaggagctttgttttcttgcctgtctcctggtcacatttttatccttagcattgcttatttttgctgcaggagcaaaccraagtaaaagcagctttggacaaaactcaagtaatttttcttgcccatgatgcagatttgcccatggatttgactttgagagtaaatcttagtcacatttacccccgtaagtgttaattccttcaccttcttgcctggattccatctctgtgctggcccttagggggagcttctctgttttttttttttttttttgaggcagtgtctctctctgtcacccaggctggagcacagtggtgcaaaaacgacctgggctaaagtgatcctcctgcctcagcctcccgagtagctgggactataggcgtgtgtccctgcagccagctagattttttattttttgtagagagggggacttgccatggtgcccaactcggtcttgaactcctgtgctcaagtgatccttctgccttagcttcccaaaatgctgggattataggcgtgagccaccacgcccgaccaaacttctctcttcaacattttgaatcaggcgtaaacaaaaagccctctttgtgtttggttcctcagtggcatagaggcagactagaagtctttttttttwaatagttttatgactattgaaatagaaaactagagaaattagcagaaaatataaggaacataaaacataaccaatttttgaaatagaggttttaatacctgtcataggtggcttgctttcagagtcataaattctrttctacttggcggggcgcggtggctcatgcctgtaatcctagcactttggggagaccgaggagggtggatcacatgaggctgggagtttgagaccaacctggccaacatggtgaaatcccatctctacaaatacaaaaaaagctcgtcaggcatgtagctcatgcctgtaatcccagctacttgggaaactaacacaggagaattgcttcaacccaggaggcggaggttgcagtgagctgagatcgtgccactgcactctagcttgggcgacagagagagactctgtctcaaaaaacaataacaacaacaacaagttatattctactcggtgtcttcaggcaactttattgtatcctcaaatggccagcactattttgctggtaccttgcctagctttgttatttcccaaaccttgacctggtctcatactaggtctttagtatgcccacttattagatttcttgatatgttcgtagtcaaaaccacaacagccagattccctgctttctgggactcttctaggagatctggtttcagggtagagttactgaaaacccagggcttctgcagaatggttttgagtcactatggttcccttgctgatttgattatcttcttgtctttgaccaaaaaataaatactgcaggatgataactttcaaatataattgaatcagtaaagaactagtttgaatttaaggttgtatcctggacttaattgtcttgcttacatggtctccaacagagaggccgagaaacaaaagattttaaaaacaagcttaattttagtggatcatgaagttacagtaacttatattgataccctaactgcattatcacaaaacattagtgtactctttttttttttttatttgatgtttggtcttctagttgcttggttattctgctttctaggtagagacagatgaatgtgaataattaattgccaagacttagtactgatgtaaacttggtaaaaacattgacataaactaatttattaaaaaaagtagagatcagctttcattcacaatggtaaaggaatgtcttgattcctatgacaagaaagcataaaccatgctaatgcttatatttcaaggcactcttctctctaaattagacctaatgcagtttttacctccttgaggctatatgatgattgtcaatgaaatgtaatgctttttgtttctgtatctgttcctgtgcattcgtgcacccatgtgcatgtgtgtagtgacacatttgacgtaaaactgagagcatattgaatttccttttttccttcaacagacatttgctgataaactggttattccattgtatgacatctccagcacgatactgttatttaaaactgagacttgcgcctgcgcagtggctcacacctgtaatcctagcactttgggaggccagtcacctgaggtcaggagttcaagacaagcctgaccaacatggtgaaaccctgtcaatactataaacagaaaaaattagccgggtgtggtggtgcatgcctgtaatcccagctatttgggaggctgaggcaggagaatcacttgaacctgggaggcggaggttgcagtgagctgagattgtgtgactgcacttcagcctgggcaacaagagtgaaactctgtcataaaaaataaataaataaataaataaataaataaataaatgtaaagttgagacttgcaacaagttttgtgattactcctatttgataggtaggaaaaaacaaatgaccacattctattatgatgaaacctatgaaatataaagaataatgagtgtgatgagggtgatgggaaagaggcttatgaaactgagaatatgttttaaatgaagttttagccgagccctatagccctattatagttaaagacttttgtgtttccatgagcaactcacaatttcatacagatagtgactttccccctcagtaactataaaaaaatactgtagtctacataatagtccatagaggactcagttttataatctgaaaaaactttgaagttgaaactttgcctagtctaaagacttcaggttaatttctgcattgtaggtttggtttttgcagccaaagtctctttcatgaaaagaaaatgttttgaatcctagctgagaataacaaataagaaaatggacaaggcatcacatattggcctcttgcctgttttaaaagggtgaaaatggaagtagataagctgcaaagtgtcctgtgtgtgatgaatgttgacacatgaaacaaatgtctaaagtgcttcacaaatggaactgttgttccaaagcatcgttcaaagttgttccactattaatttaggatgaatagtctaaatggtggctaagatttttaatttttaattgaattaatagtttcactttattcaaaaggggctattatcacgtattctctgttaatcatgtgtacttctaatggctttctgtgatagtaaataagactttcctgtgggctgccattgcatttttgctaaataatttagcatctagttaagaatcaggaataaaagagtactaagactgtgtcacaagcaaatcacagttgttgagggcatatttcaccatctcttaagtgattccttctcattgatcaatcccccttcttcagggtgttatatggaactcaatattggatcatttttataattgattatcaataccacgtgttactgttacccacatctaatggctccttcctcttggtagtagaattattagtaggtactcttcagacacagtgtaaaagctcagaaacaactctctgaggacctctagcattaaaaaaaaaaaatagcggctaccacatgtattactattttgtgtgtattttttaaagagctttagagaaggtcttttgatactttgtctcagagatgtcaaaataattttcctaggacacaaaattagtaggagatagaaccaaaattgagaaattggtatgtctggctcccaaagctctctcctctgattcagactttctgatttttggatatttacattgaggagaggacacattattgtgctctggacctcctactttgatatttgttagtgtagtaattagaagcctggactttaaaattcattgcttgggtttgatttcctactctgacatttctgaggtttgtgactttgagcaaattatttaacctctcagtgcctgccatttcttacctagtttgtaagattattgtgagattaaatgaaataatgtaaagcacttagaataggtgtacctatttattgttgttcttttttatttattgtaatacatcagttttctctaagtactcttggaatctccagctaatgctttatgtttttagttaatacagtcattgtaagtgatttctagatgtgtaatttttctgacaatataaatacatttctgactttataattttcataagcaaataatccataatcttaagcatgccagaggagttaatacaaagtgttgagaagggatgaagctggagctacacctgggtaaggattattccccaaacctgtctaccatcaaactggatttgtaaaagataaaaattatcaccgttatctcattatataaactcttgaaggtttttcttttgctactttttcattcatctaaagatatttatcgaatattttgtctgtgacatgcactgttccacatgctgattttaaataacaaaaaacaaaaaaataaaagaagcaaccaaaaaaaagttcattcttttggagcttaaattctagtagggcagaaagataagaagtaagtaatattgtatattggaaaatgataactgcttagaaaaaaaaaataagcagggaaggagtgttagcagcagtgaatccatacgggcctgcagcagctcgattcttgcttccttggaggaaataatttggccaggggaacataaggcagagtgagagatcaaggcaagttttagaacaggcatgagagtttattaaaatgttttagagcaggaatgaaaggaagtaaagtacacttgtaagaggccaagcgggcgacttgagagggtcaagtgtgctgtctgaccattgacttgggcctgtatatattgctatggttccggggtttgcatttcttcttacctgatttttccttggggcaggctgtctgcatgagcaatggcctgccagcacttgggagggatcgcatatgcagtgtgtttactgaagttgtgcacatgctcatttgaggctttttttccttaccagttgagtgttcctagaggaaggtcatataacagttaaagtctgccattttgcctcttagtacacgtttgagccaactcacacaactcttgaaaacttatcaggaagctgctgatgaccagcttcagttgttttctatctatttaggagactgccgttccctggcaccagctgtgactagttaaattattttagagagatactttaacaactgcctgaccatcacctgatggtcgcctgacattgcttggaggttaagggggtgccttcttctgccctcttaaggctgcctagctacctactcaaacaggaggagagggaaaaccaagggttgagggtgataggcgggagtgttggatttttaagtgggataatctgggaaaaccttatgaagatggtgacattagagcaaagatttcaaggtcatttagatgagccatgtgaatagatatctgagaaaagagcattccagggcagggaggatcaaatagaaaagctctggagtaggaatatacctggcagtgtcaggggttagcaacaagaccagtgtgactgaaatagagaaatcaagaaggatggtagtgggagatgagatcaaagtgagccatattgggtggggtcttttaggtcaaagtagtaattttggctttgactctgagctgaggagccaattcatgttaagaacaaagtagtaacattatttgttgatgttgtaacaggatctagctgatatattgagaacagactttagatgtaggcaatggtggaagcagggagaccttgttaggaggttgttgtaatccaggtgagagaagatggtgtctcagttggtaaaagtgctggtggtgatatgtgaaaaattagaaattagctataaatttgctgacagatttgtaggggatgttagacaaacagagactcttgctttttacttttctttcttgctaaatgcaagtcataatttttatttaatgcaatataaataaaaccatttgtagcagccctaaagtttctctttttagtttactggagattttactttactctgcaggtaatccagcatgttgtaattgaaattactgatgctacacagaatgggaattactgatgctaaataatcattttattagtttagaccaggactcagcaaattatggcccagagaccaaatctggctcattgcctgtttttataaataaagttttattcaaacacagccacacctattcatttgcatattatctatggcagctttctgctacaaaggcaaaggatcttagagatctgtagagactaaaatatttactgtctggcccgttaatgaaaaaatttgctgacccttggtttatactgttaagagttgtgtaaaaattttcctctgatctttttccagtcactcagagtgtttaaatatgaagagaaaaattaaaagggggcatgaaatgatagtagagagaaccaagaggtactaatactaacgtcaacttctttctctatgttaatttactcatttgtttgctttgcgtattcactttcctccacatctttgtagtgctttgtctgtgttgagaaacaagtgcagctgactagcttgaacaaaaaaagtatattttctcaacagtgaaaatttactataggaatgactattggattttaagagactaatttttgaattgcacaaccttgatagaaaataaaagatgagtaccagtgtcaatgcgagcatcaatctttatgaggaatctggcattcttcttaagactttgtgtaatccagtgaagcagtacagacaagttcgatctccattrttgtttgttttaacaggtctataatgacggatctatactacctcagtcagacagatggagcaggtgattggcgggaaaaagaggccaaagatctgacagaactrgttcagcggagaataacatatcttcaggtaagaaggttgggttaagaataaatttgagtgaaaaaaagaaggatcataatataactaagagtaataatttcagttgtttttagtcttcctggcccttgaaaatcagtactcacacattttacatatttattcagaaagacactgtgttatgccttgagtggaatacaaagatggctaaaacaaagaccctgtcctaaagggagctacttcttacacacgtacacacacacacacacacacacacacacacacaatacaatacaaatataacatcttacattttataggagagaaatagatgaaatgcttattggagttttgagtaaggagacatcagggatagtcttgtagagaatgtattgtttgaagtaaactgtaaaagatagttaaataggatttggacacacagaaatgaaggaaaagaatgtaccagctggaggttatcagctaagcagtggctcgtaactgggaaagaacagtacaggaacccatatgataagtgtggcagttcagtttgtctggaattttaggttgtgtgaaaggagggatggagaataagttggaaaggtaggcttggaaacagattacagaggttaaggtttatggtacataggcagtaaggggtcactgaaagattttacttatttgttttataaatgttattataacaaatagaaagtattggtaaacatcaagtctcagaccctttaaaattaatttcactttgttttttgtgttcttttctagttcttattaatatgtacacaccgtcttacatatatgtaagaaaataatttatttttgattttgtttttctgcttaatatgccataagcatttttctattttggagtcacaacctgcttttgaaatgttttacatacaaaagtggtatgagagtggtacttaagtgatattaatctgaaactagtattttagttgaacttgattatttgaagagactagaagcagggagaccatttaagataagaggaccatagtgcaggtaagaagtattaaggtatgtggcagtttgctttggaagtgaagagacaaatttgagagagattgggaagataaaattgataggcctttccaagtagatgaaagaactgaaatggctgggataatggggacatcattatctgataaggtgctgagggacagaatagttttcaggggaaaacaatgagtcagtagaatcttcaaatctcaaaatgtttgaagttgaaatgaccttggaacatcctccaccctcatccttttctaatgctgtggatggcatactgtgtacgctctactttccctgtaaaattaaagtattgtataaaagcaaaatgacagccagtgatatggttctgtatattttaaggtgcacatttttctacacttaaataggaaaaaatagaaaatcaagtgtttaaagagatcattaaaaaccaaactgatcttggcatgctatcttggtctcatacccacatggccattcatcagaggtgtctgcagaatgagaaacacttcacctcctgtagggaagaggtaattatctcctatcaactagaacctcactcagtgaactataaacagctggtggtgcagaaccatcatccttatttaaaatggaaataactgtggtttctgagcttcctccatttcctcttattcgttaaattttcaccaactatatctggtgatagttctaractatgatctagtgatagttcagctacctaaactgtaacaagtacctgccacctgttttagtttccttttttttttcctcttggtttgtgggtggccaagtgctttcacctgtagtactaatttgatcctctatatgctgatttttgtggttccgtattagagaatttcatttgcaaatcatgctaataatttaaagctacattggctttttaaatcttttaaactatagcaaaacctagcactttacttggaccttaccttcagtttcagatattgctatttaactttactttcatgcttttcctttttccccccattggaaggaaaaggtgatttttttttttaattttcaaggagatagggacaatctcagtagaaaaaaagtgctttggaaaaatatttttctttttttcataggttgttggagtacaggtggtatttgattacatgttctttagtggtgcttggtgagatttctgtgtgcccatcacctgagcagtatacactgcaccctatttgtagtctttcatcgctcgctcccctcccacccgtccctccaagtccccaaagttcattgtatcattcttatgcctttgtgtcctcattagcttagctcccacatatcagtgagaacatatggtatttggttttctattcctgagttacttcactcagaataatagtctccaatctcatggaagtcgctgcaaatgtcgttaattcattcctttttatggccaaatagtattccactctgcatatacatatacatatacacatacatatacatatgccacaatttctttattcactcgttgattgacgggcatttgggttggttccacaattttgcatttgcgaactgtgctgctataaacatgcatgtgcaagtatctttttcatgtaacgactccttttactgggtagatacccagtagtgggattgctggatcaaatggtagctctacttttagttctttaagaatctccacactgttttccctagtggctgtgctagttacattcccaccagcagtgtagaagtgttctctgatcaccgcatccaggccaaacatctactgttttttgattttttgataatagccattcttgcaggagtaaggtggtattgcactgtggttttgatttacgtttccctgatcattagtgatgttgagcattttttcatgtttgttggccatttgtatatcgtcttttgagaattgtctattcatagccttagcccactttttggtgggattttttttttcttactggtttgagttctttgtagattctgtgtattagtcctttgtcagatgcagactttgcaaagattttctcctgctctgtgggttgtgtgtttactctgctgactgttccttttgctgtgcaaaaactctttagtttaattacctctgagctatttatctttgtttttattgcatttgcttttgggttcttgattatgaaatccttggctatgccagtgtctagaagggttcttccaatgttatcttctagaatttatatagtttcaggtctcagatttaagtccttattccatcttgagttgatttttgtataaggtgagagatgaggattcagtttcattctcctacatgtggctagccaattatcccggcaccatttgttgaaaagggtgtcctttgctctcccctctcccctctcccctccccccccccgtctccccagggtctccctctccctctctttccacggtctccctctgatgctgagccgaagctggactgtactgctgccatctcggctcactgcaacctccctgcctgattctcctgcctcagcctgccgagtgcctgcgattgcaggcgcgcgccgccacgcctgactggttttcgtatttttttggtggagacggggtttcgctgtgttggccgggctggtctccagctcctaaccgcgagtgatccgccagcctcggcctcctgaggtgcctggattgcagacggagtctcgttcactcagtgctcagtggtgcccaggctggagtgcagtggcgtgatctcggctcgctacaacctccacctcccagccgcctgccttggcctcccaaagtgccgagattgcagcctctgcctggccgccaccccgtctgggatgtgaggagcccctctgcctggctgcccagtctggaaagtgaggagcgtctctgcccagccgccatcccatctaggaagtgaggagcgcctcttcccggccaccatcccatctaggaagtgaggagcgtctctgcccggccgcccatcgtctgagatgtggggagcgcctctgccccgccgccccgtctgggatgtgaggagcgcctctgcccggccacgaccccgtctgggaggtgaggagcgtctctgcccggctgccccatctgagaagtgaggagaccctctgccaggcagccgccccgtctgagaagtgaggagcccctccgcccggcagccaccccgtctgagaagtgaggagcgtctccgcccggcagccaccctgtccgggagggaggtggggggtcagcccccactcggccagctgccctgtccaggagggaggtgggggtcagcccccgcccggccagctgccccgtccgggagggaggtggggggtcagcccctgcccggctagccgccccatccggaaggtgaggggcgcctctgcccggccaccgctactgggaagtgaggagcccctctgcccggccaccacccggtctgggaggtgtacccaacagctcattgagaacgggccatgatgacaatggcggttttgtggaatagaaaggggrgaaaggtggggaaaagattgagaaatcggatggttgctgtgtctgtgtagaaagaagtagacatgggagacttttcattttgttctgtactaagaaaaattcttctgccttgggatcctgttgatctatgaccttacccccaaccctgtgctctctgaaacatgtgctgtgtccactcagcgttaaatggattaagggcggtgcaagatgtgctttgttaaacagatgcttgaaggcaacatgctcgttaagagtcatcaccactccctaatctcaagtatccagggacacaaacactgcggaaggctgcagggtcctctgcctaggaaaaccagagacctttgttcacttgtttatctgtggaccttccctccrctattgtcctatgaccctgccaaatccccctctgcgagaaacacccaagaatgatcaattaaaaaaaaaaaaaaaaaaaaagaaaagggtgtcctttccccacttgtttgctttgttgaagatcagttggctgtaagtttttggctgtaaataaatttctgagttctctattctgttgcattggtctatgtgcctatttttataccagtaccatgccattttggtgactatggctttatagtataatttgaaatcaggtagtgtgatgcctccagatttattctttttgcttagtcttgctttgactatgcggactcttttttggttccatatgaattttagaattgttttttctaattctgtgaagaatgatggcggtattttgatggggattgcattgaatttgtagattgcatttggcagtatggtcattttcacaatgttgattctgcccatccatgaacatgggatgcgtttccatttgtttgtgtcatctatgatttctttcagcactattttgtagttctccttgtagaggtcttttgcctcctcggttaggtatattcctaagtattttattttatttttattttttgcggcttttataaaaggggttgagttcttgaattgagtctctgcttggtcgctgttggtgtatagagaagagctactgatttgtgtatgttaatgttgtttccgtaaactctactgaattcttcctcagttctagcagctttttgaaagaatctttagggtttttgaggtaaatgatcatatcgtcagcaaacagtgacggtttgacttcctctttaccgatttggatgccctttctttctcttgtctgattgctctggctaggacttccagtactgtgccaaagaggagtggtgagagcgggcatccttgtcttattctaattctcacagggaatgctttcaacttttccccatttagtattatgttggctgtgggtttgtcatagcttttattacactgaggtatgtcccttgtatgccaattttgctgagaattttagtcataaagcgatgctggattttgttgagtgctttttctgcatctattgaaatggtcatgcaatttttgttttcaattctttttatgtggtgtatgacatttattgacttgcgtatattaaaccatccctgcatccctggtatgaaacccacttgaacatggtggattatctttttgatatgttgttggatttggctagctagtattttgttaaggattttagtgtctattttcatcagagatactggtctgtagttttctttttcagttaatgtcctttcctggttttggtattagggtgatgctggcttcatagaatgaattagggagggttccctctttctctgtcttgtggactagtatcgaaaggattggtaccaattcttcctttaaatgtctggtagaattcagctgtgaatccatttggtcctggactttttttttttgttggtaactttttaattaccatttcaatcttgttgcttgttattgttctgttcagggtatctaattcttcctgatttaagctaggagggttgtatttttccaggaatttatccatctcctctaggttttctagtttatrtgcataaaggtgctcatagtagccttgaatgatcttttgtatttctgtggtgtcagttgtagtatctcctgttttgtttcttattgaggttatttggattttttctcttcttttcttggctaatcttgccaatgatctatcaattttatttatctgttcaaagaacctgctttttgtttcatttatcttttgtatttttttgtttgtttgtttccatttcatttagttttgctctgattttggttatttcctttcttctgctgggtttgggtttggtttgttcttgtttctctagttccttgaggtgtgacctcagaatgtcagtttgtactctttcagtctttgtgatgtaggcatttagggctatgaactttcctcttagcaccacctttgccatatcccagaggttatggtaggatttgtcgttactgtcattcagttcaaagaatttttaaatttccatgttgattttgtttttgacccagtgatcattcaggagcaggtaatttaatttccatgtgtttgcatggttttaaaggttccagttggagttgatttctagtttacagtcatatatagctcagttgtgagaagaagtttggtctcaattttattaacctgtatattggttttacttgagaggagcaatttcacaggacataatggaaaattgaaaaggcactttgggcaactagagtttagtgggacaaagttcatagttgtcaaaatcattttctctttagagttgaaggcagtatggcatggtttacaaagattaaactgattaaaagattataatactcggattgaagacaaccctaatagacaagtatgctatcaggctcaaatagaatggatcaagcaaatcttgtaagggctttagtcttttactgtatatgtttatctaaaaagttttttcccgcaaagtgaacatataatattgggttgtattaaatgccattttgtcctggtcttactcttgtgttatataatcataacattgagaaaatgctattgtttctatttctgtagtttctgatgaagtccatttttaaaactgcacgttgctgatatatattcattatgagtccacattttaccataatataagtcattttcctagacttttgggtgattttatgtggaagagattatctttagaaaatttatgttgcgatttctgatgagctcatgttaaacaggcacgatgagtgagatctgtatacttcaagccttagttttttaacttgtttrgagcagttggaagttggcagttctcatgtaaagtgctgctagttagagcaaatagcctctgcagaaggatatctccgagtttaacttgaaattatctgtctctgatatacgaaaatggattttgttttctgcatagccccaaagttgatattttaagcaaaattaagcccatttcaggtgaataaagtatgtaaaaagaaataacagtaaagatttatttatatttatttatttattttgtggagatgggatctccctattgttgcagtctgcttagtccctagctcagctaggtctgagttcttgttccacaaccaagaagaataaggcgtgtggacaccagagagtgagtagagtaggatttcttaagcaaaaggaaaggtctcagcaaacagaggggccctgaaagcaggttgccagaaacgggacttacttctggtcttttgtgtggcagaagccaggaagtcgtcgtggattttgcccaaataggagaggtaaagctccctcctaggggtgttgcatctgcccacgcttggagttggccagagtgacttcatcttggtattactcatgagtgcctaagccaaacccacaggtgctaaaaccacaatgttaatgtcatgttaatgacataatgagcttggtcaagttaacaacatttaggttgatttattgcacctgcgcctaagttgggtcagtcgtttctgagcaacaccctggcacaaggtgaagttcgtaaccacatttcttctggttagctgcagaagcagtgtaggtgctgtcctacagttgttcctgtgaacattgtccttctcccaagaccctccgtctctatctgcctaaccagcccctaactgcctcctctctcactgtgttacccaggctggtctcaaacttctgagctcaagcagtcctcctgcctcagcttcccaaagtgttgcaatcacaggcgtgagccactgtgtccggccagaaagattttttggtttgcccccgtgttttgcttgctttggtttatgttttgaataggacttttactggaaattggtagattatttttcttttttttttgagagaaagagaggaaaaaaggtgtgaaaatggaaaacaactatttcactttttaaatgaggatagggattttttttcattcaaaaataagttttattggagaaatagaaaacttctccagtgacagtatatgatcctttggaataaggggaatgttaatgctggggatrcattattgaggctattaaacatacatttcagcttatggaacccctcactccaacacaggatttgcctgatctcatttttctttgacaggactaattcgttaagatagatttaaagccagaatataactatatacgttatttatgtgcttgtatactgactctgagatcaaattaatcatcacatattcttagagttgtgaattgtgttctaccaagtaattcagattgcatttgtatttccgcctaaccaaaataaagccagaagtggtaatatctgtaactcattagaaaaagttgtcagcctaactacattaaaatatttgctaaatatttaatacaactgggatgggcagaaaccttcagagcttttccctatttgaaagaaatttttagtttaagaggaaaccatctaggaaaaagcaggcagtttctcagaagtaaaacctaagagtatactgagaaagaaaataccttttccaagataaaaaaaaaaatgaacaacttgactaaggacagaacaagaagtggtagtggatatagtggcatgggtagatttcatgaagtagcagaggggattgctatactggaagttgactaaggacataggctggtgataggaagtaaagaagaaaatttattgaaggaagttttctaagcattattaaaaacaactttatcttgaattcttacagattttacagagctcttgcttgtgggagcgtaggtccaattgaatagttcattggtgcattcattccttaagtatttggatatactgggcattaggtacattgctggtgatatagtcataaatcaaatagacatagtgtctgcccttaggaagtttaaagtctagtagcttaaacttcctgtgagtattgtcttcaaatccagacacacacacacacacacacacacacacttttgaaacttccctacaattctttgttttgatagttatatttctgatactttttttggatctttctactatttcccatatctctggtacactaagttttcctatgggctccttcgtcattcctttttagaaaacttttattatggaaaactttaacatgtataaaaataagagctggtggacccttttgtcctcatcacccagctttatgatcagttttgtttcatctgtactaccagtgctacttaccatctctaggttcattttgaagcaaatcccagacattttataatttcatttgtatttatttcagtatgaatttctaaaagatagtttttcaaaacataactacattctattttacacctaagtaaattaagaatcattgtttaaaatcatcaaataaccagttgttgatcaagtttccccaactgccaaatacattttaatgtgccatttaaaaaatgattatgaatcatcacaggagcaatttgattgtaagctctgcatatactttttcttcctggaatggaaaaatgagagaagtgaatggtcagaagaaaaattagtgtggcctgacttgaaataaagaaataaagcaataaagaaataaatacaagcaaatgatgatagaataacttagaagaatgcaaaaactaaaagcaaaattaagatgaagaaaaataaaaggaccaaaccaatggatctaagaagaaaagaaaaaaaaaatgctacagtcatctcaagtgaaaaagcagatggtaaatactagagccagttttataaaattatagttatgatattgattttttaaattattacttagttgaatttctccagctaacagcttctatttctcttaagcgtttaacattcttggtcaaaatacataatatttttggaacatatttttaatgtaattgttatttaatgccttcctaaataatgataatgtgaacttaaactctttattgactttcatacaaaagtagaaatctgtcaacagtatttactcatattattttatttaatttgaagataagaacttggaagaataacatcatatttgtgttctctaacataatacttcatttagctttaaagaatttcccccaaaacaaagtgctacattagagagtattaacatagaatggatataaataaatgagttaatgagtaaatgaattatcaatgtaacactaagagaactgatatattatggtacctttgattctgtgctatactccagagcctggaacagtgcctagcataattataaatactccataaatatttttgtatgaataaattaaaaacctaacttgaattgactatagaaaggcatttaaaacaaaagaaaaatagaaccagatgtttaacacaaatatgaaggcttactgatgacttaaactcargggtaatctctttatcatttggcagtagtttctttttctttttttcttctacagccttattgagatatagttgacacaaaataaacggcacatatttagagtatacaatttgttaagttttgacgtatacagacacccatgaaaccatcaccacaatcaagatagtgaacttatttaacactctgaagtgtgctcatgtccgtttgtgtttcctccaccacttcccaccttcatccacaggtttaacacagatctgctttctatcattatagatgagtttgtgtttcgtagaattgtatataaatggagacctacagtacatactattttgtctggcttcttttaytcagcgtaattattttgacgttcatctatgttgtatgtattaataatttgttattcttaattactgactggtattctattatatggttatgccaaaatttacttatttgcctgttgatgaacacttggttgtttccactttggggctgttataaataaactgttgtgaatatttatgtacaagcctttctgtgggcrtatacttccatttttcttggctaaatacctaggagtggaatggctgggtcgtataacagtgtaggtttaactttttaagaaactgtttgaactgtttacaaaagtgattgtgccattttatattttcatccarcagtgtctgagacttttagttctcatataccctaactaacactttgtatggttatcttttaaattttagctattttagtgtatgtgtaggggtatgtcatggtttttttttgtgtgtatgtggtttttttttttcattttcctgtaagtattgttgaatatcttttcatatgcatattttcatctgcatatcatctttggtgaaatgtctgcttaaatcttctgcctattttttaattgggatgtttgctttcttcttattgagttaaggttctttatatatattctagatatgagtcctttgtctgatgtgtgttttggaaatttttgtttggaaattctagtttgcagcttgccttctaattttcttaacagtgtcttttgaaaggcaaaagtttttaattttgacaaagttcagtttattaagtttttaaatttatgcttttgtatttcgtatttatgaaatttttgtgaagcctaaggtgactagaattttttctggtttcttctaggaattgtataattttagctcttacatttaggtctaagatccattttgaggaatcacgtaaactaagaattgaggttcatttttttgcatatagctattcaattggtctagaatcattttttcaaagattatgtctttcctattagttgctttagaacttttatcaaaaatcaattgactgctgggcgcagtggctcatgcctgtaatctcagcattttgggagtctgaggtgggtggatcacttgaggccaagagtttgagaccagcctggccaacatggtaaaactccgtctctactaaaaatacaaaaattagccaggcgtggtggcgcacacctacaatcccagctacttgggaggctgaggcaggagaatctcttgaacccaggaggcggaggctgcagtgagccaagatggtgtcactgcactccagcctgggtgacagagtgagactccgtctcaaaaaaaaaaaaaaaaaaaaatcaattgaccatacatgtgtgtcatgtgtgtctgtctttctgttagtaccacactgtcttggttactagctttgtagtaagtgttacaactgggtagtgtgatttatcgttctttttttgaaattttgttcattatatgttctttgcattttcatttaaattttagaatcaacttgtctgtgtgttgctagcacatagaaatacaattgattttttatatattgatcttgcatcttgccagtttgtcaaactcacctggtgcttttttgtagatttcatcagagtttctacataaagtatcatgtcatctacatatagatacacttacttcttcatttccaatatggattctagttggcagtagtctctttgagtcattaatcttaattaaatagtacagtttactattaggataacttacagtaagccacaaattaattcctccttcatttaaaactaaaatccttaccaaagtccaaatttcagcttttaggttttcttagcaagagttttaaaatattttgagattcctaatggtaatgaaggaatttttttaattcctgagagtacactcactaagctgacagcattttgacatttttcagtttacatatttttatatattcaaattctcttaattatcaataataaaaggctttcacaacatcattccttattgagggtataaaagggaatacatatttaggtcattaacatctgtgacctggaaataaaattgacagattctggcccagcgtggtggctcacgcctgtaatcccagcactttgggaggccgaggcaggcggatcacgaggtcaggagatcgagaccatcctggctaacatggtgaaaccctgtctctactaaaaatacaaaagattagccgggcgtggtggcgggcacctgtagtctcagctactcaggaggctgaggcaggagaatggcgtgaacctgggaggcggagcttgcagtgagcagagatcatgccactgcactgcagcctgggcgacagagcgagactccgtctttaaaaaaaaaatacacacacacacacacacacacacacacacacacacacaccagattccattctagatgctattccttaactcatttaatccttgagagtagcaacacccagtagaggttttatccttttaactttcttgaatatacgttgaacttaaattcaaatttctttaatttaggtatatcagcccaatatgtacttgttttaaagttatttcgaaagtaattttctctttctagaaatacgcctcatttttttcaagaaatggcgggtttcgctatagttcgactctgatctaagtcacaatacagttctagaaacaattttccaaatcttaaagcaggtctggtttccacatagaaatagagtaataatggaagttctgattgtaactaccaagactcaagatggaagttcttcttccataatagtggtatgagttccagcgaagcaagaattagggagtagcaagacgcctatgaagggaatacgtaggctcttgagcagaggcagattcaggtttgggggagtcacctgaaacctattcaacttctggtgctgtctttatgaaaaggaatacaaaatattaaatgtttacaattggctgtcattattcatgttatatatatatatttttttttttgagacggagtctcactctgtcacccaggctggagtgtagtggtgtgatctccgctcactgcaagctccacctcccaggttcatgccattatcctgcctcagcctcccgactagctgggactacaggcgcccaccaccgcctcccgggttcacgccattctcctgcctcagcctcccgagtggctggttctgcaggcgcccatcaccatgcccagctaatttttttgtattttttagtagagacggggtttcaccgtgttagccaggatggtctcgatctcctgacctcgtgatccgcctgcctcggcctcccaaagtgctgggattacaggtgtgagccaccgcgcccggccaattatattctttaatactgaattagcaatagtgaaccactattcctaggggaaatacagagttaggttcctgtgagatcaacattttcatcaactgattaacatatataaccttgttttatgtgtgtttctatttcaagaaaccttatttaatgtatattgttgatttattaacatggataactcatatgtgaacaaagcttatctgacatacatactttctctgtaaagcacacacagctttcttgcccttagggacactggacagcacttcactactatgtttgggggccattttcaacagtgaaatcactggaaaaaaagcacaaaaatgagaaaaacagctaaatatactgcagaaaggacatttgtttatagtaagagatttgaaacaagaaggcaaaaagccaccttggctgaaattacgtgccttggagtactcaaaattttcattgcacgtgtccatgaatgaccgtgaaagcaccacaagtattgatttgggtgttacaaataaattctagtwggtaaattcacatggaatctgtgaatagtgaggattgactccaggatgaaaaaagaactcctaacaagttacaattgtataaagctgacaaatgccacaaatactaaaccccagaaaaataatttttaattaactgcttgatgctctctataatactgttttcccttacatttcttagctgcataccctttgattgtatgacagtgatttgtaatgttttctgtaaagagaattgagaatgactttgtaatattaatattgtctataaagagaatggaaaatctgaaaagatttttttctctagcatggttgatttaaaatgttgtttttaaattattgatatttgtggtacataacatttgaaacttcacatacatacatacttcatatttgtagtactgctgtaagcttgtgccgtttagacaggatttcagataattttattttatgtgattctcatcagaaaaggaaaaaatggttcatataattgcttgtgctacatttttaattgtctacactacattttcaagactattagtgacagaagagaacttctattttgactaggcatcattgagaaatgcctccttcatttctgttattaccttgtacttaccatgctaggaaccatgggacacattcatatcacagtgcaatctctcaccctgtatctatttatgtgacaaaaatatctctgcacaaaagcaactgtgaactacataaatatatctctaaatccaaactaaatagttctcagcttaatttctccatcacaggatcccagaaatgcagatggccactttatttgctacccaacactaataccgacgctggaaaactgagatggcaccgaatcctgagagacagatatcttaacttatttaacttaactcatttaactcatgatggtgaaattttacaaaaacacatccaggtaacatagcacaagcctctcccagggcctttgaagggaaccgtgcaagcaagggtcccttaagcttacatttcagcaaatctcctaaggaagctcttcccattgaactaggagggcacctcaagttcctaaggggttctcagtcctgctcccaagataggagattacttgagaaaaccaacattaagaaacctgaaatagagaaagctatattgcaaaattagatgaaaggtaatagatgctgaccctttaagattgagttctgtctctaatacaaagatataacagagaatgtccagattgcctctagttaaaattttgttttaatttaatactagaacagcagctttccattaaaaagtgctaacctctgactaggactcactttccatctctcyttagagcctgcagcactttctcagattgaccagcctacaattgtgtatcaactgcttgtttactaactgccaagaacctttgtgtaagtcagccaataccctaggtgtgagtgttggttatggcagaccataactgagcagcctttccaatgacttttttttttttggtctctgttcagtaaccttcactgcctcctcttcctctatccctcccctctaattgcctagctaagggtagattaccaaatgagaatctaacatcaagtaagttgtagatatggctcattgataagtcataaatgcatacaaatacatctctgtgcaattgattaaaacatatggataagctctgaccctgaaaaatgaacatgataattctcacacattaaatattgttctgtggtaggttgtctaaaaaagtatttggatgtttgtgtacttggattatgcaaattcatgtatcataaatttgacctatctaaacctaaaataccaattgtgataagtaatttaacaggagtgatgtatgtgatttgcatagcttgtatcacttgaaaaacttctctgtgaaaggttcgcactgatttcttttctatagaaaattgtgacattctagtcattacagtgatgttatactaggctcaaggcttaggtcagttgtatttgatagatgataaaatacccagatcactcaaggtcttattaaagtcctttggttgtgatagggagcaggtgtttcttcttgttcctctagtatgttaaagtacattaaaggaagctgtgaggttgaagaacatttgtaagctgccatttctgagcactttctgtatgcttagtattatgcaaagtaactcttatgatgcaggtgttgtaatgttcaatatgcaggagagtaaattgagacttagagaggtttgtacttatctttgtctttaatgatagtatgagaggtgatttttctttctctgggttataaaaacttgaacttaatagtgatagaatgtagaattatgtgctaagtagattaaaactgataatcagaggtatgggtagaaagcctgacattttacagttgaagtattaaacacatcctaacctgtccattacacctatgggacatcttctttccagcttataggaaatgagtaatagttgctcttaaattttgttccatatatagtagaggtatcctggaagattcaaaatatatttatgatctaagtaaatgttgtcaggaaaatttcagttttagcagatcagacattaggaaaatattgctactagtgtgaatagaaagtaatgtggacattggagaatttccttaggtttactgaggacctaaatgtatgtgtctcattaaaggttaaaaaaaaaaaagaagtctcagaagttatattaaagcaaaatacaaaatggaacaagaccttggggttttgcttagggagcatatatttctgcccactttgttggaggttgctcttcctttttgccaccatgtttttacagattttattggcctagaccagaggtcagcaaactaccacccttaggccaaatccaacccaactgtttttgtaaataaagttttgttggagcataactatgttcatttgtttgtatatcatctactttcaggctacagttgcaaagttgaataattttgacagaaaatgtacagcctgcaaagccaaagatatttactgtctcctcctttacagaacaactttactgaccctggcctagacagtgatgaaaataattcttaaatgtttttcctcctattttccttttcttcctcttcctgttccttctattcctttagctatatatgaactcttgttggtattccaggtgtcagctttctgagcatatgcctttgtctgcctcctgttgaggttcccacctccaaacagttatttttttccatttttgaggctaaggatttttactcgttagagcaacaggactagacatcaggagttatgtaagtactcaggaatataccccttgctatcttacagactgaccaccatttgtttgccttttgaagagcacagtgatcttcttaaaatgtagtcatgttaccgatgataaagctgtcaaatgtacaatgatgtctttttaaatattgggaccaaatcccaatttattctgactaatatcgggttccacaagagggaatttgaagcatctctgctaatgaaatcagttttcattttaatttatctttgattttttgcatgttggaggtgaggagggaatgagggtaacacttttcatttagttcttaattttcttctgttctactctacaataaagttctgatggtatattggagctattatggtcatgctatcacaagagggtctaggatctaacagccagaaagattaagatgcaaatgcaaaaggaaccatacagatttcaatttggagaagtagggagtctctgacgatatttgaatggaaagagacatgtcattatttttaccattgcttcttattttctctcaactattccatgtattttccgtagttcttacaccttttattcctttcttttcattggtataaacattgttcattgttaaacaaaatatatcacctataaacatctgacacttttgtatgcccatagactaccatttctttgataaagatgaagcatatcagaaactgtctaggattgttagaattctagttaacattctgccaataaaacagccctaagctttggacatttctctttctcagatctacctgaggttggtgattttttgtttgtttggttggggatgttttggtgggaagggattgttttattttatttttaatctgaatcttcttcccttggagtgatagccgaacttgctgagtttgtgagtatcagggatagaagatatcctgaagccacaagtcacatctgaaatagaaaagttgctattgtgtcccatgtgagatggttgattatgtttaaagggctaaggacaagatagatactgtgtgtttggctttgcaaccaaaggacctagtgccctgccttttgtacttaaataatggatgaaaatggaaataaagctgaactctaaggaaaagcttttaaatctaaaagagaccattcagtattcaaagcctacacactacagaggctttgaataatctccttaagttttcactatgagagttcatttcaaataaatgttatattttccttttaaataaaaagatataatgatattgttctcaagattgagagattgttgaaaaaagttggtttaccatttttaaaagaaacatattagcaaatgcctctgaaaatacacttattagtttgccaataaatgagtaatgttgcagttgtgagttaaatgtgcattaaatgtttgagaawatattgggcttaaaatacagttttaggcttctatttctggataagatatagtaaacacatcatacactatatatattagtctattctcacactgctataaagaaatacctggctgggtgcagtggctcacgcctgtaatgccagcactttgggaggccaaggcgggcggatcacgaggtcaggagatcaagaccatcctcgctaacacagtgaaaccccgtctctactaaaaatacaaaaaaaaattagccgggcgtggtggcacgcgcctgtaatcccagctactcgggaggctgaggcgggagaatggcgtgaacctgggaggcggagcttgcagtgagccgagatcgtgccactgcactccagcctgggtgacagagtgagactctgtctcaaaaaaaaaaaaaaaaaaaaaaaaaaaamcctgagactgggtaatttataaagaaaggaggcctaattggttcactgttctataggctgtgcaggaagcatagtggcttctggggaggcctcaggaaacttacaatcatggcagaaggggatgtgagatgtcttacatggtggagcaggagcaagagagagagcagggaggtgccacacacctttaaacagtcagatctcctgaggactctatcgtgagaaaaatactagcagggtgttaagccatttgtgaaaaacggccctcatgatccagtcacctttcaccaggccccacctccagcactggggattgcatttcaacttgagatttgggtggggacacagatccaaaccagatcactgtaattcctgctaattacaaaaaaaaaaaaaaaaaacaaaaaaaaccacaaacttgtaatttcctattttttgtgtgtttacttatttattttacttcctatatatcccagccaagggtactagaggcctgcagctagaaaccttagtggacagagaggggggaaaaaaaagccccattttaatgatatctatccagttgcagtcccttccccaggtgctgtagctatggagattgtgcatgtagccctgtccctcattcctgtcctgcaataatgagggtgcccctcccactcccactgaacactgttcctaccactcccactgggcactgctgccatggaaactgtggatggagctgcaataacaagtttgcagccctccccaatggatgctacagccacagagactgtgggcaaagccctgaccgccgtttccatcccctaaccctcccaactagagtgtggagggaggattaaaaagaggagggagttagagaaagagacttaaaaaaatctgtgtttgaaatcctgggcagatttcttagcatccctttcatgaaactgattagaatcaatacagaaaaaggttttagaattgggctctgctgtgttataccacccaggtttcagactggcctctgggtagcccagtggggcagaacagaacaacactaaaaagaccctaacaattaaattgacatttgattcacagcccataaaagttggctaagacatgcattgtgaatctaaacaacttgattgcctatcaaagtagaaaatttaaacaacagagtctcctaacataatattcatcatatcaagaaccaagaaaatcttaattcgaatgatgaaagttaatcagctgacactacactaagttgacacagatgttggaattgtctgacaaggattttaaagaagctataataataaatatactccaattacaattacagtcttgaaacaaatgaaaaaatagaaagtgtcaccaaagtaatagatgatataagggagaaacaaatggaaattttagaactgataaatataataaactaaattaaaaattagctcagtagtaaaatagagatgacagaggaaagaaatggtgcactcaaatttagatcaatataaattatgcagtctgaacaacagagagaataaagattttaaaaaggtgaagagagtcttatggggacctctgagaaaattacagaaacatcttcatatttgtatcattgaaatcccagaagaagaaaagtaggagtgagagattgaagaacatatttgaagaacagagagacacagggaaaaagccagtgaagtcaggtagtgattggagagatgtgtctacaagccaaggaatgacaaggatggctggcaaccaccagaagccgggagagagacatggaacaacttcttccttagagcctccagaagaagccaaccctgccaacaccttgattttggacttctggcttccagatctgccaagaaaccaaaagacaggatgagaatcaacactttgtaagagccttcagtggaccagaagctggaaaggccagatactcgctttcctagcaccctccctgttttgtatgccctctgctaggatggctgtgcgatttgctcctggttgattcaatataagaggaagttggctggtgggaacgtcagagaaatgtttttctttctgataaaaatggagagcacataagaaaaaaacttttagtgtacttcttcttctggcctttggatatgatgtgagaagcttgagaggacatgatgctttggagctgttacaaccatcttgtgaccatgaggcattcagataaaaagctaacattctgaggctggtgaagaagagactggctggaaacaggaaaacattcctgggactgtcttctgattttcttattaggtaaacaacgtgttcttagtgcttaagcactttttttttttttaaatacaaccaaaagcagtcttaactgatgcacaagccaggtgcctgacacaatgggggtcaatatgtatttattggataaaggaataagagaaagaatgaatgaaacttctactaaacctacctatactccagctgtccctgttracaggacctcatgtggaatacttgaaggctgggctggaatcatctgagagcacattctcttggctgatgctggaaagagccaaacatttggagcatgcgatagcaggggatcattggccatctctctctgtattggtcttttcagtattgcaacttcaaggtagtaggattttttacaaggtagctgagggctccaaaggtagtcacttcaagaggcagagatagatggagaacaagccaggaggaatgtgtgtccttgatataacctagcctcagaagtcrcatagcatcacttctgccctactgtattggttagagcagtcatgagccccactaggtagaagaggagaggtagagatctcctctcttggtggagaggggatggttgtagaaaagcatgtggaactggaaatattgccagggctatttatttatttattagtttatttttgaaaatccagtctgctacagtgccttatatacacctctattatcasattgaccatctcgatgtcattcatgtctttcatgtctatccttctgactgaaggatgcaagcacctggaagttttagtctgtgatttattaactttagtatctctgatacctttataaagatatgtttaataaatgccttattttgaagaaaagaaaagaaattgaagaagtgacagaaaacttcttaaatttggcaaacctaaatattcaagaagctgggcaaactcctaacaggaaaaactcagatccattcccagatactttttaagtaatttgctgaaaactgaaaacaatgaaaaaaatcttgagagcagccagagagaagcagcgcattaattgtagaggaacaatttgaatgactctgggtttcttatcagaaaacatggaagccaagagaagtaggaaaactgtatcgtttgttttgagccaacatcttgctattttgcccattctggtctcaaactcctgacctcaaacaatcctcctgccttggcctccgaaagtgctgggattataggctttgaaccagatttaaaaccttgtgctgaaaggaaagaattaccatccagaatttttcacctagggaaaatacaacgaagtgagaaaaagacattttcggatgaaagaaaactcagagacttcattgccagcagacttgtgtaaaaaaggaagttcttcagacaaaaaatgatgacagaagggaattctgctggaacatcagaatgaagaaagtacaaattaataggtatagggaattgcctaatcttctcctgttgagtttttaaaatgttgggtaagaagcaaaattttttacaatggccgatgtggttcttaatgtttatgaaggtgatttttaaaacaatgtcataaaagtggggagagtaaaggaacctaaaaagtaggaaggtttctgcattccatttcaaatggcaaaatgttgagtagactgtaataattgttgtatatagatataattatccctagattaactactaaaaatgctctataggccaggcacggtggagcacgcctgtaatccctgcactctggaaggccaaggcaggcggatcacctgaggtcaggagttggagaccagcctgaccaayatggagaaacctcgtctctaccaaaatacaaaaattagccgggcatggtggcatgtgcctgtaatcccagctactcgggagactgatgcaggagaagtgttgcttgaacctgggaggcggaggttgcagtgagctgagttcgtgccactacactccagcctgggcgacagagcaagattctgtctccaaaaaaaaaaagctctataaaaagatattttaaaacactatagaagaccatactttacaggaaccatttctgtagttccttaaaacactatagataaatcaaaattaaatactaaaaaaggttcagagtatgyatagacaaggagaaatgggaacaamaaaaggagcaaataaaaaacaatraagtggcgtacttaaatcccaacatgtcaataattgcatgaaatataaatacaaatgatctaaacataccagttaagaaagagagaaaaaaaaatacaggacaaagactggcagaatggtgtttttttgtttttgtttttgtttttgatacagagttttgcagagacagggtttctccatgttggtcaggctgatctcgaactctgacctcaggtgatccgcccacctcggcctcccaaagtgctgggattataggcgtgagccactgtgcctggcctattttttattttaatgatccaactatatgctgtccccccaagaaactaacttcacatataacgatataggtagattaaaagtgaaatgatgggcagatacaccatgcaaacaataatcaaaagaaagatagaatgactgggctgggcacggttgctcacgcctgtaatcccagcactttgggaggctgaggcgggcagatcatgaagtcaggagatcgagaccattctggctaacacggtgaaaccccgtctctactaaaaatacaaaaacaaaattagctggcatggtggtgggcacctgtagtcccagctactcgggaggctgtggcaggagaatggcatgaacctgggaggcrgaacttgcagtgagccgagatcacgccgctgcactttagcctgggcgacagagcaagactccgtctcaaaaaaaaaaaaaaaaaaagtacagtgactgtattaatctcagacagaatagacttcagagcaaagaaaactagcagagacaaaggaagatataacgataataaaatgatcaatttaccaaaaaaatgtaattttaaacatgtgcacttaacaggttttcaaaatatatgaagcagaaactggcagaactgaaaggagaacagacaaatatagttggagactttaatatccctctttcaataattgatggaagcattagaccgaaaacaaacaaggtcattcatcatgaccaagtgggatttatccctgggacacaagaattgttcaacatacacaaatcaatcattgtgatacatcattatcaacagaatgaatgacaaaaaccgtatgatcatttcaattgatgctgaaaagcatttaataaaatttaacttcccttcatgataaaaaccctcaaaaaactcggcataaagggaatatacctcaacataataaaagccatatacaacagacccataactagtaccataatggggagaaactgaaagacttttctctaagatctggagcatggcaaggaggcccactttcaccactgttattcaacatagtgctgattactctaggtagagtaatcagacaagagaaagaaatgaccaacatccaaattagaaaggaagaaatcaatttattcttgtttgcagactatatggttcaatatttgaaaaaatctaaagactcttccaaaaaaaaaactactagaactgataaattcagtgaggttgcaggtacaaagtcaacacacaaatatcagtattgtttcaaagtcaacacacaaatatcagtattgtttctatatgccaacagtgagcaatctgaaaaagaaatttaaaaaagtaatctcatttgcaatagctacaaataaaattaagtaacaagaaattaaccaaagaagtaaaggatctctacaatgcaaactataaaacaytgatgaaggaaattgaagagaacataaaaaatggaaagatattctatgttcatggattggaagaataaatattgttaaaatgtttatactatccagagtaatctatagattcagtgtaatccctatcaaaataaccagtgacactcttcacagaaatagaaaaaagaatctaaaacttacatggaatcacaaaaaaaccagaatagtcaaagctatcctgagcaaaaacctcaaaagtagaggaatcacactgcctgaggaaactggaggaatcacactgcctgacttcaaattatatactacagagctatagtaaccaaaacagcatggtaccggcatatagaccatagaccaatggaacaggtggagaacccagaaacaaatctgttatctacagtaaactcattttcaacgaaagtcacaaacttacactggggaaaggaaagtctcttcaataaatggtgctgggaaaactggatatccatatgctcaggaattatattagaccccagcctctcaccatatacgcaaatcaaaatgaactaaagacttaaatctgagacctcatactatgaaactactaaaaggaaacattggggaaactctccaggacactggtttgagtgggtaaagatttcttaagtaatacccgataagcacaggcaaccaaagcaaaaatggacaaatgggatcttatcaagttaaaaaccttctgcctgcacagcaaagggagcagtcaacaaagtgaagaggcaacacacagaatgtaaattagtacaaccactatgaagaacagtttgggcgttcctcataaaagtaaaaattgaactaccatatgatccagcaacccagctgctgggtatataatgaaaggaaatcagtatattgaagaaatatttgcacttccatgtttactgcagcmctttccacaatagccaggatttgaaagcaacctaagcgcccatcagcagatgaatgaacaaagaaaatatgtgatacctatacacaatggagtactatccagccataaaaaagaatgagatcctgtcattagcaacaacatggatggaactggagatcattatcttaagtgaaataaaccaggcaaagaaagacacacttggcatgttcttacttatttgtgggagctaaaaattaaaacaaattgaactcatggagatagagactagaatgatggttaccaaaggctgggaagggtagttgtgggggcgggtaaggggacgtggttaatgggtacaaaaaatagttagaaagaaagaataagaaagaaagaatatctcacagcacagcagggtgatagtcaataatacatttaaaaataactaaaagagtataattggattgtttgtaacacaaaggatggctaccccatttaccctgatgtgatttttcatgcatggtatgcctatgtaaaaataccttatgtaccccataaatatatatacctactatgtactcaaaaaaattaaaaattaaagaaaaacaatgctagaaaaatagaaactttttacttaccagcaaccccgttaaagaggatgaaagagaagccatagactgagagaaatctttgcaaatcacatgtccaacgaaggcatgtatagacaatgtattaagaactctccaatctcaatagtaagaaacaatctaattagaaaataggcaaaagtcttgtacagacggctatgcaaaagacatatacagatgacaaataagcacatgaaaaatgttaaaaaatcattagttattagggaaatgcaaaagacatgatgagatacaattagtcacctgtcagaatgactaaaataaaaaatgccaagaatgtggaacaaccagctctttcatgcattgcttatgagaatgtaaaatggtacagccattctaggaaacagtttggtagttctccataaacataccattaccaatatgatccagcaatcacattcctgtatatcctagagaaaacccatgtccacacagaaacttgtacactcatgtgcatagcatcttagtttgtaataaccaaaaagtggaaacaacccaaatgtccttcagtgggtaaataaactgtgatataatccacataatagaatactacctagtaataagaaatgagctattacacacaagttggatggatctcaagagcattgtgctgagtaataaggcaatctcaaaagattaactactatctaattccatttataatgctcttaaagtgactaaattatagtgatggagagcagttcagcgggttccagagattaagatttggggaagagtgtacctctaaattggaagtataaggggtttctttgctttgatggtacagcttgtatcctaattttggtggtggttgcatgagtgtatacgtattataaaatctgagtgcacgtgaaaactggtaaaatctaaaaaagtctgtagttaatagtattgtataatgtcaatttcctgattttgataaggtactattgttaagtaatatgttctccttggggaaagctttttggaaggtacgctgtaagtatagtaactctctgtactattttggcagtttattatggatcttaagttatttcaaaataaaagtaaaaaaatacagtgttaaaaatatttgaggagtaaagaataaaatgaactggttacagtactgttcattgaggtggtttgagaaaggtgatcttgaggtgttttttgttttttgttttgtttttttttcattaaaaaaacaataatagctggggattccagagaaattcatgctcagctaacagtgtatttttcatgtatggctggctgcatggagaaatgagacaaagactccgtcttcgagaagaggtatccagatttgaaatctagtctaattgttgttgatggtttggttttaaagccagtgaatagacaagtgctgtaagtaccagtactacccagaagaatggtactttgcagaatggaaaaaccagcaaaactgtgtaacttaaaactctgacttttatttaaaacgaaacatttggagcagcttttgcrcaggaacagtttcaaccattgttttccttttgcaagtacttcatcttttacacttgatcttagccaaaaggccgagaactgatactttatctttttactcctgtgtagtaagacagggctaactattcataggcatgctttttactccttttccctttccaccctcttcctcttcccctttctgtcctcttctctcgtccgcctttcttcccctctgttctcctcccaactccccttttttctatcttatttcctcctctcctcttttctcttctcactccctttttgaaaagagtacctgtcatatttttgaggaaagagaccgtaatgaattctgtcaactaaaatgatgacggaggacctttctaaaattcaatcttaattttgtaagcatgctctttataacctcaacagttaaattgattctgagacctgggaattagggtataaacttacagagaaaagttgaggtgcttgagaagatacattttctgtgcatttatataggattgtcagattctggctcctcatgtaactcaacttctgtatccttggaggtagttttatttacattatattcttgaatgagaatatgcatcattaattatctgcctttcctttgtggcccttctgatggcagaaaaatattaccaaggttattctagcatgcaagtctcttgaaactaagttgagggttttctagagaccacctggaactcccagaggtaacagaatactgtcttgaaagcctcagtggaagaaatgccccacatttgcttgttgctttctattggatttatggaatttccatcttttaaaaatgactttaaagcatttaatagagactttcaggtaaagagcaaaagtttttaaaatgtattatttaaagtaagctaaatgtggctttacttaccaagataagctttcctcttctatgaccatatagtaactatctgcctttgctgcagtctttcagtctataaactctgtatcttggtatctttcctccctttagtttctactcttagattttacagaatacccatagggaaattgatttcctgaagcacttggtaaactacttgggcctgagctattgtgttgtccttactacttggtacagattagattgttctttgctagaggggtggaaaggatgccttagtacagtcttaactttgctatggaaatattcttgtttaatatgttaagggacaataatttctggtcttggcttttaaaagtgagcatgctttttaattgcctctttcatggttattaactgagtcttcattttaattaccacaatggagtacttcagttctcttatttgcttcattaccttttctccttggttttgaaaataatgttagagaaataaaatcagattgtttctaatataatgaaatgctttcactacactattaatgaattcgttcttcattaccagcacaaagctagatattgcaaatctttttaaacaaataaaaactgtttagtcttctgattagagcagacaaagagcacagtaaaatttaactcacctggcctgatccctttttttggtttttactgagctgtcttcactggaaataggagctatctttgacttaactccttccaatagaaggaatttcttagggaggagctggaaggatctcctggggttctgattcttaattttcagtttacagaaatagccagataggtgttttgagcctggacttcttgctgcatcttgtattgaagacatcatggtgaaatcgataagggcagtggacagtggatcaagagccctgaacaggtctcttgaacctgaacagatttgccacctgttaatttatttttatgactatggacttgacatcacctttgtctctgtagatgtaattcagttgaactaatggttattgagcatttactgtttgcaaaaggcagctggagatattatgtccagtttatatttactaaatgttttctttgttgttaatttagcctttttctgcawtgtttttggtcagtagtaactctgggcaggtgagggcaattacattgtggctggaaaatttgtactctgaagttgcttttattggtgtgtaggaaaaatctttattaaaagtcatagaaaaaaatcatttaatttataagccacaaaatcagtactattttgtaatatgttgtaattcacattgctactaatttactaagtggagtcagtggaaacccataaatcctagtagtagtgcctaagtagtagaagaacgcctatggtttactagttgattgaaaattgttctttttttgcaaagtggaaattaacctggtgtgctaatttgaaatatgtctaacagtgactatttttatattttaacctaagtaaaatatctcagcgttatgatggtgtgtttactgaattagtaatcatttatttctaaggactgctgctttccttcaaataccattttggttagaggcttattgattcaagtattgttcctaattgttgatttacagggcagagagagcaaatacagctttcagctctgttgaagcagggtcattcttggaaactaatagtgtcagatgaaatgcctcagatagtgtaaaagaaaataattgggccaggagtggtggctcatgcctgtaatcccagcactttgggagcctgacgtgggagaatggcttaagctcacaggttcggatcagcctgggcaacatgggaaaacccatctctacaaaaaactaaaaaagttagctgggctacttggggggatgaggtgggaggatggcttgagcccaggaggttgaggttgtggtgaactgtgattgcaccactgcactccggcctgagcaatagagccagaccttgtctcaaaaataataataataattgaagaaaataaaaagggamctgaattcagaakaatcctgttatatcttaaatccttatttcttgatttatatgtactatgatgacagctttgctgatgaattataattacaaaaatgttacataatgttgttagcatataaagactcgtgattgagctaccttgcaacactaatactcaaaaagaacacacacatacaaaaaactggatttattcagtgtgaaataatgtctcttgaaattatgagaataaataagtatgttcaaattaattttgtgcatacaccagctcatttatttagcctcatagtagctctgagaaagaagggcgagtgaacagggagaggttgtgtagggaggtaatttttgtgtctattttaaactaaccaattgaaaccaaatcacacaactgagttcataacagaaccttcactggaccaaaatcatatctttaacctctctatccaagctctttcattagagaatgttgtcttaagtwattttcacagatttaccttgtatttctaaaacttgaattatcattattgcaaggagctagaatatatctgcctattagtgagtctgacttttwagtagatcccatatataaaaatctcatattataaaatataatttattatgtttatagtttagagtaaagcttcttttagtaatgagacccttctatatatcttgctcatggatatgacacattttctagtcttttgcaggcatcaactggatagtataaaactaggatcagtggtaactgacaagagctatttggtaagaaatttgaaaattacaaaactatggctctgtatcccttttatagagtcccataaatctctttatatttgttgctattctggaactatgctgaataacaaaggcttagctcagaagaggggttttctatgaagttcttttcatcagaataaattcctgttcatttcagagttgttgctttattttttttttctagatacgtactctgataaacctaatcttgtgttaggaacataaataccttttctgttctttagtgtcctctgcctttttctggaacttttatgagcaagttattttgaattttccagacttttaagtattatttggacaaaaaaattgggctatggctctgagctttttcagtgtttaatttactgttatcagtacagtcattcattttctcgtatcacccttcaagtcttccattgattaccttatatgtatagacctttctcatttcagaatcaagcataatggattttccctctttctttatgtcctctatgacataaacagaaaagaattaatatagtctatcttcagcttgatttgagatatactaagcatcattcattaagccgcttgtacagattgcccttttaggtctcagctcttgtgctcaaagctttaggttctagtcaaactctgttctcaacacagtgaatatactttcttaaatgcagatgtgagtcttcttttaaatagaaaatctatagtttccaaactaaaggtcagatgtttcaattattatgttccttcactctttttttccttaaaaaagaagaagaagactaacataagatgtaatagtaggggaaattgggtgttaggtatatggggattctctgtactatctttgcagtaattcagtacatctaaaaactgttctaaaagaaaaggtttattgaagaagatatgagggacattttctttttcattcatatgaattttagtgatattcaggtactctatttctcatgaaaatctgacaaatgtcactgttgtttgtccgtacttttgatcaactgagtcaataataaacctttgaatcagttcgagaatattatttattcccaggatccttatataatattgtacagaaattaaatgatacagatctcccattcccacatgataccacactcctctgtttctctcagatcttttgtggctatagcaacaagtgtgagaatgcttattgctttaggagtctgccatgagttcacattttcaaagaatcagcaactctactacttgattgtggaaacaatattgaccaaatcttgctgaattttatcagggttctctcagattcaaaaaggctcttaactcttcctaaggtacttgatggtatgggttctgctttgatctaaaaaaagaccagcttgctgtgacacatttgaatatgaaaggtacttcttctggaggtaacttgtagtttcccttctcagtctttcctttggaatcattttatagactgcagcttttgtttctagggctctgcttgacaggacagataatatccctggaaaatagttttagagttgatgtttggtgactgcattattcaaggctcatataaattgagaactggttacattgcctcttgctatgtaggataaaagcttctgttcttggaattacccgtcctctctcttgtagacaaaatagctaggaaaactgctcagactgattttgttatatgaagaactaagatgcctaggaataatttagcaatagctcatccaaattaaagcagagttgaactttagaatggaaaaaaaaaaagaaattatcatgttagctaaacatttgctgtctggatctcccagttaaaaagtggcataatacttctcaagttagccagtatagaacatgttccacattcagttgtgaaaatggctggtagctattatcaagtatgattttttaaatgttccatgcctgatattttgtaattgttgaattcagatatccctctactcagtggcttttacttcataatgaaaaagtagatttggttgtaatatataaaattgtgaagatagatggaattaatagagaaattagagtttttcttttaagataatttgagtttcatcatagaaggtaagctcagaatgctgaaatgctgctggaataaatgaactgttttacttttttcataaagatattgatgtatgcaactttgaattcagagatgattccatttgcatgttctgagtgatgaataagtgaaagaaataaaagactgaggaataaagaagtgaaagaaagaacttatacactgctggtgggagtgtaaattagttcagccattgtagaaagcagtgtggaaattactcgaagaacttttactaccatttgacccagcagtcccattactggatatatacacaaaggaatataaatcattctaccgtaaagatacatgtatgcatatgttcattgcagcactattcacggtagcaaagacatggaatcaacctaaatgcccatcagtggtagaatggctaaagaaagtgtcatacatatacaccatggaatactgtgcaaccataaaaaagaatgaggtcatctcctttgcagggacatggatggagctggaggccattatccttagcaaactaatgcagaaacagaaaaccaaatactgcatgttctcacttataagtgggagctaaatgaagagaacacatggacacagatgggcaccacagacactggggcctatcggagggtggacaatgggaggagggagaggatcaggaaaagtaactaatgagtactagacttaaaacctgagtgastaaataaagtgtacaacaaacccccatgacacaagttaacctgtatacaaacctacacgtgtacccttaaacttaaaatttaaaaaaaaaacaaaatgcaatgttaaaaaagagaagtgaaagaattttttaaatgtaactgcttaatttcacattgtttacagttcttctcaagtaagcttcttttcactgcaatctccttaaatatgtacatacggttttctttggattcactgaaatccaatccagcaggattctttcctgaataagaaacgtactggatcagtcctgacctattttatgatttttggtacttgtcacctgtaaagagaagttaagggaacatcaccaccaaccccacagaaatacaaaaataccatcagagactatgttcataacactctgtgaacacaaattagaaaacctacaagaaaaagataaattcctggaaacatacaacctcccaagactgaaccgggaagaaattcataccctgaacagaccaataacaagttctgaaattgaatcagtaataaaaagcctgccatccagaaaagtcccaggaccagatagctaaattctgccatacgtataagaagacctggcaccattcctactgaaactattccaaaaaattgaggaggagagactcctccctaactcattctgtgagggcagcatcattctgataccaaaacctgggaaagacacaagaacaaaaagaaaacatcagtccaatatccttgatgaacatagatgcaaaaatcctcaacaaaataatagcaagccaaatccagcagcatatcaaaaagttaattcaccgcgatcaaataggctttatccctgggatgcaagattggttcaacatacacaaatccataaatgtgattcatcacataggcagaactaaaaacaaaaaaattatctcaatagatgcagaaaaggctttcaataaaattcagactctcttcatgttaaaaatcctcaacagactagccatcgaaggaacatacctataaatagtaagacctacctgtgacagacccacagacaacatcatactgagtggacaaaagctggaagccttccccttgagaaccagaacaagacaaggatgcccactctcaccattgctgttcaacatagttctaaaagtcctagccagagcagacaggcaggcaagagaaaaaaattaaaggcatccaaataggaagaaaggaagtcaaactacctctctttgcaggcaatatgatcctaaacctagaaaatcccatattccctacccaaaagctcctagatctgacaaacaacttcagcaaagtttcatgctacaaaatcagtgtacaaaaatcagtagcatttctatacatcagtaatatccaaggtgagagctcaatcaagaatgcaatcctagtcaaaattgccacaaaaagaataaaatacctaagaatactgctaactagggaggtgcaagatctctacaaggggaattacaaaacactgctcaaagaaatcagagatgacacaaacaaatggaaaaacactccaggctcatgggtaggaagaatcagtatcattaaaatggccatagtgcccaaagcaatctacagattctatgctattcccatcaaactaccgatgacattcttcacagaactagaaaaaactgatttaaaattcatacagaatcagaaaaaagcctgaatagccaaagccatcctaagcaaaaagaacaaagctggaagcaccgcattacccgaattcaaactatactgcaaggctgcagtaaccatggtatgggtaccaaacaccatggtacccataccatgtatcaccataccaaacagcatggtactggtacaaaaacagacatatagaccagtggtacagaatggagagtccagaaataaagtcatatacctacaactttctaatctttgacaaagctgacaaaaacaagccaaggagaaaggactccctattcaataaattgtgctgggataactggttagctatatgcataagattgaaactggaccccttcctttcactatatacaaaaattaagtcaagatagataaaagacttaaatgtaaaacctaaaaccataaaaactctakaagaaaacctagggaataccattgtggatataggccctggcaaagattgcatgatgaagacgccaaaagcagttgcaacagaaacaaaaattggcaaacagaacctaattaaagagcttctgaacagcaaaagcaattatcaacagagtaaacagacagccaacagaatgggagaaaatatttgcaagctatgaaaggtctaatatccagaatctataaggaacttaacaaggaaaaagcaaccttattaaaaaggcaaacacttttcaaaagacagactcttttcaaaagacatatacacagtcaatacgtatcaaacatcactaatcattagagaaatgcaaatcaaaatcacagtgatataccatcagaatgaggcaacagaatgctgttattaaaaagtccaaaaataacatgctggtgaggctgcagagaaaaggggcatttatacattgccagtggaaatgtaaattagttcaaccattggaaagtggtttggcagtttctcaaagaacttagagagctactatttgaccccgcaatcccgtttttgggtatataaccaaaggaatataaatcattctgctataaagacacatgcaattaacatgtttatcagagcactatttgcaattgcaaagacatggaataaacctagatgcccatcagtggtagactgaaaaaagaaaatgtggcacatatatatcatggaatagtatgaagccataaaaaagaatgagatcatgtcctttgcagcaacatggatggagctggaggccattaccctaagcaaactaatgcaggaacagaaaaccaaacacttcatgttcttattaaaagtgggagctaaacattgagtacatatagacacaaataagagaatagtagacactggggcctacttgagggtgaaaggtgggaggagggtgaagatcaaaaagctgcatatcacttactatgctgattacttggggtgtataccaaaccccacgacacacaatttatctatagaacaaacctgcatgtgtacccctgaagatgaaagattaaaaaaaaaaaagagcagttgacctctctgtacaacttatctttattttcatttctctttctccctgacagaatcccaaggactgcagcaaagccaaaaagctggtgtgtaatatcaacaaaggctgtggctatggctgtcagctccatcatgtggtctactgcttcatgattgcatatggcacccagcgaacactcatcttggaatctcagaattggcgctatgctactggtggatgggagactgtatttaggcctgtaagtgagacatgcamagacagatctggcatctccactggacactggtcaggtaaggagcttgtgcagcatatgagatctctgggctgtttcactcaattaccagattattagatttctaggtagaccttcatggaacatacttatcttttcctctggatccatgaatactatacattatccagataaaatctagaagaacagtattttatcttaaaagtattttattatgtatttcatttctgatgctcatttttatgtgaatttagcaaaatcactgagtttttttcagggagcataatttaatcttttaataataatgatatgactttcactctataagatgatttcacattattgaactcattttaatatgaagtaatcatcatataaagtagtccagtttatatggactactatatatgagtagcatgagcatgcatgagaatcatctggaaggtttcataaaactccattttctgttaaggaaggtctaggctgcagcctgagagttttaatatctgacaaaagttttaggtttagggaccgtgctttgagaaccactgaggtggaccttgctggtaactttatcttcaaatgaagcctaatttgtttatgtgattttaattgtattcaggaaacatttaatgaatagtaatgtgactaaggtactatactaggcattataagcagatagaaacatcagtaagaaatttcctttctctccaaggaagtggtgaaggagtagaatatagaaaagaatttcttaccgctagtctagtgcttttctttctacaatcatgatctttaagatctaaagttgggctaccttgttaaaattgtggctttattgttttgtaatcttggacaagttacttaacctaggtcttagtttccttatcagtaaaatgaagagtaatcactttattgaattgttggtagattaaatgaaataatatatgtaatgcacttagtactgatatatgaacttatatctagtaatttttagctattatgaatagcctttattcattaaacaaatgtataatgagtgcctacagtgtgacagatactgaattaagtgatcaggataaatactaagcaagacagtacacatcctctgcactcatatcttgtgggaagtccaacatttttcaaaaaactgaggcacttcagttaatatcatttattgtggggctaagcaccttttttcacgagctacaacactagatacgaaatagggagctatgtcatcagcaaagtaactttggttccttcatttcttttgcctcctttgaaaaaaaatcggtaatatctgactctttgcagaagtgtcatgaaacttaattgagtactttctataaaatactttgagttgctctgcaagaggtcctgtatggattaaaagtattgtgttttgtcttctgtagggtgttttagaagccttattttatatatcacccgattttttatttttaactcacttcagattttaaggtgaacctctttatctagaacctagttaagctttagttttaaggttatatcttccactgatctggtctgtacttttcacggctagtgccaacagattagttataaaggttaggaagatactaaatttgtcattcaggaaaagaaactctaccagccccactatggctaacttttttcatttcatggacttagttcagtttaaacttccttgattgtggaaataatagccagggccaaactatgtttccctggttctagggggagacaactttttgtatggtagtcagaaaagtgaaaagttacagatttatcaggtttaatatatagtttagccctgcccgtgtgctacaagtggttatttggtttgtttgatttttaatccttacttgtacattttgtagtcggtagtggcaaccacagggtatgaaaatttaacatggcttgaatttcaaacactcagaatttcttaatgttacaactaaagaggatgtagaaagcatcctttctttattcatctggaatcaaaggcctagttaaggctaaatgacttacccasggtcatacagcttataaatgccagaactctggttagcacattcacttgtacatacccccagtctaagtccttatcagtaaactcatgccaaacactttacctcgttactagcagaataatctaccatcattactagaagaatgatgattagaggcacagaaactgcctggaatatctaggaattaaataattttaataatttagataccaatcttttatctgaaaagagatttcttttaagcttagaatatttttgtttttatgaagagtatggctgccatcaatttatctgcttatttacattatctatatatgtgccctttagagaaactattgaacatatttccaagaattagaggaaatagtgaattttaataagctccttgactttaattctttagttagtcataaatcagctgtgtctgttgtcattctgagttgtacaaaaaatcttgggatatttcctttgtcaccattactgtgaaattattattgttcatacataacttgacatgatgtccttgcagatggaatttagtaattcttgttcaagtctgtccaccagtgcaggaattagtttgtacagtgatcatttcatagctatatcataccttattatggttggtgtctatttttctcctccattattttatgtttgtgtgtgaaactatatcctttgtaccaagtaaaatggttaagtgaaggaaaatactaaaggtaatgcttccagtaaaaagtaatcaaaatatttcccatcacctgtacatgccatgtctattcctaatagtttatgtgccctaaggttgttgatgaaatgatcaatttagttttttacaccacaagatgtttcctcagcctgaactaactacacatactagacctgattcttccacatagattgcttgtgataattcaaaatgggaatcttgcctttatgtttaatagtttgaagtacctttcaacaatatttatttattgttttttgttttgtttttagagacagagtcttgctctgacacccaggctggagtgcgggggcatgatcctagctcactgcagcctcgaactcctgggcttaagcagtcctctcacttcagcccccacagcacctgggactacaggcatgctccatcatgcccagctagttattttattttttattagaaatagggtctcactatattgcccaggctgatgtcaaactcctggcctcaagcagtcctcccacctcagcctcccaaagtgctgggattataggtgtgagccactgtgcctggcctcaacaatttataatttggttttttaaaggatattgackattttaggctatatatgatgactagctttcaaaatgcttttctagcttatataaacaatattgaatagatgatttagtgatagagaactccacttaaattcagttccccacttcaatctttttccttgtaaaaattaaaaattattcaccttaacagttaaactacctaggctgttctgtctttccttctcttgtctttttcccactgtcttaataaatacataagttaaactgaattcttaatatgataaatgtaattggaaaattttatttgtaaatgaaaataatgactagtaaaaaaataatttataaatacgataaagtttgatgccctggaggcgaggtgcctggtttaaatacatgtttaggtagatgaccgtttggtatatccacttatctaaactgaacagttaccttctctccatgcctcatttccaaaaggttttagtcaaagagttttatttgacatccttaaggtttatgtggaggcaaccttgaaataaaagtaattcaattaaagtatttgctatttgctagatacctatgctgtactacatgaagacagacacagtctctttcgtgtaaagggcagtcaagggggaaagatagacaactgaataagcaattaaaatatgttgtgctaatgtggtggtatggttaagactaccctgaagcaaatatctaatgcatatttggggttcttttggaagaaatgatttttaagctgagacctaaattatgagtaggagtcaaccaggtagggacatggtggaagaattttctgtcagtgggcacaacatgtaaaaagacaggcaagagaacatggagtcactgggggaactagtagtaattcattgtaaagcttgaatactgagagactagctaatgtttccttttaaaaacaagcatcacttacaggatttccattttgatggttgtgtattcttgttcttcactaaaactgacaggttttaattcgagagtcaaagctgtttttttgattttggtttagagagtagacagagttataagaaattgatttcagatgacttttttgttatctcataactattaaactgtttattcaaatatctcactcaggtcagaaggaaaatctttagcaagtagaacacaaatgaaattatactttcagtctttcctttgatactaatattttaacctttacaaaactactaagatgtctgttggaatcatctaaatattctaaccaagttgtatccttaataaggattgacgtcaggtagactaatttataaactgatattaagcaataatgtgattaagaatatatagatataatatacatattaggctatagatatgcatatgttaagtctttttacagtagtattttcagtctttgataattgtattaatagaaacttaaaacaagtacatttactatttttgatcccttatgctgcaaaaaatcttgatttctctgtttaggggatctgagggagaggaaggatattagactgtgagtctgatccagttctgttgtttttagctttctgaactttgtgaattaacttagcttctgaacctcagtttagctctttaaaaaactcatgatactcattatctacctccctgtccacctggaatatattattaggttataacctgcaacaacaggaaagttatccttttattctgagatgaaaatcatgcctttataagagcttcatatgtagttttctgtctaagttaaatggaaaagttgaaagaaatacagagaagcaagataacttctgagaataacttctagacattcagaatatctctatgcttaataaacccacaatttaatcaaaataaaattctgggccactcatagagtctctccgcagctacctgaagccttcagcagttttaagtattttttctatctcaacatacctaagatagaaggtatactctttcttatgatagttattctgtgtaattagtgaaactggctttgttgcagcaaagatctggttgtgcaggaggctatttggagagtgagttggtaccacatatagttgaaaagctagctgtctcctctccaagattctagtaggtttctctgccctttacctgactccttttagaatcattaacctaaacaagtatcattgcaggtacataaggacttttgattcaactgctataaaacttttttgttttactacttatgggccacaaaagaaagaaagatctttgcttcaggaatttaaaattccagttagaatatacttaatgtctcagaagaagttaagctgcttttcaccattacatcttctttcatttcccacttaaggagatagaagtctatggtatctcattaaaatctagtgggatcatcaggaaatacaggaatagggaactgaagctttgtccacattgtagccttgacccttgtgagcctacactcttacaattacagatatttattttcgtgtttatcctgtaagtgcttctcagattgagttgtgagtaaacctggggaaagtgaattagagatttgcaacctaccaggataaaacatggtacattttcttggactattaattttatttactggtaggtaagctaaatcattttcaaataataaaacaagatctgtaatggtataaaatgaaaatttgatcaaactccagcccattgattgaggccagacttcatattctcagtagcatgaatttaccttcctctgctgttaggagcattttggtggaaaattttaagaaacaccattctatgagttttttagctgtttatttcaccttgacagagactccatatgggagcaaagcagcaaggtacttctaggttatttaccttctaggttatttacacagtgccaagcgtttgaccagagcacattagatgtaataagagaggccgggcgcggtggctcacgcctgtaatcccagtactttgggaggccgaggtgggcggattaccagaggtcaggagttcaagaccagactggccaacatggtgaaaccccatttctactaaaaatacaaaaaaaaaaaaatcagcctggcgtggtgatgggcacctgtaatcccagctactcaggaggctgagagggaagaatcacttgaacctgagaggcggagcttgcagtgagccgagatcgcgccactgcactccagcctgagcgagagagcaagactctgtttcaaaaaaaataaataaacaaaaaataaatgtaataaacaaaacctgtctccccagatccccatccaaatttcaaaacattacccttctagctatgtgaagcacttttattaaactgtagattttgttttgaaaaaatagtctattaccaagaatgaatcttttaagcaatttattctcccctttttagaaaaggttctggcagaatgagttcagagataaaaggacgtgtgacttaggaaaaagcartacgtatttagcatccacctcactatggagtgtaaactatttcattggaaaagtttctgaaaaatctcctaaagtctatttaggacctatccaaggttgttagagctagagatagaatccaggtgttcttaatttcctgtggggtgtctgggccacatagccttgataactgtctcagaaattatcagtgtttttataaatactgatatacctattatgatagatgtattccttaaagatttggcataaattattacaaattgagtcgtgtttgaaacattccagyggagctagattacaaagtaaataatcttttttctaataggagctagtagtcggtcccctgagtcaccccccacccctccttccttcttccttccctccttcccttcctttcttccttttgtaagtatttgggtttttctgttttcctcagacatacttatgtgaatctttgagtctcagtcacagttgaccttcaactcaaacaccaaagtatagaaaaagaagattgcaatctttcagtagcattttgataacagagtcttgtttgcttaaaacatgtggatcacgttagagtgattctacaaacaagataattgttgacattttgaagaaagtaaagaatgcatcctgtcccttttggttagttttatatgccagagctctgagtatgatgtgaatctgtaatttctttgtctcccttccccaggattatataaattgtaggctaatttcatggaataggaaataataaagtccgtgatctttagtggagttatacatatttttttycctccaaaaggttgttactcagtaagaaagttctatagtggtttatacatcagttccattggaaagaaagacatatttgtgtgtgtgtgtgtgtgtgtgtgtgtgtgtgtgtgtgtgtgtgtgtgtgcccgcgcgcacgtatgtgtgtgcgcatgtgtgtttttaagtaatagactttattactcatgcatttttgttgccttagcagaaggtcaaaagcagattacagaatcataaaccttcttagatgatactttggtatcaggcttctttcttttgttttgcttccccaaatacaaagatcaaaaatattcttagcagttattgaaaataattagagttgagtcttccacctcttcctaaagaggtcctccttttgattcaatttaagtttagtctcctattataagtagccattaaacttaatgcaggttatattctctggaagcaagaaattgcaactagtgatactataagtcatactgattttcccaaaagatatattacaattagagttatcatttttgttcagattttgatatccaactttacttttgaaaaagtacaactgccagcaaatactgtattaggtataaataatgggcacatttatatttataatgtttttaattataaagtttctttaaaaaaaatggatcagtaccataaacagggaagtacactagtcattcagtaaaaatttgaatgtttctagatgccatgggaaatataaagatgactcttcaggaacttgtcattgagtatcatgagacccatacatctgtaaatgtaaaaaaggtagtgtcataagagaggtataaggtcctgtgggccaccagagaatagaaaaactgtttctggctaaagcaatcagagacttcactagatccatgagctgggctcttagagaatgaagaacatcatttaccaggacagatcagtgtcattgatttggagtcagaagttattagctgtgttactttgggtagtgtcccttaacctccctgttctgtgtaccttacagagttgttatgagcattcagagtgataatatatttgacagtggtttatatattctaaatcaccatatgttattattaccactttagttttatgggaacaaagcaaaataacaataatagcatgattgggttatagagtttcagcagggcttcttttaactttaacagccaacattaatgaaactcagagctacttgatggctttttgtgtagccatcctcccaaagagagccagctttggctcccgagctcccctagcccacatgaggatcattctccacttctgttgggttttatttaggttgccctgtaaaaatctcagtgtctaggctgactaaacatcaaaaatatgctcctaatcaaggagctgaccagtttctcttagtttctgggacagggttgccttcttagctagagccatcgctgaccccagtcagagagctctcctgacaaaacagtcttcagatagtctttttaaggtctccaagttgataggatgatggctgggagtaaaggggggtactaggaataaaccattttgtmttggagctctaatatgtatataatactaagagaagcaaaaataggcccctgtgaagcctctactctgtgggagctaatgcttaggaatctgaacataccccaggtaggaatttccacgtaaattttacctaaaagtagaaagggttttttcatttaaaagtctttttttctaaacactgcartggaattgtacaaatcctaaggatctgaatattagaaataaatacataacagtgagggcctttgactgagaaaacatccctttggtatctctctattgactggaaggagctacataatgccagaccagcagagattatgtaagcaaccaaaaacgtagtattgaagcactgcagcatgatcctttcctctctaggttttgggtcttgtatattatatttgaagctattatttagtgcatctaggttctggctaggaatgaactggaacatttcagtgggattttaaggcatggtgaaaaaagtagttgatgaaagagtaaatcaccgtgtttttctttctttgctgccactgcccatcttgctgtgttcactgaaatcaagtgtaggagttggggagtaggttaaatacctgcctctgctgctacatctggcaaatcttgatccatataatttagaattaataataggacattggcaaaaataggcattatactgtatgttcctcttttctagattagatccagtaccaaccatggggccacccaaattgagacattagaatctatacagcaatctttctgcattctttggaaatataatacctagattgaattcagaatatgttatctacattttaaaagttatatggtgtctctatttcagagggaagattaatattttatggcctgtcataaatgaccatcttagaggcacccatttgttttatgtatgcattaataatggaaattgagttcattcaactattgtaatttttgtacatctgtatcatgatttatatattgcctcattgatgagcatgtaaattatttcaagtttttgccattataaacagtgacatagtatctttatgcatatctctttgtgcatatatattaattttcctagggcagtgcttacaaactgtatcacattatactatatgtaaaaattatttttactgcccatattatcacctgggggatggtggcaaagctacagaggtctctgacagtgtgtcacatataaaatcttatgctctaaaaaagggcttgacaaactatggtcctcagaccaaatttagccccctacctatttttgtaaatatggtttcattagaatatattcatgcccatttgttagtgtgttgtctatggctgcttttacactacagtgacagagttaaatggttccaacagaggaaccattgtatatggcccactgtattagtcagggttcttcagacaaactgaaccaataggatatayagtgagatagagcctgaaagatgtattataaggtcagtaccttataattagctcacacagttatcaagtctgagaagttccacgatctgccatctgcaagctggagacccaggaaagccagtagtgtattatagttgaaaggccagacagagagctagagggctgatggtgtaatgattccagttcaagcctgaaggcctgagaaccaggagtgccagtggcagaagacagatgacctaaagatattctcttatgttttcttccagaaactttatagttttagcttttgcatttatgtctatgatctctctagtgttaattttcatgtgtcacataagataagggttaagaccattgttttccgtatttttattcatttgttctagccttatctgttgaaaacttttcccatttgaattgccttggtcccttttgtctaaaatcaatcagtaatatatggatctatttctggtttctccatcctgttcagctgctctatttgtgtctrtccttacactttaaatttttatcagccatcagatatttcacagcatgttgattagaaagctgtacatatgcctagaagtggtattgttaggtcatatgaaagtatacgtttctttaacttgcctacatatgcctaatccctctatggaaaaattatttcagtatctcctctgctctcagaatccttctctttttaatctgtcttccacagtgccatcagaatgatattttcgaaaccaaatatgactttctctcctaaggccttccatggctgcttagtgtatagaaactccttgcttagaatataggatataagctccttcacataaacagcctgcttttcaaaatgtgccctgcactccataattcactagtccacctacaaatgtattccttgaaagttttgtgtacttttactgatmtactgggaacatgtaattcttcctctctagagaatatctttcctccacttcatcccatgaaatcctrtttatcttttagtatcattccctttgtgatatttccctccaattgtccccatgttttcactgtatttaaacagttcatgtttctttgagtatactgtgagttctttaagaagcttgtcctatttatttttgtttcctcattgcctaatactactggccaatacttgttactcagtttttttaaattaaattgtctatgataagcagaatggtccttgaaaaattttaatctccttctgaatctatcaaataaagaaaataccaccttacctatgttattcaaaggtttctggtgaagagcaaatgaagtaataggcatggaaatgtttgaagaatgttttaaaaatgtgatggccttattgttgtttataacaaaatttcactagaattaatcctcttggtttcttacaagctttattatggtggaactttgccttcatatatttgcattggttaaaattatcctaatattaaaagactttaaakatttttatttctaatgtttccagtaaaactgaaaataacttagttaaaaaatatttttgcatttaaaactatagaaaataaggcattttctttataaaatctcagttgtatgtgtgtatgtgagtgtctttttggatatctttgattcagtgaatatactgagtactgctcagttcaggcactatgatcgtgatcacattacagtaatagctaatatttagtgaaccatactacgttactgtgctaagaacatcacatataatctaatttaatattcacaataacccttattatccacattttatataggtaagtaacttgccagaggtagtacagccgctgatacagaaacccagtctgacttcaaaacctgacctttaaatattgtgctcagggatcagcaaactataacacccacagcctggttttgtaaggcctgccatattttcaacaggttgttttaaaaaaaagatgtgacagagacatatgtggcctgcaaagcataaaatatttactatctggccctttacagaaagtgtttgccagcctaaagatggttaaagagagtccctgtaactctggaagctcccaatccaaataggaaataaacacaaacattttaaaagtctgcctcaagaggcaaaatgtggttagtgatgttattataaagatttaaacaagaatcccaagggggccaggtgtggtggctcacgcttataatcccaacactttgggaggttgatgcaggaggatcgcttcagactgggagtttgagaccagctcatcaacatagtgagacctggtctcttaaaaataaatttttttttaaattagctgggcatggtggcacatgcctgtagtcccagctacttgggaagctgaggtaggattgcatgagcccaggagtccaaagctacagtgaactaggatcatgccattgcactccagcctgggcaacagagcaagaccatgtctcagaaaaaaaaaaaggaaccccaagggattggaggttgtagtcattccagccagaaaacttagaagaaatggcatttgaactggttttgaaaaagttgtaaagtgaccagacatcttaggtatagaaatctgcacacccggagtacttggcaggtgatgataaaaatacttgcccatgacatgccaagataccagaactcctgggcattatttttccttctacctcttatttgctgaattatgtagaagagtgcatcaaaacatctgcttcttagtttagcctttagtcagttgtgaataaaaaattggttctgatagttatcttgtatttttcaagtgaatcaaaaacaaatctgatagagggtgcttcagtgcaagttattttttaagctgtaaaaatgtgaaaatggtagtgctttagttaaataaaccttgcattttgtattcagtcttagctgtcattggattggcaaaactgaaaaccaatgtttacattcacagtaattgcaatttttttttttttttttgatacggagttttactcttgtcacctaggctggagtgcagtggcaccatctcggctcactgcaacctccacctcccaggttcaagcgattctcctgcctcagcctcttgagtagctggaattacaggcgcccaccatcatgcctggctaattttttgtatttttaatatagatggggtttcactatgttggccaggctggtctcgaactcctgacctcgtgatccgcccgcctgggcctcctaaagtgctgggattacaggcgtgagccaccactcctggccaggtttcttatttttaggaattcagcatgtaattttataatgcatttgcattaatttgggagaaaaaatgaaaccatgcttttgaagaatattggcaaaagttgtcaagttaagatagaattgcttgttaggaaactttttaattgaattgaggaaatgacacaagattggcattgttattactcaacccttgattgtaaacagtgccaaaaatataataacactaccatgaaagatttatattttgtaaataaagcacacagaaaaatattaaactacattgggagatgcattttctgccaacataattaagaatattacagttaaataatcaaatatttggatattgaggaattttattctcaaagagaaaaaaggatactttatgtggattgaaaaatattccagacaccaaaaataaaagcagaggaggcataaagattccctgattttacagtttgtgtagaatagcatccattgtatgaataatgaatattatgtctatattcatgacatttttttaaaatctgataatagcttcaagctgtttctttttctgaatatcattaatattaatatataatcattaaactaattaatgtgtatgtgggcaaatcactgttccctattctattgtggatatataattgaaattaaatgtttctcatttgaataagtgaaatctcttctttgaacatttttcttagcctgaaaagaatatatattaatgataagtagcaactttggtttctttgttatacgttggtgcagatattttggttggcattgattttatattaaaaatatatatatattttatcgcattttcagtttgataaaaagacttctactataataactataatatacccttaaatatttatcagtacatattcctctgtattttagtagtggaattatctatgtaattgagtgaaaacaggagtaaccacagatgcataaaaaaacacatctgtaaattattgcatttgccatcttttattaaagactgccttgcaattctgtttcacggaaatgaattaccagtaggtctttagartatgctaagatgacgaaaagggaagaaggaattcttctcaaaagatttgaatgtagtctttgagttgtagctaaagaatagtctgaaccctctatctactcatgtcattctttaaaaatagtggaaagaaatggttccaaaagctatattttgaagctattatctgttgtcaagggcaaactagcattttaaagctattgctttgatatggtttagctttgtgtccccacccaaacctcatcttgaattataaccccgaggtgttaagggaagaacctgatggaaggtgattgaatcatgggggcagtttcccccatgctgttcttggtgagttctcacacacttcgtaagcatctggcatttcccctgctctcacttctctcacctgccaccatgtaagacttgcctgttttgccttccaccatgattgtaagtttcctgaggcctccccagccatgtgaaactgtgagtcaattaaacctcttttctttataaattacctagtctcgggtatgtcttcatagcagcgtgaaaatggactaatacatgcattttggtaaaacagtatgttattatccagtttcatgtttaattagtttaatttaaattaatcaaatgccattttgtattaggggccacaggtaagagaaactcacagaaaaggattgttgaatttgtggatttttaaaggccattgctgtctcctttcctgcctcctctctatatttaggctagtgactaccagaaagaaataggaagataaaagctcacacttaaaacaaacaaacaaacgaacaaacttattttacagtcttttatcaatggagtatgagacagcatatttttgcaaagtaccgctccatttcctaattcaaaaaggagatttggacacagttttccctggcagcactgaaataagaatttgctttctctcagtggccgtataaaacagtgagaataatgcagtcaactctctaaattaatttaaagaaatataattgtagatagtttgaaatggtaaatattcaaaaaattaattttccttcactttggacagttgtatgccatgctattgtaggttaaccctattaccagaaagggggtcccaatccagaccccaagagagggttcttggatctcacacgagaatttggggcaagtccatagagtaaagtgaaagcaagtttattagtaaagtaaaggaataaagaatggctactccatacgcagagcagccctgagggctgctggttgcccatttttatgattatttcttgttacatgctaaacagaaggtaaattattcatgaattttctgggaaaggggtgggcaattcacggaactgagggttccttcccattttagaccatatagggtaacttcatgatgttgccatggcatttgtaaactgtcagtgatgctggtggtagtgcctcttagcatgctaatgtattataattagcatataatgagcagtgaggatgaccagaggtcactttcctcaccatcttggttttgatgggttttggctggcttctttatgcaagttgttttatcagcaagacctgtatcttgtgctgaccttctgtcttatactgtgatttagaatacctgacctcctgggaatgcagcccagtaggtcttagcctcattttacccagcccctattcaagttggagttgctctggttcagatgcctctgacaactccagagtagagaagtggtgaacagaggccacagaaatgatgagcagtctacctaccatgtggagaagacacctcagaaatggagagattttatatttttgttgcatgatggtaaacagctgtaaccaccagcttggcctttttggcagctggctttatttagcattttaagctttaagtttgcctctggtgcctggaattgttcaattaaaattttaaatttattcttatcatcctctaacacaaagcttacttatacaataccaaatctagcctgagacacttgttcttgaatcgattcttttttaaataataagttcagtatgaaataaatctctgctgaaatgaaagaaagcacccattatcatggaactgtggttcctgaaagctacttaggtaggttaatagttgaggcctattaatggatatgccatattattacattaaagccattctcaatgaaggattaaagttgttagttttaagagttgtttttgttttgttaagaacagtttgtacaatgattgatttttgtcaaagaattgaaaatgccatctaatacaggtagggagaggaggttgattgtcagtttgatttaagtcttaaaagttcatcaattagcaaagaacaagaaactgtttttttaagagggcaaattttatgtatctgtttaccatgaaagagaacttaagagaagctgtatttccacttttatcaaattagaacctttatgtcaatattaaccagaaaatccttagttacaaacttgaaaacatctatacttaaggacagttgttctgttcattcaaacagaacaagtttcttcccaggttgagaagtcttaggtaacctgtgactcatgctttaattttaaactacttcttcatatggcctttcagttgaactaaaaaggccttagatttagtagaatggactctttgtgtttctaatttgtgataagtttggcctttgttagttggttagaggtttccttgaatcattccaggactagccctctctttagtcaaagagaaaaccttttcccatccttaataattttaccagttactaggtaaatcattccaggactagccctctctttagtcaaagagaaaaccttttcccatccttaataattttaccagttactaggatatcatccttttttacttttaatctttaaagagtttttctcagttattctttccagaaaatcacatggtgaggtatcattatttttaattaacatagaactgaagaaaaaaagagagattgtgttaattggacagtagtgttagggatcagaattttctggatttaattacatttgtatcatattgtcattttggtgatgccaaatctgtttatttagcataatttcctttaaataaaacttttaagtttaaagcaatgaacacctattgctgaaaaacccagaaagtacagaaaatccaaaaataaaaataccacttaaatatatatgtgcatatctatatgtattctttttggtcggttttgaatgaatatatttttaaatattagagtttatttcttagagcagttttaagcttatagaaaaattgaacagaaaataagagttcccctatataccccccactccccctaccccctgcaccaagtgccagccatgacttattctccccaacctttttaagagagtcccactctgttgaccaaactggagtgcagtggtgcgatcatagctcactgcagccttgaactcttgggctcaagcagtcctcccacctcaaccacctgagtagctgggactataggtgtgctaccatgccttgctaagttttaaattttttgtagagacaggtcttgctatgttgcccgggctggtcatgaactcctggcttgaagcagttcttttgcctgggtttcccagtgcactgggattacaggcatgagccaccatgcctaaccctctattattaatatttgtattggcatggtatatttgtcataatcagtgaagtgatattgatatattattaactgaaatccatagttcacattagggttcactttgtgctgtacaattctcttgcttttgccaaatgcataatgtcatttattcactgtagcataatcatacagaagtttcactgtcctaaaaatctcatgctccacttatttatccctccccacctgccttgccccttaacccctggcaaactaatcttttaaatctccacaattttgctttttccagatgtcatatagttggaatcatacattatgtgttttttttctgactggcttttgttttttttaaggttcctacatgtcttttttgtaactttacagctcatttctttttattgctgaattgtactgtattatatggatgcatcacagtttatttatccatttaacaacagttagttggtgctggaactggacatccacatgccaaaaaaaaaaaaaaaaaaaaaaaaaggcaggggagttgggattagacactgaccttatacctttcacaaaaatgaactcaatatggatcatagatgacatcttgattgcttccaattttttggcaattttgaataaatctaatgtaaatatttgtgtgcaggtgtgtgagtgggcatacattttcaactcacttgggtaagctgtagcagtgagattgctggatcatatggcaaaactatgtttagctttgtaagaaactgccaaattatcttccaaaacggctgtctatctaggctgttataacaaaatataaactgggtagtttaaacaacatacagttttggtgagggccttcttcctggtgtttaccttcgcatcgtggagagagaaaattctgtgtctcttcctcttcttctgagaccaccaattccatcatgggaactctaccttcattatctcatgtaacttaattacctcccaaaggccccatctcctcataccatcacactggaagttaggacttcaacatatgaatttgaggggagaggagggactcaaacattcagtccataacagtgattataccatttggcatttgcagcagcaatgaatgagagttcctatttcttcacatcttccccagcatttggtgttgtcactatttcagattttagccattctaatagatatgtggtagtattctgttttaatttgcaattcactagtgccatacagtgttgagaatcatttcatatgcttgtttgtcatctgtacatcttctttggtgagatgtctgctcaggtcttttgcccattttataattgggttgttagctttcttactattaagttttaagggttctttttatattttggaaagagttcttatatattttggttataagagttctatttatatataaagttgagttgagttggatataagttctttcatctgtgggttttcatttcattctcttaactatgtctcatagagcagaggttttttgtttgtttgtttgtttttttgttttttgttacagagtctcgctctgtcgcccaggctggagtgcagtggtgcaatctcagctcactgcaacctctgcctcccgggttcaagcaattcttctgcctcagcctcccaagtagctgggactacagccacatgccaccgtgcctggctaattgttgtatttttagtagaaatggggtttcaccatattggccagactggtcttgaactcctgacctcgtgatccgcccacctcggcctcccgaagtgctaggattacaggcatgagccacagcacccagccgagcagaggttttcaacttcactgaagtttaacttctcaattgttttattttatggattgtgcttttggtgttatatctgaaaactcattgccaaatccacagtcacctaaataatctcctgtgttatcctctagaagtgttacagttttgcattttacatttaggtctgtgatccatgttgagttcatttttatgaaaggtataaggtcaatgtctagattctataccctgtttttgtttgtttgtttgttgtttttgcaagtagatgtctaatttttccagcaccatttgttgaaatactatcttttctccrttggattgcctttgctccattttcagagatcagttgaccatctctrtgtgggtctttttctgggatcttctgttccattcatctatttgtctgttttccaatatcacactgtcttgattactttatatataaagtaatcttcaaaaaagtctttgaagtcaggtagatcagtcctcttactttgttattcttcaatgttatattaactcttttgggtgttctgcctttctgtataaactttagaattagcttattgatagccataaagtaacttgtcaggatttcaattgtgattgtgatgaatttatatataaagttgagaaaaattgacattgacaatattgagtcttctatccatgaacctggaatagctctttatttatttagattttctttggtttctttcttcagttttataatttttgtcatatagagctcataatgtattttattagactttaacttctgtcatccctttatctctctctctctctctctcattctcgtgctaatgtaaatggtggtgtgtgttttaaatttcattgcccattggtggtatataggaaaacatttgactttttttttttttttgaaacaagagtctcgctctgtcacccaggctggagtgtagtggcgtgatcttggctcactgcaacctctgcctcccgggtgcaagctgataatcctgcctcagccttccgagtagctgggattacaggcgtgtgccaccacaccgggctgattttcgtacttttagtagagatggggtttcaccatgttggccaggctggtctcaaactcctgacctcaggtgatctacctgcctcggcctcccaaagtgctgggattacaggcgtgagccaccacgcccagccacatttgacttttgtatatcaaccttgtatcctacaaccttgatatagttacttattagttccagcaggggttttttgctggtttttttggggggtggaggggcaggggcaagttgcmaactcttgggatttcctacataaatgaccatgtcatctgtgaacaaagatagttttatgtcttccttcccaatctgtataccttttctttctttcttttgtcttattccattgacttctgctactgactgattccttttatttttagtgttacgtaggaatggtgagaggggccatccttgtgttgttcccaacttaggaagaaggtatcaagtttctcaccattatgcagtttgctagctgtaggctgtttgtagatgttctttcttgctgagagtttttaatcatgaataggtgttggatttggtggactacttttcttgcatctattgatattattaaattatttatctcctttagcctgttgatttgatggactatcttgattgatttttcgatgatgaactagcactggatgtctgaaataaattccaattggtcatagtgtataattctttatttatttatttatttatttattgatcattcttgggtgtttctcgcagagggggatttggcagggtcataggacaatagtggagggaaggtcaacagataaacaagtgaacaaaggtctctggttttcctaggcagaggaccctgcggccttccgcagtgtttgtgtccctgggtacttgagattagggagtggtgatgactcttaacgagcatgctgccttcaagcatctgtttaacaaagcacatcttgcaccgcccttaatccatttaaccctgagtagacacagctcatgtttcagagagcactgggttgggggtaaggtcatagatcaacaggatcccaaggcagaagaatttttcttagtacagaacaaaatgaaaagtctcccatgtctacttctttctacacagacacggcaaccatccgatttctcaatcttttccccacctttcccccctttctattccacaaaaccgccattgtcatcatggcccgttctcaatgagctgttgggtacacctcccagaccgggtggtggccgggcagaggggctcctcacttcccagtaggggtggccgggcagaggctcccctcacctcccggacggggcggctggccaggcggggggctgacccccccacctccctcccagatggggcggctggccgggcagaggggctcctcacttcccagtaggggcggccaggcagaggcgcccctcacctcccagacggggcggctggccgggcggggggctgacccccccacctccctcccggacggggcggctggctgggcggggggctgacccccccacctccctcccggacggggcggctggccgggcggggggctgacccccccacctccctcccagacggggcggctggccgggcggggggctgaccccccccccacctccctcccggacggggcggctggccgggaggggggctgaccccccgcacctccctcccggacggggcggctggctgggcggggggctgacccccacccccctcccagacggggtggctgccgggcggagacgctcctcacttcccagatggggtggctgccaggcggaggggctcctcacttctcagacggggcggctgccgggcggaggggctcctcacttctcagacggggtggttgccgggcagagggtctcctcacttctcagagggggcggccgggcagagacgctcctcacctcccagacggggtcacggccgggcagaggcgctcctcacatcccagacggggtggcggggcagaggcgctccccacatctcagacgatgggcggccgggcagagacgctcctcacttcctagatgggatggtggccgggaagaggcgctcctcgcttcctagatgggatggcggccgggcagagatgctcctcactttccagactgggcagccaggcagaggggctcctcacatcccagacaatgggcagccaggcagagacgctcctcacttcccagacggggtggcggccaggcagaggctgcaatctckgcactttgggaggccaaggcaggcggctgggaggtggaggttgtagcgagccgagatcacgccactgcactccagcctgggcaccattgagcactgagtgaaygagactccgtctgcaatccaggcacctcrggaggccgaggctggcggatcactcgcggttaggagctggagaccagcccagccaacacagcgaaaccccgtctccaccaaaaaaatacgaaaaccagtcaggcgtggcggcgcgcgcctgcaatcgcaggcactcggcaggctgaggcaggagaatcaggcagggaggttgcagtgagccgagacggcgagatggcagcagtacagtccagcttcagctcggcatcacagggagaccgtggaaagagagggagagggagaccgtggggagagggagagagggagggggagagggagaataattctttttatacattgttaggtttgatttgctaatattttgttgaggattttgcatctacattaatgagagctattagtctgttttctttctcatgatgtctttatgtggttttggtattagtgtaatattagcctcatagaatgatttaggaaggattccttctgtttctattttctggaagaaattatacagaattggcatcatttgttccttaaatgtttagtagaattcaccagtgaaactatctgagtgtggtgctttctcttttggaaaattattgtttattctatttctttgatcaatatagagacctattcagattaccaaattctccttgtgtgaattttggtagattggatctttcaaagaattggttcaattcatgttagctatcaaatttgtgggtacagtgttatccataatattcctttattatcgttttaacgtccacgtgattagttgttgtggcctgtcttttatttctaatattagtaatttgggtcttctccccttctttctcagttagcctcactagaggtttmttcattttactgatattttcaaagaactagcttttcagtttgttaattttctctgttgtttttctattttcagtttcattgatttcttctgcttactttggatttaatttgtgcttttttctagtttgctaatatggaagcttagataattgggtttagctttttcttccttttcattatgtgtattcagtgctgcgaatatacatttaagtaccacttttgcagcgttccacaaattttaatgttttattttcatttagtttaaaatattttttatttcttgacatttctttgattcttgtgttataaataacacaaagtgcttcagctatctttttgttaatgatttctagttccattgtggtttgagagcatactttgtatgatatctgttcttttaaatttatatttgacccagccatcccattactgggtatatacccaaaggactataaatcatgctgctataaagacacatacacttgtatgtttattgtggcactattcacaatagcaaagacttggaatcaacccagatgtccaacaatgatagactggattaagaaaatgtggcacatatacaccatggaatactatgcagccataaaaaatgatgagttcatgtcctttgtagggacatggatgaaattggaaatcatcattctcagtaaactatcgcaagaacaaaaaaccaaacaccgcatattctcacttataggtgggaattgaacaatgagaacacatggacacaggaaggggaacatcacactctggggactgttgtggggtggggggaggggggagggatagctttaggagatatacctaatgctaagtgacaagttaatgggtgcagcacaccagcatgtcacatgtatacatatgtaactaacctgcacattgtgcacatgtaccctaaaacttagagtataataaataaataaataatttgttaaggtgtgttttgtaggtcagaatattgtttagcttggtgaaatgttccctgtgaactcgagaagaatgtgcattctactgtggctagatgaagtattctataaatcaattagattgatggtgctgctcagttcaactgtgtctttaccaatattctccctgctggttatgtcaattactgatagacaggtattgaagtctccaagtataatagtgaatttgtatattctcattgcaattctgtaagtttttaccttatgtattttgacagtcagttgttaggtgcattatacatattaggtataattgtgtcttcttggataattaaacctctgtcattatataatgctgtctattgctgataatttttttgttttttgttcatttttttaaaaacttttttattcaatattagagctcaggtaagatattgctgataatttttcttgctctgaaatctactttatttgaaattggtagagctactctagctttcttttgatttgtgttagcatggtgtatttttctccaaccttttacttttaacctatgtgtatatcttcacatttaaagtggatttttgtacctaacatatagttggtcttcttttttttttaaatccacttggacagtctctgcctcttaactggtgtattttgggctatttacatttaaagcagttattgatatagttgggttgtttctataattgtggctgttttctatttgttgccctatttttgtgtccttttttatcttcctctagttttctgccttctctggttttaatgggtcattttataatgattccattttttattatgtcttagcatatcagttataacttcttctagtgtttgccccagagcttgcaatatatatttaccacaaatccaaatccactttcaaataactttatatatcccttcatgggatatataatgccaagaccttataacagagtattcctaatttctctctcccatcccgtaaagcattactatcattcgtgttagttatccataagctatgatcaccaaatacattgttgctagtattattttgaatacactgtaggtaaattaagaacttaaaaaagatttcatttatacctctctaacactcttctttatacatatttgagtttatgatctatataattttccttctctctgaagctagcaacaaatttcctgttttgtttatctgagaaattcttaattatccttcaaaagtgaaggagaaatactgcagaatgcagaattctaaatgggtggttttattctttcaaaggaattcaaacatctttattctattccactctcttcttgcttgcatgattcctgaagagaaggcacatgtaaatattgttcctctctagataaggttcctccagcccagcgtttttcaaaatttttttctgactttttgcagtttgaatatgttattcttaggtgtagttttatttctttggggttttttgttgttgtttgtttgttttttgtatggatacttgatgttctctaggttttatagatttgtggttttgtgtctctcattaattttggaaaattctcaggcattattatttcagtaattttttctttttctttcttctcctctggtactcccattacatgtatgtccaccttttgtaaattgtcccacagttcttggatattctgttccattcttttaattcagttttgtaagtttatgttcacatatctttaagctgattctttccttggtcatatccaacctactactgaggccattaaaggcattcttcatttctgttatggtgtttttttatttttagcatttaaaaaaaattttttttccttggagtttccatctctctgcctgcattactcatctattcttgcatgttgtccatttgtttattattaggtttttagcctattattcatagttaaattcccagtctgttacttgcaaactctctgtaatatcggagtctggttctgagggtttgtatcttcagactatattttttgccttttagcatgccttgtaatgtttttattgaaagccaaatgtgaggtattggataaaaaggaactgaagtagataggctgttagtatgaggttttgtgtttatctggctaggagttggggtgtgcttactgtagccatagctatggtatcagatgctaaaatttcttctagtgtccttgtttttgtctcccttgtctttaggccttttagagactcctgaaataggcagttcttttagctgcaatttctccttattgttcatcagtcttattgatgtgatggtatggtttgtggggaggaggaagtgttccgtagtaatatcattaggtctcagtcttttagtaaacctgaattgggtatttctcttccccctggtgggttaggctttgataaaactccagtagattaagctctggtaaactagttttcctttaggccatgcgttgttaaggatctgttgagtatgaattgagctaaaacgtgaaaattctctggaactgaagaaaagtacaattatgttttattataatgatagtaatcatcacaaacagctataaaaaggaatatgaggccaggtgcggtggctcacgcctgttgcctgtaatcccagcactttgggaggccaaggcaggtggatcacctgcggtcaggagtgaggtgggtggatcacctgaggtcaggaattcgagagcatcctggctaacatggtgaaaccccatttctactaaaaatacaaacaattagctgggcgtggtggcacattcctgtaatcccagctactccagaggctgaggcaggagaatcacttgaacccaggaggtggaggttgcagtgagctgagatcacgccattctgagatcacgtcattccactccagcttggacaacaagagcgaaactccatctcaaaaaaaaaaaaggaatatgaaaataagttggttttaaatgtaatgtttaatttttgtaacttctgttattataatgtgtagaaatattccaagtgagattcttataaatgaatttcaatatttatttcaatatgaaatctacaaaattctgaatggagggacagacattctagcaataatacatgcctagcataatttcatctggctctgtacttcatataaaaattaaccataacttcttacattactgaataactaaaatatagattctataatgtttatcgaaatgctcaaagatcattctttgggtccaggaaattagaggcaactgcctggaaaagtgtacagtaaaataataaaattaacaaaaacaagaataatatctcttttcctgtcatgtactatttcggtagtatatatttatgaaatagttgatgggtctgaggcagaagacctatgtatttctgaagtattgtgcaagcagtgagaagaatagaagtgtccatgtagcttagcaagtatttatattccctttttgtaggtatttgaggtcttaaactattatctaagaaactgttaaagttcttaaataaaggtagaacctgagtaatattaacgttttgcatcgtaaagtaataaaactgtggcatttgcaaatctcaaaaattaccaagaatgatgcagttgtgatgctggatggtaggctcatctattgtctaggtaagcgatcatttcctatagcaaactgtgggatccctgttaggtacggcacgttatattattaagtttatttattcaattacgcatttattttgtgctttttatttgcctgcaatagtggtagttactaaggcaacaaaatgaataggtttatgtttatgtccttgttccagacttatgggggagacagatacacataaaaacatgcagtttgctaaatgcaatgattgagatacctctgagagttaaatttctgaaaattttaattcctgaaagccaaagattttctgtaccacttctgtgtggagtacatatcaaatgtcgggaccagggatactaattattaactctccacagcccatctaatagaatctatttgaggaatacacctctcgctgtcttgtgtatgtcatgtaaacactccctcccttctacacacacacacacacacacacacacacacacacacacacacacgcccatgcagaaacacatgcccattcacacctgttcctaaccctgggaaactaatcctttaggctgggctctgccaatcaaattccctgtttagaggtaatgtaacctggtagttgtgctctccaactctggagtctgactggtctggattctgactccttcactggtcatctgtaagtgtacttgccccataggattgttctggcaattaaaagaaataatatttctaagcatgtagcacactgctcagcacatggtcttagtgttagaatcattacaagatagggactctagtttacatggaggtgagactragctgtaaaatcttgtagactgatgctgatacctacaaggtgggctgtgagcaagagataagtcacttagcagaaaggagagtatagcagacccacccagaccccacagccacatagaaatgggtaagaattgcagatttctcattgcgggaagatcagttatactttctgctcttcatctcttggcaattccattgtattctttcagtaatctttcttttcatttgagctaatttgtctaggtttttattccttacaaccagtgaaccttgactaacaccattctcaaagaatatttactggttttttttatataggttagaggaaataatcatacgcaagttacgttccatgtagtactaacttctgaactccagtattctttatgaattatatattctagtctaacccagcaggtagcatcatcaggcataagtaatattctgtttttcctcttcttatacttttctggtttttgtggtatatctacctcttatctccaatactgcaaggaaaagaaataatttgttggtacactaagaaaatgcatcctttagagccaaaatgtaacataatctgattatgttgtatatgttgtttcctgtgcactgaagcctaagaagagcattttgggttatatcactgattcattccattcactactctgattaacagtgattctcagtgactttgtaggacatatggttgccatccatgacatcaaggcctgaatattcatattttcccccaaacatttcatctctgactttcatattctgttgtgacaattagttctgtaagaattttacatattgtataaaagttttattttacatgctcttaaactactttcttttctttctttctgtttttttttttttttttttttttttttgagacggagtcttgctttgttgcccaggctggagtgcagtggctcaatcttggctcactgcaagctccgcctcctgcgtacacaccattctcctgcctcagcctcccgagtagctgggactacaggcacccgccaccacacctggctagttttttgtattttttttgtttttagtagagacggggtttcaccgtgttatccaggatggtctcgatctcctgacctcgtgatccgcccgccttggcctcccaaagtgctgggattacaggcttgagccaccacacccagcctcttaaactactttcaatgaaagggtcctagttctaagatttaatgaacacattcttgaacccccatccaaatatttggatttttgtaagctttgaacatactgcctctcagcgttcatctttttagatagaagagaatcatcctattgtcatttggggggatcaccactcttttaaataaaatgatttgtcttctttattagaccattctttgatctgcagtggttgaaccacacatatttatacataacacatcatgtatgtgtgtccaacttagtgatctgttgaattaactttaaaatcattttgcgtcccctctaaaagttctttctctaatctttttaatcttttataaatttcactgacaagaataatgttaattttaatgataatcagggctgaaatttatttctgaaaacataaaatatttgtattcatgttgtgattcattttggataccatcaggtgttatatcccaaattttggatcatatcatcaagagtagatactttaatttataaggtcttcatgagtaaactgaaattttttatccctaattatgtcacttaagaaattaaaggaggaaatatatttaaggacggaagcaaaatgtgtgtgctttaatgtttaatggttggaagtaagtgtttaaatagataataggaagaggagtttacaagtttaataaacctctttgtgataaatttgctcctgggttttctgtcccaaagtaggctatttttccttcatggaaagcttattacgtaattttacataattattagaaaatacgactgtcacaggacagctgattctcattctctaagggtattattaactcttaaccatgagctttaagataactaaaatgcaccctaaatgtgtcatacaaataaattaaatttgagataagctgtctttagctattatttttctttctttggggatcccagtatgaacccaaaatgacaatttatgaagttgttaagccacaattcacatccactaattgctttatatggctatacatgaygatgcatgtttgaagtttatatcatttatgtaaattcctagatctagtacacattatagagaaaaatctgtatcttacccataggaacttctctagagcccctccttttatcatgctatttaaactcacacctggagtagccacctcgcctctccctttgttattccatgaagagtcattttgagtctcactgaaactatgataatggagtgggaatggaataggactaaagattctggaatcagaatgtctgggttcaactcctgtctctgactcctagctgagtgaccttaaataaggtgcttaacctcagctataaaatgggaacaagaggccgggcgtggtggctcacgcctgtaatcccagcactttgggaggccaaggtgggcggatcacctgaggttgggagttcaagaccagcctgaccaacatggagaaaccctgtctgtactagaaatgcaagattggctgggcatggtggcacacgcctgtaatcccagctactcaggaggctgaggcaggagaatcgcttgaacccgggaggcggaggttgctgtgagctgagatcatggcgttgcactccaacctgggcagcaagaacaaaactccatctcaaaaaaaaaaaaaaaagggaacaagaaagtacctcatcacaactttgcggattaattgagataatgcgttggaaacatttagtatagtaccgcgcatacagttggttctcaataactgttagctcttaattccagttgctaatagagagctgggacaaggaggtataaatgcagcggctatgttagaagcatcttatagcatggctcattgagaaaaggtgaagtagtatatggaaaaaaaggagtctggcccttcatccctgccagaatctttatgacctcagatgaatataggagtatcgtaaaatgatttggagctaccaggtaagatgttgtggcctactgataaataactgtctacaggttgaggcgtgtgttacatagggtagaaatttttgtggtttttttttttttaaacagagttttggtgtgtcgccaggctggagtgcagtggcaccatctcggctcactgcaacctccacctcccaggttcaagtgattctcctgcctcagctactcagcctcccaagtagctgggactacaggtgcatgccaccacgcccagctaatttttgtatttttagtagaaacagggtttcaccctgttggccaggatggtcttgatctcttgacctcatgatccatctgccttggcctcccaaagtgctgggattacagacgttagccactgcgcccggcctagggtagaaaattttaagtaaccttctaggcgaggaagtggcagaagtcttcctttgtaaattctagtccaagttctaaagaaagttgtcatgatactgtctttgttttaagctcaaatgagaaattgtatgagaaacataatgtcaagtatcaaatctgtacaaagcattgtcttttaaagcaatggcaagccaaagcctacttcccaccatatcagacatctcctccttgccctgtttgctacatgtatcttcttccytcctcccacttgcatgctctgttagttaaggtttcatgccttttgcttcatagttctttttcttcatttatggatatcccctcttcttcccaattaaacccaaaaggataaaatatagccatttttttgagtaatacctttacactatttgtttcagctatgccaccagaagctatagattgtaaagtattaattagctctctttctagagattttacacagcgcaaaaggaagggagagtggagtgacctatgtcagatcatcagtagcagtgacagtagcagctgtggtttggcacataagaccatactccacaccccatcatctttcttccacaatggaagcagaggcagctggggaagaagatacattgtgcagtctgagatggcagcaagagttaaagatgggagtgtgatggtagggtgaccgttgaagctactggtactttttagattggtggaatttatgatactagggagatttgctgctccagttcctgttttagtaggctaagatgtacgtctgttttatcagcaatttgtacagcactttagctatgcaatactaaattaagctatacagtgttacactaactgccctctttcctcatattccatagaaatcttaagtgttttgtktttgcttcctttaacatgactctgcgttttcattttcttctcttacgatgtggccagaatttctacttaataattcttatatcttagggtattgacctttacgtataatgaagaaacccaataggtctccctgatttaacataattggatgataatttagcagaaaaattacaaatagccttaaagccattgtgaaacatctcattcgtaactcctcaagtatgctaattacagaggcagctgtaaaattcacccagagcaaaaaggaatccagtgtgctgactgacagcttcatcctgcgagatcctgatggcatacctgcttattctagtcgtttctttcaagggggcatgacatgtagtgaaggaataaggggaacttaagagtggaattgtgattttttttttttaaatagggcaatggaggaaagtgaggctggaatttagctcttgggtaaatttgatgaaattaarccttgccttcctactgctttctgttcctatattcttgtttcttgccaatgaagagaagctgttctagtatctttgtgatcctttgagccggaaggaggttctaagttaggagaaagtactaacttatttaaaaaaaatagaacaaacaaaaaaactccctcaaacgtctagccatggactcatagggtcttatgaatcatcaaagagactgttggcagtatcccctttattagcaagctgtctgtagtctgcaacttcttggcaaagcaacttttatatgtttataagttaaatggctaaatttgttttagaaatattaagagtgacttcagggagccttctgtttagtggcatgaagcaaacaaatctcttttgtcttttttcttttgacactgtcctgcctgcctyatcctgaactgcataactcactaagatattacctgttttccattagccattcttttagtccccaacccagagttaagtctgtcagaatatcattgagatcagttaaccataagtttagctgcctttgcaaggcatgtctgttgctattaaaagcagcaggcacctcatgagaatgctgcccagtcattcccagagtgtgatatgctaattcttaagaatgttgctaacactgcactatgtttcatatgattcaatttagaactttttattcaattggttggaggcttcaagttgacagtaataatagtctttcaagttgttgactaagtagagcagtgatagaattcatatgacatagaattcatatgacaggccatagttgctcattcaagtccaagaagagatctctacaggccacagtggctgaaaaacaacaggaaagtagcctagatgttcactttttaatagtataacatatctttcctccctattttaagtgaaaacagatctctgtcattaaatgaggatataaatatttatgtcatcattgttgaaatcccaaagaatagaccttacacatttctgtgttcattttaaatggccgtcttttgtgtccaagttaaatttaaaaagctccctcatccctctaaaggtctcaccatagctagttagctttcagccttgatctccttttactcttgcctcctctaaaaactttttgatagttctctaagaacctaatcggagtcatacttggcaatacactgttaaagaaaatgtgtatcctagaagtccagatagtctttgtagatataaattaaacatacaaatcccttgctgtaatatgagcagaaagtgttactgttttagacaagtagctgctattctgtgtttcagtacagaacagggttttggtcaaatcaaggtagtgatgacagaatgtcagaacttcacggtagctaggagtccctactcttcattgtagtcatttattgaatattttgaaaaggtaaaaactgctcattgttttattgtctgtggtaaacagcatgaattagatatactttgggcataaagtgctcactgaaatggggtcctttcatatatttttcagataatatgatattttggcaaataatctcttcctagatcaaactatagctggcttattgagaattgttcagcagaatcgtccccaaaataaagaactaacattttctgagaattactttgtgtcagccattgtgctaagctttctacatgtaacattttatttcatccttaaaataacttaatgagtaagatactattatcagtcccattttatagatgagtatggtgctaatattaatgccattttccagatgaagaaactgggatgaagttaaatataacttcttcaaggtcacacaactggtaagtgatagaggatttggacaccagtttttgtgattccaaagcccatactctcagccactacatgctacagtcaaagactgcatgcataggcatttgccttagtatattttgcttgatgtgcctctctgctccagcctccagcaagactatgggtttcagcgatctcccctttgctaagggcagataagagtgttacctgtccttagtaaagagaatgaatgaccttataaaacaggattattaaccagaggagtgtcagtccgtttgggctgctataacaaaatactataaactgggtggcctataaacaacagcaatttatttcttgcagttctaaagactgttggcaccaacagattcagtgtctgatgagggcctgcttccttatgggtgatacttttttgctgtatcctcacatggtagaaggggcaaacaagttctctggggtctcctttaaaaagttattaatcccattcatgagggttttgcctgctcttatgacttaattacctcacagagacctcctaataccatcaccttgggaagtagggatttcagcatatgaatttggggggaaaataaaaattcagaccatagcatggagacagacttgaaaatgttcctgaaataatcagtaataaccatattaattcatgttgaacggggctagtttgtactgattctttataaatgtatagtgctaacttatgtgtgatttttacatatgaaacgttttcttgctggaaggttggtatggtgtattcttttagagccttaaagtcttgatggaatggcagggctctcttgattaaactggccatacttaaattattttttaaaaaatatagattccaaaatggctgaactaatttacattcccaccaatggtgtacaagggttccctttcctgcacatcctcgccaccacttattattgtctttttggtaatagctattctaacaggtgtgaggtgataactcattgcagttttaatttgcatttctctcatgattaaagagcatttttttccatctatctgttgaccgttagtatctcttcttttgagaaatatctgttcagatcctttgcccatttttaaattggattatttgctttcttgctattgttgtttgagttgcttattattatagatattagccctttgttgggtgtatggcttgcaatttttttttccaattcatggattatctcttcactctcgttttctttgctgtacagaacgttttattttgattcagttccatttgtctatttttgcttttgctgcctgtgcttttagagttctttccaagaaattgttgcccacaccactgtcatgaagcttttcccgttttcttcctatagttgtatagtttcagatcttaaagtcttataaccattttgagttgatttttatatatagtataaaagttcagtttcattcctctgcatatccagttttcccaatactgtttattgaagagatgagcctttttgcattgtgtgttggcacctttgtcaaaactcaattgaccataaatacttgggtttatttctgggctttcagttctgttccattggtcgatatgtctgtttttatgccagtaccatcctgttttgattacagtagctttatattttcaaatcaagtgggtctggtgcctccagctttgttctttttgctcaagattgccttgactatttgggttttttagtgaattcatacatatgttaggattgttttttctatttctgtgaaaaatgacattggaattttgatagggattgtattgaatctgtagattgctttggatagtgatacggttatgctttacatccccacccaaatctcatcttgaattgtaattcccataatccccacatgtcaagagacctggtggatgtaattgaatcatgggggtggtttcccccatgctgttctaatgatagtgagttatcacaagayytgatggttttatcaggggctcttccctcttcacttggcacttctccttcctgctaccttgtgtagaaggtgccttactttcccttcgccttcttccaggattataggtttcctgacgcctccccagccatgctgaactgtgagtcaattaaaccttttttctttataaattaccgaatctcaggcagttctttatagcagtatgaaaatggactaatacagataatgtggacattttaataatattagttcttccaatccatgaacatggtacatctttttttacttatttgtctttttaatatcttttgtcaatattttataagttttcagtgtatggattttcacctccttggttaaatttcctcctgttttattttttgatgctattgtaaatgggattgtttccttaatttccttttggaatagtttgttgttagtgtagggaaacactattgatttttgtatattgattttgtaacgtgcaactttactgaatttgttcattagttctgacagttaaataagccagtcacagaaagacaaacactgtataatctcacatgtgatatctaaaaacgttgatctcataggaagagtagaaaggtgataatcagtgcctgctgcggtcgggggatggtgtgggaggggatggggaaaggagagatgttgatgaaagggtacaaagtttcagttaaactgtaggaataagttttagtggtctgtggtactgcatggtgaccacagttaataataatgtatatttcaaaattgctaaaagaatttatttctaatgttctgattacaaaagaaggatacgttggtgaaataatgggtatgttaattagcttgatgtaatctttctacaacgtatataaatatcaaaacaccacattgaaccccataaaaatacatatacaattattaattttcaattcaaaataaattaaaacaaaacaaatatgtaggtttcataaagtaggatgtagtataagtaatgagtaaacactagggtctgatcttggccgttttattaacaatattacctttgagaatttcttttaatctctcttagtctatttcctctgtaaaatgaaagtttgaataaacctttgtttcccaaactctgaaagattactagagatgattttaggtggcatatgagattactttaggcagtgccttgataaaacattaaaataaacattgaatcacatagtaagaaagttactcctttttcaatctttctgattacatcaaaaagaaagtctcagtttggtattaagatatctttaatagttctctaacactggataattgtttggttgtgggggtagggtaggggtgagagtgaacaggtactgtgaattttatactcctcaagagtttccacatgagagtcacacagaacaatgaaagtaagaagaaaaaaagtttctacagaagcgaaattaattcccttagaakgaaaaagtacagaaatgcttttttgctctttctgttgacctcatttcccttgcacttggaacaaaatcaatgtgttatccaactggcacgtttggcaggaggaaccaaacgtgtgaggcacagccgtttctgacttctctcatggtgtggcccatactcaaggcacttctcttctaccatgtaataggctttggttgacaaactttgcttaggacaggatggcaactgtgagaaagtccacgaagccataaatccaaaccacaaaatcacattctgcaattcatcgacattggttatcaagctgatattttgattgtcattttatttctctctctttttcagttggtttcaaactcttaggaaatgtaagaggaaaagcagttattaccctttaaaacctcactaataatctccctttttaaccgaacttcagcttagagttttccataagcaatggtattcatatagaatttaataacatgtttttttcagtgaatttatatttatggttaacatctataaaagaaactcatttaagttttaaaagatgaattggcttttaaaatattaaataatacatatggtacatggatataaaaatcataaagatggtacacaaatgactaaaatttagaaaatactgaacaagattatttgtgagatttcttttagattaaaattcttttgcatgtatatttgaatagaatatataatgttatatggtaaatcaagtaaaagaagggctttctaacatagcatgtactatgttattttctttcattttgaaatatgttgttattgaggaaattaagcttttgttctatgccaattttcttctataagtgtaaatatcttttagtagtttactagacagtagcgtgtatctttttgatagcatatttgttggtgatgatttttttttaatctatttttctttcattgaatgcagtctagtctggatgagggttttgaactggaaatcttgagtagttattatttagaggtgaagaatcatgtcatcactgtataccctttctagcacagtgttcacgtagtagttgttttagctcgttttgcattgctataaagtartactcaaggctgagtaatttataacaaaaaaagatttatttggctcatggctctgcgggctgtgtaagaagtatggtgccagcatctgcctctggtgagggcttcagaaagcttgcactcatggcagatggtgaagggacatggcaagagaggagggaagagagagaggggtgaggaagatgctgggctctttttaacaatcagttctgctgagaactagtagagcaggaactcactcattacctctagaacagtaccaagtctttcatgagggatctgcccctataacccaaacacctcccaccaggaccaggccccacctccagcactccaacactgggaatctaatttcgacatgagattaggagggggcaaatgcccaaactgtaacagtaatgatcactaaatatttaaacaagtgaatgaataaatgaatgaataaagaataaaaaactgagttctctgtcttaaatatgtgggcagtttttatttctttcttaaagctgttaatggagcaatctgtaaggaaactgaggccttgggttaatcagaagataacactttcatataagtaaaatttggagctagttacactgaacatttagaataaccttgctaggaagaagttgttaaaggaaggcagccctactaattttgcttttacttacaggaagctgaatttatggtcatatatgagactagggttttccttcctttctctcttttttataacaaaaaaattctccttcttgctctttcattcttctttttcttacatgcatgtactatatttctgatcatcttcacctcaaggaaagcaccccagttttccttacattaggggagactattacagcttaatttaaaatgcagctaattatttactcttatactcttaattatagtttcttgtctgataaaggtgcccacctcttaactggcaccctagatgaactgcagtactgatggtgaattattttactgccatttattcaggcaacaaatgtcatgtttcaaagattttgttctaagaatcctaaaaggagttttatatatcagagggagagaatatgaagaagttattagccaaactgactttctaataaccatgtagttggcttgattgactatattatattcctagatcatttcatttattttaaaacattttgcatatatacrggaaaacaatttgaagactgtgttttgttctggtgaatacattttaaacatattctaggtttattctttacaagtacattatttctttaatggtacagtgatttttattctaattcattatagtcagagacatcttaactggagttattttgtatgttcaggttaatattttttgttatcaaaaatttaacttagtacattttatggtagtgaaatatttctggtatctttgggtctcgtagttactactatgtggtcgtgaatatgtaaaataaactcggtgctggctatcacattttggattatacttatcattggattataaaggtgatagaacatcagtaacattcatgatttatggaaatttaattctgaaagtaatcataatctgtaaaaattagcatctagtctctgaactttagagttcaaggtaaaaagcaatacacattctattatcatatttgaaaatacagtttttttgttgtgatggtggtggtggtagttgcgtttttgagacgaagtttcgctctattgcccagtctggagtgcaaatggcatgatgtcggctcactgcaacctctgcctcctgggttcaagcgattctcctgcctcagcctcctgagtagctgggattacaggcatgtgccaccacacccggctaatttttgtatttttagtagagatggagtttctccatgttggtcaggctgatctcaaacttctgacctcaggtgatcctcctgcctcagtctcccaaagtgctgggattacaggcgcgagtcactgcgcctggtgaaaatatagttttttctttttaatttttgaaaaaattctgtgggtacatagtaggtatatatatgaggtaatgagatattttgatacaggcatacaatgcataataatcacatcagggtaaatggggtatccatcacctcaagcatttatcctttatgttacaaacaatccaattatatgtttttacttattttaaaatgtacagttaaattatcattgactgtagtcaccctgctgtgctgtgaaatactaggtcttattttttcgactttttgtacccattagccatcctcccttaccccccacctcccactaccttttccagcctctggtcactgtcattctacactctatctccaagatttcaattgtgttaatttttagctcccacaaataagtgagaacatgccaagtttgtctttctgtgcctggcttattttatttaacacagtgacctccagttccatccatgttgttgcaaatgacagggtctcattcttttttatggctgaatagtactacattgtgtatatttaccatattttctttgtttattcatctggacacttaggttgctttcaaatcttggctattgtgaacagtgctgcagtaaacatgggagttcgggtatctctttgatatactgatttcctttcttttgagcatatacccagcagtgggattgctggatcatatggtagctcaatttttagtttttttgaggaatgtctaaactgttctctgtagtggttgtactaatttacattcccaccaacagtgtatgagggttcccttttctgcacatacttgccagcatttgttattgcctgaattttgacattttttctggggttaaatgataccttgttgtagtttttgatgatcattgatgctgagcacctcttcatatacctgtttcccatttgtacatcttcttttgagaaatgtctaatcggatcttttgcccatttttgattggattattacttttatcctgtagagttgtttgagcttcttttatattctcgttatttatctcttgtcacatgggtagtttgcaaatattttctcccattctgcaggttgtctcttcattttgtttattgttttctttgctgtgcagacttgagtcggtcccatttgtccatttttgctttggttgcctgtgtttatgtggtattactcaagaaatctttacccactccagtgtcctggagagcttccccaatgttttctcttagtagtttcatagtttgaggtcttagatttaagtctttaatccattttgatttgatttgtgtatatggtgagagataggggcctagtttcattcctgagcatatggatatccagttttcccagcaccatttattgaagagagtttcctttcctcagtgtatattcttggcacctttgttgaaaatgagtcagtgtcaatgtatagatttgtttctgggctctcaattttattccattggtctatgtgtctttttctatgctagagccatgctgttttggttactatagctccacgtttttatgctagtgccatgctgttttggttactgtagctccatagtataatttgaagtcagataatgtgattcttctggttttgtgctttctgcttaggacagctttggttatcctgtgtcttttgtggttccatataaattttatttatttatttatttatttatttatttagtagccacagagtctcattgtctttgcaaggttggtctcaaacccttggcctcaagccatcctcccggtttggccttccaaagtgttaggattataggcataagccaccacatccccatttaagttttaggattttttttttctatttctatgaaaaagtcattggtattttcatagggattgcattgaatctgtagattgctttggatagtatgggcattttaacaatattgattcttccaatctatgaacatggaatacctttcctttttttggtgtcctcttccatttctttcatcagtgttttatagttttcattgtagagatctttcacatctttggttaagttaattcctaggtatttaactttatttgtaactattgtaaattggattatgttttggatttctttttcaggttgttcactgttgacatatagaaatgcactgatttttgtatgttgattttgtgtcctgcaactttactgaatttatcagttctaaatttttttttgtagaatctttaggtttttacaaatgtagtgtcatatcatgtgcaaacaacaagaatttgatttctttctttccattttggacaccctttatttctttctgttgtctgattgctctagctagaacttccagtactgtgttgaataacagtggtgacagagagcatctttgttgtgttccagatcttagagaagtggttttcagcttttccccactcagtaggatattagctgtggatctatgtatatggcttttattatgttgagatacgttgcttttatactcagttttttaagggtttttatcatgaagagatcttgaattttatcacatgctttttctgcatcaattgaaatgatcatgtggcttttgttcttcattctgttgatatgatatgtctcattgattgatttgcatatgcccaaccatccttgcatctctgggataaatcccatttggtcaagaatgattgtttcagtttcatttatttctgctctgatctttattcttctcttttactaattttgggtttgatttgctctagttttgtggttctttaagatgcatcattaggtcatttatttgaagtttttctacttttttgatgtagacacttactgctataaacttctctgtcagtactgctttcactgtatcccataggttttggtatgttgtgtttccrtgatcgtttgtttcaagaaatttttttaatttccttcttaatttcttcattgatccaytggtatttaaggaacatattatttaatttccatgtgtttgtatagtttctaaaatttatcttgttactgatttcttgttttatttcattgtggtctgagaagatacttgaggctgagtacagtggcacataccttgtggtcctagctactcaggaggctgaggtgggaggatcacttgagcctgggaggcagagtctgcagtgagctgaggtcacaccactgcactccagcctggacaagagtgagaccctctctcaaaaaaaaaaaaaaaacaacttgatagtatttcaatttcgtgaatgttttaagacttgttttgtgacctaatttatggtctgtccttgtaatactatccatgtgctgaggagaagaatgtgtattctgcagccattggatgaaatgttctataagtatttattaggtccatttggtttctgatgcagattaagtctgatgttcctttgttgattttctgtctgtccaattctgaaagtgaggtgttgaaatctccagctatkattatattggggtctacctctctcgttagctgtaatatttgctttatgtatctgggtgctccagtgttgagtgcatatatatttataattattatatcttcttgatgaattgatccctttatcattatatagtgaccttctttgtcccttttttttttttttggaaaataatggaatttattctagacaggatttctttttttttttttcctgccttcaagcatctgtttaacaaagcacatcttgcaccgcccttaatccatttaaccctgagttgacacagcacatgtttcagagagcacacggttgggggtaaggttatagattaacagcatcccaaggcagaagaatttttcttagtacagaacaaaatggagtctcctatgtctacttctttctacacagacacagtaacaatctgatttctctttcttttccccacatttcccccttttctttttgacaaaaccaccatcatcatcatggcctgttctcgatggtcgctgtctctttggagctgttgggtacacctcccagatggggcagccaggcagaggcactcctcacttcccagacggggcggccgggcagaggcgctcctcacttcccagacggggcggccgggcagaggcgctcctcacctcccagacggggcggccgggcagaggcgctccccacttcccagatggggcggccgggcagaggcactccccacttcccagacggggcggccgggcagaggtgctccacacttcccagacggggtggccgggcagaggcgctccacacttcccagacggggtggccgggcagaggtgctccccacttcccagatggggcggccgggcagaggcgttccccacttcccagacgacgggcagccgggcagaggcgctcctcatttcccagatggggcggccgggcagaggcgcttctcacctcccagacggggcggccgggcagaggcgctcctcacctcccagacggggcggccgggcagaggcgctcctcacctcccagacggggcggccgggcagaggcgctcctcacttcccagacgatgggcggccgggcagaggcactcctcacctcccagacagggcagccgggcagagacgctcctcacttcccagacggggcggccaggcagagactctcctcacctcccagatggggcagctgggcagaggtggctcctcacatcccagacagggcagccgggcagaggcgctcctcacttcctagacggggcggccgggcagaggcgctcctcacctcccagacgaagggcggccgggcagaggcgctcctcacatcccagacgatgggcggccgggcagagacgctcctcacctcccagacggggcggccgggcagaggcgctccccacttcccagacggggcagccgggcagaggcgctccccatttcccagacggggcggctgggcagagatgctcctcacttcccagacggggcagctgccaggcagaggcgctcctcacctctcagacggggcggcctggcagaggcactcctcagttcccagacggggcggccaggcagaggcgctcctcacctccttctttgtccctttttatagtttttttttcttgaaatctattttgtctattacaggtatagctactcctgctcttttttggttttcattggcatgaaatatctttttccatccctttatttttagtctgtgtgtctttataggtgaagtatgtttcttgtaggtaacagatcattgaattttgtgtttcttagctattcagccactctatgtcttttgattggagaattcagtttgtttacatttagtgttattaataataagtaagatcttactcctgccattttgttatttgttttctggttattttgtggtcttctcttccttctttccttcctttctattttccttttagtgaaggtgattttctctggtggtttgttttaatttcttgctttttattttttgtgtattcattgtatgttttttgatttgagattatcatgaggcttgcaaataacttatagctcgttattttaaactgatgacaatttggcaccgattgcataaacaaacatgcaatcaaaaagaagtctaataaatactctgtactttgtccccccaactttttaactttctgttatttctatttatatcttatggtaccaagtatgtcttgaaaagttgtagttatttttgatcggttcatcttttagtcttttacttaagatatcaataggttacataccacaattacagtgttataaaattatgtggttttttgtatgcttagtatgaccagtgaggtaccttcagatcattttttaattgcccattaacaccttttttccttcaaattgaaggattccccttagcatttcttgtagaacaggtctgatgttgatgaaatctctcagcttttgtttgtctgggaaagtctttatttcttctttaagcttgaaggatgttttcactggatatactattctagggtaaaagttttttttccctcagtagtttatgtcataccactctcttttggcctgtaatgtttccactgaaaagtctgctgtcagacatattggagctccatggtatgttatttattttttcttttgctgcttttaggatcctttctttatccttgacctttggaagtttggttattaaatgccttgaatggtagtcttctttgggttaaatctggttgatgtataactttcttgtacttgaatattgatatctttgtctagaattcggatgttctctgtttcatccctttgaataaacgttctgttcctatctctctctgcctccttcttaaggccaataactgttagatttgcccttttgaaactattatttagatcttataggcatgcttcattgtttttcattcttttttcttttgtctctgttgacagtgtattttcaaatagcctgtctttaagcttaccaattctttcttctgcttgatgacttctattaagagactcagtatgtcagctgcatttttcaaccccagaatttctgcttgattccttttaattgtttcaacctctttgttaactttatctgataggattctgaattccttctttgtgttatcttgaacttctttgcatttcctcaaaatagctcttttgaattccctctctgaaaggtcacatatctmtgtttcttcaggatttggtccctggtgccttatttagtttgtttttcaaggccatgttttcctggatggtcttgatgcttgtgggtgttcattggtgtctgggcattgaaggtatttatcgtagtcttcacaatctgaactcttttgtacctgtcttagaaaggctttccagatatttgaagggagttggctgttgtgatccagttttggtcattgcagccatatctacattagggggcaccccaagcccgataatgctgtggttcttacagacttgcagaggtactacctttgtggtcttagataaggtctagaagaattctctggattaccaagcagagactcttgttctcttcccttactttgtcccaaacaaacgagtctctgattctgtgctccaagcctcttgtagttgggggagtggtgacacaagcacttttgtggctaccaccactggaactacactagaccagacctgaaaccagcatagcactggatctcacccaaggcccagtgtaacccctacctggctacctcctgtgttggctcaaagttctagggctctataatgagcaggtggcaaagccagtcaggcttttatccatcccttcaggacagcaagcaagttcccctgggccccaggcaggtccagagatgccatctgggagccagcatctggagttggaaaccttagaaccctatctggtcctctattctcctgcagctgagctggcatccaaaccataaggcaaagtgcttcccacttttcactcctcttttcataggcaaaagagtctctccctatggccaccaccactacaagcccacagggattattgccaggctacggttcatgttcacttaaggcccaagggctcttcagtcagcttgtggtgaatgttgccaggcctgggactygcccttcagggcactgggctcccytctggcccaggcaggtccaggagtgccatacaagagccaaggtctggaatcaggaaccccaagagcccacttggtgctctgttccactgtggctgagctgttatccaagttgcaagataaagtcctctttactcttccctctctactgctcaagtggaaggaaggagtctcttttggagctgtgaactgcactgccttagattagggaaagggtggcataagcactgccttagccacctcagctggtggctcactaggttacgtgccccctaggtccaatgactctcgaacccagcacagcactaaaacttgcctagaaattacagttcttgtggcctagactgcctttcaagttcatttagggccccaggacacttcagcctatagtggtgcggcttgttgaaactcaggctccaaccgctgggatggacatttcccctctggctagggcacatctaagttctccctccatgggcattggctgagttctttgctaatggcccgggtgttgcttgccagttggcctggtgttgctttctgctgtgacatggtaacactgagttccagtgcaaagtcccacaatcactgtgctccccctcccccaagcacacagattctttgcaccacacggccactgcatgggggtggaaggggtagtagacaatcgaaaactgtctttcctactctcttcagtgtctctttcagcaatatgaagttaaaatcaggtactgtgatcacttacctgatttttggttcttgtgaaggtgcttttttgtgtagatagttgttaaatttggtgttcctgtggtgggggcagcgattggttgaggcttctattcagccatcttgcttcatctccctccaatagattaaaaaaaaaaaaagattttagaattatctaatttttttctttaaaagatgtagatgattggcttataattataatcttcaggtgtttccagagtcattgtgttctgtcatgaaagtaatgcaagagcaattttgctgtaatgaaaagctagaagtttcgagaacactttattttctaattccaaaacaacaacaaaaaatagaactttgctagctggctgtgtctactgtcattctttgattagataytttgagttctgcataccatgaggtgttggtatgatagcatgttatgatagaaacttttagaaaagaccagagacttgagagatagactaacctgcatgtgaaattcacctccgtcacttttgctctggtatttcgagcaagttatttaacttcctttgtaaagtgaagattatacttctttagagttgctgtgaggatgaaagcactcagaataagttcttgttgaatggtggatgtataaggaataccatgtggtaatgattatatgtttcaatattgtcaggtgaagtgaaggacaaaaatgttcaagtggtcgagcttcccattgtagacagtcttcatccccgtcctccatatttacccttggctgtaccagaagacctcgcagatcgacttgtacgagtgcatggtgaccctgcagtgtggtgggtgtctcagtttgtcaaatacttgatccgcccacagccttggctagaaaaagaaatagaagaagccaccaagaagcttggcttcaaacatccagttattgggtaagaatctgattttttccctcaaactgtgatatgtagtagttagggttatgtatctttacaatatattgtgaattttacaatatgtagttcaatttttatagtcccaccaaaggacagaggttctagagctatcctaaggacacatggagactatttttttttgtttgtttacttagaacagctaagaaagttgcttagtagtgctctattactgtctccagttctcctcttcctttgcttctttctcctcttatcacagctctcttttggcttttgttgttgttatttttgagatagggtctcactctgtcacccaggctgaagtgtagtggctcactgcagcctcaaccaccctgggctcaagtgatcctcctacctcagcctcccaagtataatagctgggtctaaaggcatgtatcaccatgtccagcttctttttatttttattttcatatttcccaccccacatctttccttgtgtcttagtcttcatatgtagaggagttattgaccccattctaagtgttagacgtaaagaaggtacatgtgaagtcagaatatcaaatcgtatttcttctcatgtaacttttgattgaaattcaatggaatcattcgttctgcccacttcatctctatagagcccactgaacaattccaatttccccagaaaaagagtgattatgaaggatgtgggaaggaaagatgatagaatagatgttcatatgattgtatccacatctgggttatagtctggaatgcaaagcaaagaatagccgtgaagatggcagagtaactctggtgaaatcaaaccttcactccagattcataataaaaaactggccttaagtttggcccatatactgtgacctaaaggcgtataagtctacctttttctacatataaatagtgatttagtaatttggggggaggggaaggcaagatttaaggagggtgttttaatttatgaaaataaactgttatttttatttccattaatattgctttggggccaggcatagtggctcatgcctgtaatcacaacactgggaggctgaggcaagtggatcacttgagcccagaagtttgagaaaactcaacataggcaacatggttgaaaccccatcaattaaaaaaaaaaaaaaaagcaaaaattagccaggcttggtgacacatgcctgtagtaccagctgttcgggaggctgaggtgagaggatcacttgagcctgggaggcagagattggagtgaaccataatcacgccactgcactccaatgtgtgcaacagagcaagaccttgtcttaaaaaaaaaaaattactttggaaacactaagatgggaggagagaggagaaaactgtggaagtcagtgccttattcagtacagggaagtgtgaatctgtgtccccaattttacaattttggggcttttcttaaatatgacaggtgaaattaatatctgctgtcatttgatatggtgaaaaacagagaaaggaaatgcattatgcccacaacagaagggctggaatcggtttcatttacctaaaatagtaaaaaccgttaaaaggtttgctggtcttaacggtgctgtaaaagtttatccaggtctatgttttcctgggacaacttttaagttctacaagctggcagttatggtgactctccagggtaaaataaagaggaaaacccttggtatcagaactttacaaataatatctctaatgttctttagtaacaactgtgaatcctggtatcatcctggtaacaaaaatcttaagttgtattcagtttttttccagacagctggttgctgcctagtatgaaatgcagctctgaaatttcccatttattcctaagatgtgaattattttctctataagaaatcattcttcaaaggctttacttactttctaattccccttgtattgtttagcctgcaaatatatttagaatatgtatttttgagtttttaaaatactatgtgttttactttttctaatagtgaaaatgaaagaaaaatcagttaaaaatgcctataatgccaccataagtaggggtataaattgagtaccctcaaagcacccagtgtcagtacattaccagtagaatctgaatttctcccccagagtccatgtcagacgcacagacaaagtgggaacagaagctgccttccatcccattgaagagtacatggtgcatgttgaagaacattttcagcttcttgcacgcagaatgcaagtggacaaaaaaagagtgtatttggccacagatgacccttctttattaaaggaggcaaaaacaaagtaagttagaccaactagtgattctagagtggggttgtctctttcagtttaaaagaattcttacttcccatgacttgtgatttttgtatattattattgctaattattagggttttaaaaattcaatggactatgtacttgtgtaactgtcagtctaatcaaagygtttttattagccatatccaataatgccttataagaagtctaaaatgaactggaccactgacttacgcattgtcaccagcaataatcattattatcattaaaagtatcaccctacttcttggtactaaaatcttcactagtctgttggagctgccataacaaaataacatagactgagtggtttaaattacagaaatttgtttctcccaggtctgaggctgggaaattcaagatcaagatgctagcaaggtagatttcattttctcttggcttgtaagcagccactatttcactctgtgctcttgtgacctcttctttgtgtgtgcagggaacaggagaggaagtgttctgatgtctccacatataaggacactaatctcatcatgagggccccattctcatgacctcatctaagcctaattatttctcagtggtcctatttccaaacaccatcacattggggttagggattcaacataggaatttgtgcgaatgtaaacgttcagtcgataacactagccagccatacagactgttagcaataaaaccaggtgcttatcgttttgatttcactgacttcattaacagttacagacaactgaacacatatgtagagttttgtcttataataatttgtggaatttgaaagttatactaaagaaaggtaaggaatcaaaaagtaagttttgtaagttgaggaataaagactactactgtgtatggaacagtaacaattattttttgagcttgcctgtatttcaggcactgtgctggtgctggggatttcatgataaacaagatactccctgctgtcaaggaattcccaaatctaatagggcaataaacaattaccctacagttgagtaacactattatagggttaacatggggtattatgaaaacacatagataaagcacaaatcctgattggacacttcttataggatctgagtaaacctggagttagtctttatttactatcaataaatgaaggatgtattaaatgtatgtaaaagtaggaaattaaggagaagaaaattctagtcttagttctgctcagatactatctcctccagaagtcatccctgaacccttgactggcctgtgttccccactctgtacagttctctgttgtagtgtttagcacttgcttacttctgtctccttcactagattataagtactttggacataatacctagctgtagttaaatgcccagtaaatattaaatggtattgatttcaatcccatcagtttgaaaacattaacacttaatcatttaagctttttggctatttaattaatgtatttgttgtcccccatgtttcaaatggggatgaggaaaataaataaatttagaatgaggactataatgcaggtattaatctaagtcattagataataatttaaatcctctttctacctctgaagaatccaaatgaacctgaagcaaattgccttttttattcaaggctccctctcttgagcatatgcacacactaccatatacatgcgcgcaygcgtgcacacacacacacactgagatgtgtatatatataaacaaagggcaaataattcatcagccaagtataagaatgagttaatgtaagagggattaaatgaacatttgggcacaaaacacaataaaaaaatgtatagtttaccatgtttcttcaatttaaaacaccaaactgaatttgtagcttggttgaagaaaaagatactaattttgtctactctttcacttgttctggaacgcatcacaagcttttttccttgttttcttgatgagcaaattaattcatgctcacttaaaaatatgcaagttggtaaataccctattagttcattttcacactgctgatagacataccccagactgggcaatttacaaaagtaagaggtttaatagacttacagttccacatccctggtggggctcacaatcttggtagaaggtgaaaggcaattctcacatggcagcggactagagaagagagcttgtgcagggaaactcccatttttcaaaccattagatcttgtgagactattcgctatcacgagaacaccaggggaaagatttgcccccgtgattcaattaccttccactgggtccctcccacaacacctgagaattcaagatgagatttgggtggagacacagccaaaccatatcattccacccctggccactcccaaatctcatgtcttcacatttcaaaaccagtcatactttcccaacagtccccccggagtcttaactcatttaagcattaactcaaaagtccagagtccaaagtctcatcgaagacaaggcaagtcccttccacctatgagcctataaaatcaaaagcaagttagttgcttcctagatacagtgggggtacaggcattggataaatacagccattacaaatgagagaaattggccaaaacaaaggggctacaggccccatgcaagtccgaaatccagtggggcagtcgaatgttaaagcttcaaaatgatctcctttgactccacgcctcacagccaggtcacagtgatgcaagaggtgagctcctttggccttgggcagctccacccctatggctttgcagtgtatagcccccctcctggctgctttcacgggctgtcattaagtgtctgcggcttttccaggtgcatggtgcaagctgttggtggatgtaccattctggagtctggaggatggtggccctcttctaacagctccactaggcggtgtcccagtagggactctgtgtgggggctctgaccccacattttgcttctctactgccctagcagaggttytccatgacagccccattcctgcagcaaacttctgcctgggcatccaggtgtttttatacatcctctgaaatccaggcagaggttcccaaacctcagttcctgacttctgtgcgctcacaggcccaacaccatgtggaagctgccaaggcttggggcttccaccctctgaagcaatagtctgagctgtatactttagcccctttttgtcatgacggaagcagctgggatgcagggcaccaagtccctagactgaacacagcagaggaaccctgagcccagtccacaatatcattttttcctcctaaacctctgggcctctgatgtgaggggctgccacaaaggtctctgacataccctggagacattttccccattgtattggtgattaacactcggctcctcatgacttacacaagttttctgcagctggcttgaatttctcctcagaaaatgggattttcttttctgtcacattgtcaggctgcaaattttccaaacttttatgctctgccccccttataaaactgaatgcctttagcagcaaccaagtcacctcttgaaatctttgctgcttagaaatttcttccgccagataccctaaatcatctctctcaagttcaaagttccacaaatctctagggcagagacaaaatgctgccagtctctttgctaaaacataacaagagtcacctttgctctagttcccaacaagttcctcatctccatctgagaccacctcagcccatactttattgtccatatcactgtcagcattttgggcaaagccattcaacaagtctctaggaagttcgaaactcccacattttcctgtcttcttctgagccctccaaactgttccaccctctgcctgttacccaattccaaagtcacttccacattttcaggtatcttttcagcagcactccacttcttgtaccaatttactgtattagtccattttcacactgctaataaagacatactcaggactgggcaatttacaaaagaaagaggtttaatggacttacagttccacatagctggggtggcctcacaatcatgatggaaggcgaaaggcgtgacttatgtggtggcagacaagagaagagagcttgtgcagggaaactcctgtttttaaaaccatcgaatctcatgagacttattcactatcatgagaacagcacgggaaaggtttggggacccagccaaaccatatcattaccgaatcaaggaaaaagtattatcctcaatcccatttatgtagtctcattttctaatacagtcatgtaccacataacatttcagtcagcgatgaaacacctgtatgatggtagtcccatagattataaaactatacttttactgtaccttttctatgtttagatacacaaatagttaccattgtgttacaactaccttcagtattcaatacaatagcttgctgtacaggtttgtagcctgggagcaataagctattccatatagcctaggtggatatatatgtatagcctaggtgtggtatagttggctatgccatctaggtttttgtaaatacaccctatgatgtttgcatgatgataacatgcctaatgatgtatttctcagaacatatcctcgttgttaactggagcatgactgtagttgatcgaattctatataatttaaactcttttcacttaatacagcaatagatccattcccctaggttgctaaaatagtcattgtaaacatgttttttttttttttttttttttgctttgtcacccaggctggaatgcgttggtgcaagcatggctcactgcagcctcaacctcctgggctcaagaaatcctccttcctcagcttcctgagtagctgggaccattggcatgcagcatcatgcccagctaattttttatggtagagacgggattgcatgttgctcaggctggtctcgaactcctgggctcaagcagtcctcctgccttgtcctccaaagtgccgggattactgtcgtgagccaccatgcccagcctaaacatcttttttaatgactacatacatatacgctgtacagatatgccgttgcttatttgaccaaccattcttctaatattaggcagtcagcttatttccagtgtttcattcttataagtaatgctatgacgtatgcctaaaattatccacattatttccttaggctagatttctggacttggaagtatttagatgcaaggatataaacttttttttttttaaatacagggtccaggctggagtgcagtagcacaatctcagctcacggtagcctcgacctcctgggctcaatgatcctcccacctcagccatctgagtagctgggactacaggcacatgccaccacactcagctagatataaacattttacagctttgatccatagcacagcatgacagttttataccaaacaacccttatagtacagttggcagtatctacttggactgcaagaatagtaaaaccagaatttcctccttgtagccaacagctataactcccctgccagtggtagtccaggcagcaattttctccatattctgttataaatatagtagtagccttttatgcataattttttctctttgtaaatccttttatttttattttcgacttgagtcgtttctcggggatttaaatgatgggttttttttctttactcttttactgaaatgtttttctactctgatttaattctgctttaaaatactcaggattggttttgatacctaagcaaatcataaaaatctctgccattgttttaagagaccaaaagcatgaattaatctattatcaaagtatatagtatccaaggtaatcattgtaagacttttctgcttcaagagggtgaagagatgaaaaattaaacttaaatgatgtatagtgttcacacagtcagaggtayagtgttgacacagtcagaggagaatctattttctgtgttgctcattctttgaaaaggggttaaaattagctttatacacatagcttctgtgtgaagatgattggttaatgctttgtggcttggtattgcacttcagatttctgcatgttaagattgagtccgaccggacgcagtggctcacgattgtaatcccagcactttgggaggccgaggtgggcggatcactaggtcaggagattgagaccatcctggctaacatggtaaaaccctgtctctactaaaaatacaaaaaattagctgtttatggtggtgggcgcctgtggtcccagccactcaggaggctgaggcaggagatgatgtgaacccgggaggcggaggttgcagtgagccaagatcgcaccactgcactccagcctgggcgacagagcgagactcaatctcaaaaaaaaaaattgagttcatccacaagattttaccaccagcatcccagtgactgtggcagccattgctattgtggcgatctcttaagtagttcagtattacagtgtttgaatcacagaatcattgacagtcaaagaaataagaactattaaagttggctatccaacattgcattctaagattgtggagattagggatggggttaaaataggaagaaaaacaagtctttaaaagtttcccaggtaaaatatttacaaattgagtttattctttatttttaaaatgctgaatgagttctttctaaaagtaggtacattgaaatgaatagagacaagaacaatttgttaaaagttttttgtaaagtatttggttgccctgtgaaacaaagaatcagcaatgagtggtgtatttgttcactattttattgaactcctataatatgctggacacagcacagagcactaggaatacaaagtcaaaatataatgtgtggctccttatctcagggagtaaccaacaggtagacaatatacatgtaacacatattacagtaaatttagatacgtctcctgaaggagtttatgtaccaggtacagtgaagtcacaaagagaagtatctccctcagtcaagagaaggacttcagaaaagaacaccagatattagtttataactgcaagctagtcctttgtggatgatataaaaataaatttttataaagtggaaaaaaaaattattattcccagtatctgaaacctcaaggtagaagaattcctccactgacatacttgagggcaaaagacaagaagcatgtttgtgcaaaaagtttcatgctcattatgaaaggtgtacaatttccttcttccattatttactttgttttgtttgtgtgtgttttgttttgttttacacttaggtatcctttatgaagccatagagataggcctgagagctcttttgcatgtagagatgggcctgaggaacttaggtacctttttttaaaaaaataatggtagggtttcactgtgttgcccaggctggtctcgaactcttgagctcaagcagtctgcctgcctcagcctcccaaagtgctgggattatagggatgagccaccgcacccagccttaggtacccttttgatttggttccagagagggctcttttagttaggaaggccattaatgttagtgttacttcttggtaaattgatcactcctttgtttcactgagcatccaaatcatgctgacaaagttagtctttattcaaggataaaacctatgctggttttatcagttcccccctttctttctccctctagcatttcgtatttctttgttgttgtttctgctccatgcctgggtatgcagcttcccaagaatcacattaaaactatttctggttgttttcttttccgaacaaatgtgacattttcttcatctccttgattttgagctgaagaaggcaaastgtcaaaaataatgaggccagatggatttgaacactgaatagcagtctgaaacagtgctcagagactttgcctttacaatcattattacagaggcaatgagggaaagctccttggtggccatgaaatgaagagaaactgaaacagctcttaggggattagggaaagtcccaggcataggtagcactgacttgttcatgtatttattcactcagcattgtgtggagtgctagatgctgtgatgcaaagaaaaataagtcatggtcctaaccttttttggaatastgtttggaagacaaacatgtaaactgactcctgatgcttcagggtttctatataagaactattattccttyagcaaatatttattcctcctctattatattccagattcttttcaaaagacatcctgtatgaatacttttaaacacacactatctctagcaagactaccaaaatattacttggtggacatctatggaatttgcttccataaatattagaatgggctttctattactgttattaggtaagagtagatggttcttcaagaaggatgcaggttaagggagactgttagttctcacaaatttttaaaatattcatctcttaacttctttttattattaacttgtaatgtcaatgaagaagacatttacaaagtctaacccaaatctgaattatcagaaattctaaattaaaaattttaatgaggttttatcacagtatttgtattctaaaggaaaagctcagtgaccaaatatgaaagcagtttgaataaactcttaaaagtcactcattacaaaaagaaaaaggagacttcaattttcagctatttcatgaattgataaaggacattttgatgtgtgtatgtgtgttttatatgatatgccaataaaatttaatatacagggcattccagaatggtttctgccccactgatggacttcaaatatgtctcatcaactacagtattaaatgccataattaaaggtctcctttctgtgagaagctcttagtcaaaggagaaagtctgccttctgataggatactgtgatatctatgaccatctataaattaatttattttttcaggtaccccaattatgaatttattagtgataactctatttcctggtcagctggactgcacaatcgatacacagaaaattcacttcgtggagtgatcctggatatacattttctctctcaggcagacttcctagtgtgtactttttcatcccaggtaagtgtcagtagggcattttaaaataaccaatactttttggttgtataggagtcagaaaaattatttgtgtgtctrtgtgttgttaatgttcattattgtgactcaggtgcaatttttctgatactcagtaatgatcccttttgtgaaagaatggaaagatcccataacatagccattcacatgcactaatatttagttgtttgcaagtaatggttgactacatctccactgaagccagttactggagttgtttaaagtacttggcttgttcacagcatttaacagaaacaacaagtaattaagcttacttaatactttctaattttgcatatagtcaatatgtaaccagaatccayccatttctacacatcatcgcactgatactgagaggcttaaatgccctaaattttgcctcagttgattgctttatagaaaagagagtaaatgtaattccctttcaagttctattacatttctaccaagtgagaaactgtatgttaaatttaagcaatataatatcacaatctttgtttgaatttaattgttgcagatgattatattttatgggtttggtgtatgtgtttttatgagggtccagccagctttgtatgccctgtggaatatcaggataacaatatttattgtggattttattctgttctctcatttatgcacatattattggttagttcattcaaccagctgttaaatgcgctcaaaattatactaggtgcagaggagatttcaaaggagattgaagatacagttcttgccctggtccagaatctaataagcaaaatacacacatsaaataactagagaataattaccagaacatataaattggtataagataaatgtatgcttaaatgctgagaagaagcggagaaaagaaaatgtgaaaaaaaggaaagccacatcatttttacaagagtatacttcggagagtaaaaggaaatggagactttcttattatatgacaatacacattgtcatgatgggatggcgatatgatttttggaaagataccttgccaggcaaaggttacagattcctttaatatggaataagaatacaacttactacccaaagatagctgcacagaacacgtagcagcaatcttaatcagaagggaaaatgtcttcaagttcccatgaaggcatccactatttatgtttctccctaattggggtgtggatcctatctttaagaaactcatttccattcttattgcaagaaaggggcaaggtttataactacttggttccttgcaactgtttttgagagtctgactatgcatctgcctgatcaacaggtacatgtaactggtaacaacctccaaacattcttgatgcttattgttacaatgagtgaatcaagagtcacttccccagctatgccaccttctctgtaggcctggattttaggcctgcctgaagtcaactcctctagtccaggtttctcaaccaaagcactattttagaccagagaattctttgttgtgaggagccgtattctgcatgtaggatatttagcagcatccctggccagtaagaccctcacttaaaattgtgacaaccaaagatgtctccagacattgccagatgccagatgcccctgtggagcaaaattgccctggttgagaactacagttytagtcacaagattctaaagttaaataaacatacacatgtctaaatgtttaccaacctcacatgtargtaggcactgagacttacagggttgtactcatgttttgcttttcttctcccaatcctccttagtaataccattaggcttattctggaatagaaagaaaattttttgctttactatttttttttcctttttgaagttgtactttagaattttggatcctcataactccaattttgacctacaaatcaggatctctgtcacttcatgatggtagaattctgtctaggcttgaggagaatattgttctattactttgtttggttttatgcataatgtcaacttcagtgtattcagaacttgggtccagagaagcaattcatatgaagaaagagtggtgctgagaagactttctgtatccaaaggaataaggctcatacttatatttcacattgttcctaaaaactcctggcagtcaaagtttgcccaaaataatttcactcatttgaacctaagcaaaattaaaacagtatttcataacccaaaatagacttgaatacctcaaaatattttatgttaggattcacaataaaagtttaacagtagaaataccttacatttatatagtgagtagcagtttgcctaatgtgattacctccttatcatgtaccttatttgatgactaaccgctgtagcatttgaaattgtagagtaattccatattcagtgataaatctttgagcttacttgcacctcattatttttctcaaatatttttagtaaagaagtatttagtaaagtttaatgtttttgtagtgtgaatgaaattgtttgcaggattattatgtagattcctttacataaaccaaaattggaattgtttgaaaatgccctagaaatatcttgccatcattgccaatagagcgtgagaaaaagtcactgatgggataaaatgccaaaccattgaccactgatcacagaacaagaaagaggcaacctgtgctgtagagtcaggatatctgtatttgcatccaactttgaccaattactggctgtgtgtccttgaacaaattgcttagcctatttcttaactggtttatttttctacatgtgaaaaaataatagtacctatagtatagagtctttttgaggattaaggagttatgaaaagtaaagcactgcgaatagtacctagcaatacagtgttaaacacattagctgctattattatatatatgaatagttataggaatatctctgcctgttagagacactctatagtatttattttgcagctctttttcacatggcttcatttcagactgtatgcgctcacattttagaaggagcatgaaacgagctagtcaaggcctccattagctctgcttgtggttacgggtaatgcttagggtccgtaaagaagaggaactgttaacattcagcatgtacaatttctctgggccaatgtaccacctcaacttcattttgtttagcttattgaaagagaatattgccatatgatgcgatttttcagaaacaaaagttcttcattcccaaaaggtgagtgaagacttagtatttgaagtaaatgtgtgtgtgttgactttagtgaaattaatcttcagactttcctatatatgtcataagcattctagaaaatggaggaagactaaagccatacatccagaagagtgacagaagataaacactgagaataagttcagcccagaataaaaacatggataaccaactctcaactttcttagatgataatttcatgtgccaagagatgttaggaagtgatccaagtttaatatctccttcataattctttgacaatctttaagttttattcatgtaaactttctgtctcctatacactatcctttcaggaattttataccatataacaatagtgagaaagagttgacctgttgaccatgagctattgtagacaatactgcaggaatgaaatgccatgctagaaggaaaaatacaaggctagatgtttggaaaactgcaggcaaaaatgtcatgggaccttaatcgggatttctcataaatttttagacctatctccctcagtctcaggacttctcatctttcttggttttatatccataagtgaggtctgggaattctctcttcttcaatgaaaaggttttaaaagccaacactgtggctctgctctctaattttgttactattattgctgttaactttcatcagatctgtttctcaaagccaagtttgtcctaaaagcctcataaattgaatagcacagtcctcaggatttaatatgaaaattggaggcaatattagcatttttttcaagtacgtcaagtgaattttgaaagctatgcaactacattctaaaacgttctaccaaatacattaatcctattctgtgttactggaaatcgcctatgtgcaaagcatctcctttgtcacctattttcttatttgaatcttaaatctaaagcaaagmayttatagttggagaatmacagcagttgacagcccagttgtagataggcacagtatcagaaaggttttctgaaaatattgcttatcaggttctgggatcaatttttatttttctgaaatctgacttaaaaaatggttgcagatgctcactttaaagactaacattgttaaagacattgtttaaagagcagttaatgttactctgtagtttcagccattaaaagttatcataatacaaaatcctttttttccccctatgacacctccctttatggcagttattacaatactctcatgagcctctcttggtctaattccaaatccgcacgcaattctactcccyttattacactttgaatcagattttggaagcccagagggcaaaaccaaaaactacgttaactattccagacagatggctctggacaggaatttccattgagatgtggctcatgaaacaacagtggatacctgttgagagtaccatggaggaaagcacagggtgaaatcccaaggtgtgaactctgtgattacttcccagagcagaagacaagaaaagtatttgcatccacagaggctctatctagcttacaatgctgagtgctgtacagtgcagctgttactgcattaatccttctggtgtttctcacaacaaagaaaagacctgggtcttattctcttattgtatagtaaaacaaagcagattacaggaaaagtgcacagatctctcagccacttccaacttctcacactaggatatcctcctgcccctatctatctattttgacaaaaataagatcccatctactctgagaaagctttggaggcttatgtaaactcaggctacttctaagggatgaaattcagactaatggattcctccccctttttaaaattttttttaatacagtcatatctgttttatcctttggcaggatttttgctgttacccattactgtgtgctttacgatgtactaaaaatgatacagtgccatgtcaacacagaataaagttaaacatactacatgtagccaaccactgctttgcaaaccatggactgctctcagtcatgccacctgtcaagcatcaaacctgagtatggacgtcagctgcaagccttcatttacctgccatgtgatttgaacttttaaaccacgtggtaggtaaggaaagaagagaggaagcatagagtgactaaatgcgaacattaacactatagtaatctttttagccttttgcagtaaattgtcccatggttgatatagacagttttaaaattacttcctcttaatgttatatatggatcttaagggttaaatatcacccatggacttgtgtctccattactgggctggtattatgcctggagcaatattcattcaacagatacttattgagcacgtactttgtggcaggcattgttctaggtgtttatcctaagggaatatatactcaagagcctgaaagagttctgactgtggctctgccattaactagttcctttttggatttttatttttattttttgaaatttacttaatctttctgtggcttagcttcttcatctgtaaaatatgaataataatagtacctcacaggtttgtcataatagttaaatgagttgagacaaggtgagggaagagcacactattataacactgcctgggacataatcggtgctcattaagttcagctgctatctttaatggtcattcttatgagaaaaataaagggccacacctgtgtagcactggtatgcttgcagaggcctacagtcacatttgtcatttttataatgggccacctcagtgtctgaaatctctactattattataatagttatttctttggtttaagaaaacagttctgttatccaccaaggttaacacatgaacaactcttgatagcaaaacatacactaattattaggattatccccagaagaaacaggtctctaagggtgtgggacagggtgcgatgttgtttttatgagagtaagacgtttaagagtggagaggaggaaacacatcacggttcattgtcacagtagagattgtggtcatcctaagagtaacacaaggtcctgcattcctggctagggatgactgaagagtgggtgaagacaccctgaaaagaagactgtcaggtttacccaagactgtctttggtcttatgctatatctttctggtgttacaatatgaacatggagaataagatttacaagagaaaatatatatagcagtttcaagcatatgcagactgcctgggttccaacctgaatttaccacttattagtataaccttgagcaatgccttaacttccctttgacatttgtaaaacaaacataatgatagaattttatggggatgctgaaaggaatctaattacattagataatgtctaaaaacaatgtctgacagttagcaaaagctcagtaaatattagcctctgtcattgttattgtagtttgctattattggagctgctttaattatttagtttcttcttttcctgagtcccacttaattttgcttgccttctatgagcctttggctgaatttgaaattcaaaagttccaaatctttttgatccctattttattatagtctcggtattctaccaatgatctcaattgtaaaatgacattgccaatataatcgttgttgaactaataaatctgaaagcaaggtttctattattttggttctatatctagttgaaattctgtcactaaaatttgcataaatcacttaatctccttgtgttttagttgcctatctgcaaaattaaaaatattgtctaaatgtagtttcatttgcaaattatatatagcatttgagaattgcccctcaagttttctgaaattcagattctctaagttgaggtgatgattaacctagtcagattttatttgataagagttaagaataggcatctccatttgtattagtctgttttcgcattgctaaaaagaaatacctgagactgggcaatttataaagaaaagaggtttaactggctcatggttctgcaggctatacaggaagcatgatgctggggaggtctcaggcaacttacaatcatggcagaaggcaaacggggagccagcacttcacatgactggagcaggaggaagagaattgggaggtgccacatatttttaaacaatcagatctcacgagaactcactactgtgaccacagcatcaaggggtgatggttttaaccatgagaaaccgcccccatgatccaatcacctcccaccaggccccatctccaacattggggattacagttcaccatgagatttgggcaggtaacacaaatctaaaccatatcaccattcaagtttttaatcttcataaatgccaaggttttaaaagactgccgggtagtcctaaattgctccactgagcagataagcaattactatgagtagcgtcattttaaatacatgcaaaactattggtatagtgacaataaagcattaactaagattaccayaactggagatttaggaaaatttcatctgagttgcattgttctcttttcacaatgtataaattgcttaaattgggtgatagtttagtttaactttattactaagcattaacctcaaggattgaagctcagattgtggaatttcacctgctatccagtgagcagagagggtattctttggacatagggaccttttaagtagccttaaaactatagtaatcagggtgatgcatttcctcaaaggcttgcccagtttatgtcatccaagcatgccactctctacacagcacacttaaaactttttagaacagaaattgccgatgtgttttagctcacttgccagtgcttgttgattgtcagtaattacatgaatctctcttgaaaacagttctgggagcggggagggatagcatttggagatatacctaatgttaaatgacgagttactgggtgcagcacaccaacatggcacatgtatacatatgtaactaacctgcacgttgtgcacgtgtaccctaaaacttaaagtataatttaaaaaaaaagaaaacagttctgacaccaagttataaattagcagatgagaatgtgtgattgattaacagtgtatgaaggaaagggaccatcagcatttatttgtgttaagtttttttatcctaatcctaaacttcaaattctttaagggcacaaactatgtcttactcattttggtatcatgagtgcctagcttggaccactgtgtatgtagctcttaataaatgtttgttaaaattaactaattcatattcttaaattcttttgtactrtatagagatagagagattytaattgtaataatctttcgtgagtttttcttctttatttgaaaaaggatccagacacagagatgaagaatgacttgtaccatcttctgagaacaaatggactgaaagcttgtgactagaatccactacttttcaacctcttactcctagagcccatccttttggccaagggcttttagattgctgtgaaggagagtgtttatatactaacaatttcttttaaattctttcccaaggtctgtcgagttgcttatgaaattatgcaaacactacatcctgatgcctctgcaaacttccattctttagatgacatctactattttgggggccagaatgcccacaatcaaattgccatttatgctcaccaaccccgaactgcagatgaaattcccatggaacctggagatatcattggtgtggctggaaatcattgggatggctattctaaaggtgtcaacaggaaattgggaaggacgggcctatatccctcctacaaagttcgagagaagatagaaacggtcaagtaccccacatatcctgaggctgagaaataaagctcagatggaagagataaacgaccaaactcagttcgaccaaactcagttcaaaccatttsagccaaactgtagatgaagagggctctgatctaacaaaataaggttatatgagtagatactctcagcaccaagagcagctgggaactgacataggcttcaattggtggaattcctctttaacaagggctgcaatgccctcatacccatgcacagtacaataatgtactcacatataacatgcaaacaggttgttttctactttgcccctttcagtatgtccccataagacaaacactgccatattgtgtaatttaagtgacacagacattttgtgtgagacttaaaacatggtgcctatatctgagagacctgtgtgaactattgagaagatcggaacagctccttactctgaggaagttgattcttatttgatggtggtattgtgaccactgaattcactccagtcaacagattcagaatgagaatggacgtttggtttttttttgtttttgtttttgttttttcctttataaggttgtctgttttttttttttwaaataattgcatcagttcattgacctcatcattaataagtgaagaatacatcagaaaataaaatattcactctccattagaaaattttgtaaaacartgccatgaacaaattctttagtactcaatgtttctggacattctctttgataacaaaaaataaattttaaaaaggaattttgtaaagtttctagaattttatatcattggatgatatgttgatcagccttatgtggaagaactgtgataaaaagaggagctttttagtttttcagcttatttactttgttttttttcctgtttctgatatagtaactaattcttaactcagagacattggtccattttaatactgaaaaccaattttcattggtacacattacaaaattgctaagaacactgtttgggagctttcattctcatattttggacattgttttaattgagtgaaataatcataactccttgctcccagagaagctatcacctccatttctaaaaccatttcaggtttgtttggtagtctttcttaatgtatttattatcgctttttgtgagtagggtcctgttttatccaggaaccaatttctgccctagcctatcatgccctgcttttgagagtaccaggtatctttgggattgggaagctggctgtttcagaagtatatgtctcatagtgtgcagaacttggtgaccaagtgagaagcgggaccaatgggagactcacaatggactgagtcttgggattatcttttccaaattcttccatgttagaatcacttcagaaaataagactttgatgctttgtctctgagcatcatttttctcctcataaaaacacttccttattgtatgtagcctgcctcctacagaggcctggtaggtgttactgcattctaaaagaaaaatgtcatctctgtaggagcgactatcaggcctagtgtgaaatattagggatcctaggcagaagagctattagtcctggccttcatatcttcaccaaatgaaaatactgtatataaaatttcaccaccaaacttaactaaattctttttctcaagtcaagcctcccaaagaaaaaagaaattaacttcctacagtgtcagcaagcaattttccatttagttttggtacaaataaaagtcatttgaaacaatctccaactgagcggaggtaattttgattatgagttattttgcaactcgcatctcacatgtcattggaacatcagtaactgtggatctgatttgtgcccttatagaagatccaaaggtaaattaagttagtctcttttccttctaaattgaccgagttccaggggtgaaaggaccaaagaacagagatacgaaggaaataaattaaggagtatttcccaaagggagtcttcaactgaagagttaatttttgacattttatcatttggttctagaatttctccctaattctttatatttctctactgagatttttttattcactacatgcatgttttcattgaacataactatgtagtgaataaaactatgaaccttgaacataacagatgaacataactatgaacataactgaacaaaacattgaacataactatatagtgaataaaaaaattatttgttctcagtagagaacacataaataaaaaaattatgtgttctcagtagagaacacataactatgttcaatgagtttaaattatgctttaaaattcttttctggtaaatttgacatctggataatcttagaattggtctccattgttcctctttacagaatggtcagattttggggggaggtccctcatatattgagtgatttagattgtgtcctgaacattgtaatgtttatgttgtagattctgttatattgctctgaaaagtgctgtgatatatacatatacacacataaatatacatatacacaaaaatatatatatacaacatttgtgtattacatttgtgtgtatatatagacacacaaatatatatatacaaatatatacacacacaaatatatatatattgtgtatgtgtgtgtgtatatatatatattgcttgtgttagcaggcatttaactttattggactcaaactgtaaactctcttgggcagcagctgaaaatctcaattcagttagctggagtctatgctgcacatagttcagggcttagccagagagatggatagaatttatgcacagaatttgtggtgctttttctttggctctctttcttctgagatttcccccctcattttccagcagctgtggttgctctgattcttagaccagaaaaactgcagttttctttcagcccaaaagctgtacaatgggaaactcaccttgtgccattcccttctttaaaatttcaatctcttttcagaacttgcctgtttttattgtctcctaccctcatgtattttttgtatttttttgagagtttatggttgttattcgttggaatattggttcagtgggtgcttactccaccattaacttaaaatgaaaaaacagcaggggagaggacaggtttagtcttgtgaaacccctgttgagactttggcctcaatagccaagtagccagtagccttacgtaagaagatgaagaagtaaccaaactgttaaacctgctcttgtgaagggctaatgaatactgttgaccacatctttctaaatcgcctttgtaatcatcacgtacatgatggtgattcattcaatacatgttgccgtgttgagaaggctgacatttttcttaccactattgtaatttctccataaagccctggtacttaaaaaatcctgcatgattttgaattgagtggccagtgctaggttaggatttgggtcttttccttgttgaaagacctatttctgagagacttgcctggaattaaattattatcgtgggctcattgaatgtgggtaacaaaatcctgcttattaatgacaaagcaattacgaaagatctcaccaaggctttcctagttcttccactcaagtctgatttagtgctcagctgggcgcttaacgaattcatgcctgttgtgaaagccctaatccaggatttcattgtacctaaatgagtaagagactagttccttttctgttcaagctttaggtttttgttgttgttgttatatagaggcaatcctgtttactgggttccctctttgtaaagttgagaagatgaacagccccagcttctaagggagttgagagttaaaagagaaaaaaaagcacattttaaaagctacctcatacaatgattattgtcattattatttggttctgagaggatacagtcactgtatattcggtgagcaggaaaagtgttggggtctaaacggtgcatctagaagagtctcttctgcctcagtgagagcaaatctctcaggggaaaaagacaagtctcctttggccatagccaattgcccgatacttcatttatgctctcaggagactgtgcattaggttccatagacctgcacagaatagacatgtggcttgaggattggtgaaattgacaacttggctacaataccctaatttatgtcagatacagactgtatggaatttttaaagtgtgctgctcagaaaggagcacaaaaaatttgcctctatacttactggttcctagcaccagtctctctcatggacacatggaagagctgttccaggatcacaggccttggaaagtttgggctttgagttcctggctagtcttacctccctattaatttgcataagaatttctggcccagtaaggagatagaacatagtgagtgcagggacagaagacctagttttcagttttgtttttcctcctcatagtgcctacaagcacgtaatatccctgtatttcgggttctttagggaaaaagcaacagttctcattgaagatcactgactgaaattcagaatatctggcttctgattttgatattgtcattaaatggggacaggccaaacggttttctcagaactttgttttcttcataagtgaaatgaattggttggatttattcagggtttgcaaatttggttgactggttcagtttcacatgtctcaaggaagtagcttctactcagcctcagctgattgttgttctaaggacataatgtggacagatatttctgtttttccagacaagcaaaatgtggatctttctgtgcaagatcttcagattttgaagtatcagcaactaattaaaaaatatgtaaaacactaaggagtccaaataaatatctgtggctcctttgggcccatggcccattagtttataacctctggactagattgggaaagctcttttctaacttcaagattatatctctagctaaaagtagatctaccattcgatccagcaatcccactactgggtatctgcccaaaggaaaagaagtcattatatgaaaaacacacttgtacacgtacgtttatagcagttcacaattgcaaagatgtggaaccaacttaagtgcccatcgactaatgagtggataaagaaattgtggtatgtatacaccatggaatattacttagccattaaaaagaacaaaataatgtcttttgcagcaacttggatggagctggaggccattattctaagtgaagtaacacaggagtggaaaaccaaaaacgatatagtctcacttaatagtgggagctaagttattcccctacattgaaagttattcccctacggggaataactttcatctcctgattcttcaagttgtcgattagtacggaagggcatacagagtgatataatggactttagagactcagaaagaggagggtgggaggggagttgggataaaaaactgcatattaggtacaatgtacactactttggtgatgaatccactaaaatctcagaattcaccactatataattcatccatgtaacaataaaccactggaccctaaaagctattgagataaaaattaaagcaaattgatatgtgcggtaaatataaattatgcatcaggttggttagtataaaagtataaagaaaaaatgtaaagtatattttgggtacattgggttaaataacattattaaaattacccattaaaattttttttaaataaaactaagattatatctctggaaaggattggtaagagggtaacagctgcataatgctttcaagttcagatgctgcacgtgtcccaattcctcagaaatacctgcttagctggctgtcatcctgggctcagaatagcccattcgtagcatattcatagcatattcatgacaatatgctatgaagctcgtaggctgggcccctcagacttggccttgaagacctcaagtatgtaacaagggttagataacttctaagttctcttccagccctaaatttctaagaaggtcatggtagagcctgagattgtaacaaggtcatatgtggtaccagggtgcacctgcctgggttaggaacctgggtggctggatctggttgcaagaggaacaagggtcattttgttagagcagctgactatgtctttgcctagacctctgttaaaatagagtaacttaattcctgacttaattaacaggctgttcaaactcacctgtttatatttagaaactccttttgttgttgttttctttcccaccttttgtttcctggtaaagtttcattcatagaatcacagctttgtttcagctaaactaagagaatagggatttgtgggcataaaagcccagagaaatgaggtgtcagtgtctccttggaggccaaagagtggagatgataacccactctggctcaggtcggacttcccataccgttcaggaaatcaaaagaagtgtgaatgagtacccaccatgatgagtcccatctagtctatttcattattttttaagtgatattcaaaaacactggaatttgttcgcaaacatactgcacaattgattgccacatagtggcaggtcacaccaccaagaatgagaacatcttacaggtaaagtttaaagaacaaggggtttgaaatcggctctaatttcaagttctggcttcacaccttttgagcatcaacaggttctaacaagttatgctctttccagaaactcctgttggtaattcagatgaccagaattctctaagtcagtcattgggaagctgtgcccactgcttgtttttgtaagttttattgaaacataaccacacccattcacttatatattgactgtggccactttgggggctacaacagcacacttgagtagttaccacaaagcctaaatgtatggcctacaaagcctaaaatattta

SEQ ID NO: 95030 - DNA, 35123 bp, Homo sapiens
ttttgtatttttggacataacatagttgtacatattgtgggggtacatgtgatgttttgatacatgtatacaatgtgcaatgatgaaatcagggtaactgggatatccatcacctcgtttatcttttctttgtgtttagaacatcacaattattctcttgtagcttttttttttttttttttttttttttgagatggagtctcgcaccgtcgcccaggctggagtgcagtggcgcgatctcagctcaatgcaagctccgcctcccgagttcacgccattctctgcctcagcctccagactagctgggactacaggcgcccgccaccaggcccggctaattttttgtatatttagtagagacgtgggtaacacggtaagacgtagtaacacggggtttcaccgtgttagccaggatggtcttgttctcctgacctcgtgatccacccgcctctgcctcccaaagtgctgggattacaggcgtgagctactgcggccggcccccccacctttttttttttttttgagatggaatcttgctctgtcacccaagttggagtgcaacggcactatctcagctcactgaaacctccacctcccgggatcaagagattctcctgccttagcctcccgagtagctgggattacaggcgcatctcactgcggctggctaatttttgttttttagtagagagggggttttaccatgttgcccaggctggtctcgaactcctgacctcaggtgatctgcctgccctggcctcccaaagtgctgggattacagctgtgatctgcccaggctggccagtgactggcttctttcacttagcattatgttttttttgagatacttcattcctattagcagggagtgacatgcacctgtggtcccagctactcaggaggctgaggcaggaggattgcttgagcccggaagatcgaagatgcagtgagctgagattgtgccactgcgctccactctgggagacagcacaagaccctatctcaaaacaaacaaacaaacaaaaaatcattccttttaatggccaaagaattttccgttgtatgagcagaccacattttgattatccattcttcaactgatggacatttaggttgtttccacaagtctttgggtagatatatgcttccaattctctgggatatatatatacgtaggaatgctctagccctgtgtttaacattttggggagctgccaaactgttttccaaagcagctgcaccattttacattcccaccaacagcgtagagggttccaattatttctccatatccttgccaacacttgtgattgtctgtcttgtttatgacagtcatcgtagtgggtgtgaagcagcattcactgtggttttgatgttcatttccttagtggatcacattgtggagcatcttttcatgtcattcacttcatttgtatccactttgagtcaaatctggaaaaagagttattatagttgcaaagtggatacaaaaaaacctgtcaaatctaggaaaagagttcatatagttgcagattttttttcttttttagacaagatctcactgggtcatccaggctggagtacagcaacacaatcatagctcactgaagcctcaaactcctgggctccagcaatcctcccacctcagcctcccgagtagctgggaccacaggcagcatcccagcatgcccagtttttttttgttgttgttgttctttgtttttgtctttttcagacggagtctcgcgctgtcgcccaggctggagtgcagtggcatgatcttggctcactgcagcctccgactcctgggttcaagcgattctcctgcctcagcttcctgagtagctacgattacaggtgcgtgccaccatacccagctaagttttgtatttttcatagagatggggtttcaccatgttggtcaggctggtctcgaactcctgagctcatgatccgcctgccttggcctcccaaagtgctgggattacatgcgtgagccactgcacccaaccatttttggttttttggttttgctttgttttgtttttgtttttgtttgtagagacagggccttgctatgttgccaggttggtctcaaactcctggcttcaaccgatcctcccacatcagcctcccaaagtgacaggattacaggcgtgagcaccacccctcttccagcttgtggtgttcactggtaatctttggtgttgtttggcttatagatgcatcactccaatctctctgccgccatcgtcatatgttgtgtgtgtgtgtgtgtgtgtgtgtgtgtgtgtgtgcacctgtaactgtatccaaatttccttttcataaggatatcagtcagatttaggacccaccctaatccagtagaaacttatcctgatctgattacatttgcaaagaccttatttccatatagggtcacattcataaattccagtgaacatgaacttggtggggaggggaatgattcaacccaggccactcattattatgtgtttatgacacacactgttggtatttgtgtccagttcattcaccttaattgctgcgcaagagtttattgtgagagtacaccacaatttatgtcaggctgctggtggtgaacacccaccttgttgccaatttcctccacttccaacaagaatgcaattaacatccctgaacatgtctcttggagtttcttagggcagtatctttcaaacggccaaacaagatccattagtgggttgtgaaatcaatttagtgggttataaacaatttttcctttaatgaaatggaattaaatagaagctattagagtgcatgctcatagtcggagtgagagctcttctgtgaaacttttgcttcaggtgtctatagctgtattaatgtccagcaaaagtgtttacaagccacagctctgaaagaggtaactggacaaatgacctgtccatttgtccaaaggtctcgtggatgctgccaaattgctctgcaatgtagtttgtccatttgcactcagagcagctccttgccaatacttgccagtcaacactttgaactttttcaggctaatgggttttcatcctgttttgttttttgttttgttttgttttgttttgttttgttttttgagacagtctcgctctgtcgcccaggctgtagtgcagcagcatgatctcagctcactgcaacctcttccccccgccgggttcaagcgattctcctacctctgcctcacaagtaactgggattacaggcacaccactatgcccagctaatttttgtattattttaattatttatttatttatttttatttatttatttttgagatggagtctcactctgtcacccaggctggagtgcagtgctgcagtgttggctcactgcaacctctgcctcctggattcaagcgattctcccgcctcagcctcctgagtagctgggactgcaggcacgcaacaccatgcccagctaatttttgtattttgagaaagggggttttgccatgttggccaggctagtctccaacttctaacctcaagtgatccacccacctcagcctccaaaagtgctgggattacaggcatgagcaactgtgcccagcctaatttttgtatttttagcagagatagggtttcaccatgttggccaggctggtctcaaactcctgaactcaagtgatccacccgccttggcctcctaaagtgctgggattacaggctacaggcatgagccaccacacccggcccaatctatttatttattttatttttttatttattttctttttggtcgttttttaatttaaagaaaaattttaagattttcaattcctacgagatgggggtggggctaaggaggggctcagggtgcattgggaggttcggctctcatcctatgccccctacccgccgacctcaaaggacttttgagaattcagtgtgccaatgtttgcaaagcattacacacagggcctgatagacagcaagcattcaataaatgctagctatggccgggtgtagtggctcatgcctgtaatcccagcattgtgggaggcccaggctggaggattgcctgagctcagaagttcaagaccagcctgtgtaacacagtgagacatcatctctactaaaaactaaaaaaaaaaaaaaaaaatagccaacgtggcagtgcatgcctgtagtcctagttactagggaggctgagacaggaggaccacttgagccccrgaggtcaaggctgcaatgagtggtgatccaacaaccactgcactccagcctaggagacagagcaagaccctgtctcaaaaaaataaaataaaataaaataaaagttagttattactattattctctgattcaaagttctctagatatgtgcacatttgcgatcagaacttggcctggtctgaccaggcatggtggctcacgcctgtaatcccacctctttaggaggccgagcaggcaggattgattgagcccaggagatccaggctgcagtgagctatgatcaggccactgcactccagcctaagcaacagagcaagaccaagcaagaccctgtatcacaggaaaaaaaaaaaaaaaaaaagaacttggcttggcctaggatggggcgcggccagaatgccttgcttaggggcgaggcccacagcgccccgatggctgcccagcgagcaactgagcaaccaggctgatgttacaggttctacaggttgggtgaaagccacgcccggccacccctacacaaatgagttgctccccgcccccacagtcttgaacgccatcctcccgcctggcttcttcgggactcaggagtatcttaactctggcctgatttctcccatgccacaccattaggggcacccagaaatcttgttgccaaattcctgccccctcagacacccactttcaaacccttgcttctagggaacccaagggcctggtggctctgtgcctccttcctcggagacagagagagagcaatgcctccctgaccggttcctccttgaaatctcagttatctgacctttaatcccatgccacgaccaaagacccataccttcgacaaggcgctgtgtccaagtcccacctctcggtagctcccagcccttcccctcccctctccaagaagagtcccgtggcagggcaaaatggctcacgcctgtaatcccagcactttaggaggccgaggcggatgcatcgcttgagctcagaagttcaagaccagcctgggcaacatggtgagaccccgtctctactaaaaatacaaaaaataaaataaaataaaatagccaggactgctgatgcgcgcctgtgaccccagctactcaggagggtgaggtgggaggatcacttgagcctgggagacagaggttgcagtgagctaagatctcaccactgcactccagcctgggtgaaaaagcaagaccctgtctcaaaaaaaaaaagtcccaggcctcccctagccccttgcccctctctgaagggacccagatatcctacctgcacttcccacccacacactgagaagccccctcctaccgctacccaccaaagccaccccaccctgctcctttttgagaatcaaactcaaaccgcaccagctaatttttttttcttttttgtatttttagtagagacacggtttcaccatgttggccaggctggtctcgaactcctgacctcaggtgatccgcctgcctcggcctcctaaagtgctgggattacagttgtgagtcatcgcgcccagccacattttattttatttttaaaaattttttagagatagggcctcactatgttgcccaggctggttttgaactcctgggctcaggtgatccttccacctcggccacccaaagtgctgggattacaagcatgagccaccgctcccggcctccaaatcccacctcttgaagacccacgtgccaggtcctccagcccccgccccctttggagacactggtacctgcaggcccctccccggttctctaggacccgccctctcctttcactctgggcgaggccgcccctatcccagccgcaccggtccttcccggcacacgcgaggctcccatggctctggcggtggccccgtrggggcgacagtgggaagaggcccgcgccctgggccgggcagtcaggatgctgcagcgcctagaagagcaatgcgtcgacccccggctgtccgtgagtcccccttcgctgcgggacctgctgccccgcacagcgcagctgcttcgagaggtggcccattctcggcgggcggccggcggaggcggccccgggggtcccggcggctctggggactttctactcatctacctggccaatctggaggccaagagcaggcaggtggccgcgctgctgcctccccggggccgaaggagtgccaacgacgagctcttccgggcgggctccagactcaggtgagccttcgccccagaacaaagtcctctggggtgaggcccaggtcttgctcccagcccctcctcccccagacccaggaacttaggcccccaccccctcctccctcagacccaggaactcaggcccccaccacctcctccctcagactcagggctccagcccccagcccctcctccctcagacccaggggtccaggccccagcccctccttcctaagggaacctggaaaatgggccacccagttttctccttccttgggcacccatgccctcagcccgattttgccatttccttggtcacccagcagcccaattctggttcccactatcccactatctcagaattcagggaccccatggggtttcctacactgaggataaaataaaagttagctattactattattctctgattcaaagttttctagatgtgtgcacatttgtgatcagaacttggcctggtctggctgggtacggtggctcacacctgtaatcccagctctttgggaggcccagctgggaggatcaggcctcagaatgtggagaccccatgggctcctaggtggaggagaggtagatggacacacccaaagaaactgatcattaggcccccatcacggtttctgcctggactacccacttggtctttagttcctgaggaacagctggctccagacccaggacctgcctggaggccacccctctgctgttctgcactgaggaaggaatctcagagtgaccaggcagatgaggtttggggcccagagcccagaacaaggtctagttcagggacccatgccacttctttatattaaatattttgtagtgtctctttttttttttttttggacacaaggtctggccctgtcgcccagactggagggcagtggcaccatcatgactcactgcagcctccaactcctgggctcaagtgatcctcccacctcagcctcccatgtagctgggaccacaggcgtgcaccaccatgccagactaatctttttattttttggtagagaggaggtcttgctatgttggctaggccggtctcaaactcctggcctcatgcgatcttcgtacctcagcctcccaaagtgctgagattataggtgagagccaccatgtccagccaagtgtttccttaattcatcctgagaggacatgcagaggttcaacaacctacccacctatagttttttaatcactataatgcccaaattataagagagtgatcaaaggaatttttttcataaatattatctatgttttaaatgaaaatgccaaggcacaattattcttggaaggcagagctgactagtcagacactcgtacctgtaggtagaaccactgtcatacagaatcaaatagtcttcccttaatatataggagagctggatttctgcaaaattcagcgtaatttttttttttttttagacatggtctcactctgttgcccaggctggagtgcagtggcgcaattttgactcactgcagcctctgcctcccatgttcaagcaattctcctgcctcagcctcccaagtagctgggattacaggcacccgccaccacgcagcgataatttttatagtttttattagagacagggtttcaccatgttggccaggctgttctcaaactcctgacctcaagtgatccacccacctcagcctcccagagtgctgggattacaggcatgagccactgcttctggccaaaatctaataaaagccatgtatatcgtttttaatttttttttttttttttttttgagatggagtcttattctgtcatccaggctggagtgcagtggcgtgatctcagctcactgctacctctgcctcccgggctccagcgattctsctgcctcagcctcctgagtagctgggattataggcgggcgccaccacgccaggctaatttttgtattttcagtacagacagggtttcaccatgttggccaggttggtcccaaactcctgacttcaagtgatccacccacctcagcctcccaaagtgctgggattacaggcgtgagccaccacgcccagcaggaatggactcttaccttacactgttgagatagagtccagagccttatccctgcaggtgttccccatgaggggaggaagagggtgtcagtgggagccccaaggatagccagagtccttgcccatccccacaggcgacasstggccaagctggccatcatcttcagccacatgcacgcagagctgcacgcactcttccccgggggaaagtactgtggacacatgtaccagctcaccamggcccccgcccacaccttctggagggaaagttgcggagcccggtgagtaagcycttgtcctcagctcccggagccccatcckgccctggcccagggacccaggggtccaggcccacagctgctkctttcctrgagaccctcccatcataggctctgggaggcctcagcggtgtctcccccacccctctcccacccaggtgtgtgctgccctgggctgagtttgagtccctcctgggcacctgccaccctgtggaaccaggctgcacagccctggccttgcgcaccaccattgacctsacctgcagcgggcacgtgtccatcttcgagttcgacgtcttcaccaggctctttcaggtcagggaaggccaaggctgggagctagacttgggtccaggaggaagtagagggctgaatcctggattcctgggtctgagggaggaagggccgggacctggactcctggatctgagggaggaggggccggggcctggactcctgggtctgagggaggagggggctgggacctggactcctgggtctgagggaggaggggctgggggcctggactcctgggtctgagggaggagggggtgagggccyggactccagggtttgagggaggggagggckgggggcctggactcttgggtctgagggaggaggaagctagggtcccaaactcctgagttctggagaaagaagagcttggggtcttgtaaaagggatatgcctgaggcccaccatgggtgtgaaggaggtggttggatcctcgagccctagggactacttagggatgtgagctgcttccctggtcgctccctgacccaagccctgccccaccccagccatggccaacactcctcaagaactggcagctcctggcagtcaaccacccaggctacatggccttcctcacctatgatgaggtccaagagcgtctgcaggcctgcagrgacaagccaggcaggtaaagggtccagggctcagcagaacaaggctgcagggctcagggatctgggctctgggctggtgcgtggtggagcccagatgtccttccaagagtgggaacagaggtacccaggaccccagagagttgataactcagaggcaggacactgagtgcccctcccagcccgcctcttctctcraggcctcctgtactgtcccataatcctgcagctaagggacagtgcccgctctagcaaggagcccaaagacccgcttgagggtaaggtccgtttctggtaggtcagagtcatgttgtaccatctgttcagtattttgagtatgaatttcccacctgttggcataggagactgaaaaacaagacatgagagtccttaaattatttcaaccaggagttttgagctgttgggtccccctagagggctgagaattgagctgtctagataccaagagaagagaaggtcaggtttgtgagtctctgcagggctgaggtgcaggggtaggacggtgagtgcrttagcattcttccagttacacttcaaacttatttaagggaaaagaaaaaggaaagaataaattcctataattgaaaaggccaggccccgcacagtggctcacacctgtaatcccagtactttgggaggccgaggcgggcaaatcacttgaggtcaggagttcgagaccagcctggccaacatggtgaaacctcatctctactaaaaatacaaaaattaggcctggcgcagtggctcacgcctgtaattccagcattttgggaggccgaggtgggtggatcacctgaggtcaggagttcaagaccagcctggccaacatagtgaaaccccatctctactaaaaataccaaaaatttagccaagcgtggtggcgtgcacctgtaatcccagctacttgggaggctgagacaggagaatcacttgaacccaggaagtggaggttgcagtgagccaagatcacgccattgcactcctgcctgggcaacaagagtgaaactccatctcaaaaaaaaaaaaaatacaaaaattagcctggcatggtgatgcgtgcctatagtcccagctacttgggaggttgaggcacaagaatcacttgaactcgaaaggtggaggttgcagtgagccaggatcccgccactgcactccagcctgggcaacagagcaagactctgtctcaaaaacaaaaaggaagaaaagaaaagaagcctagggtgtgggtttcaggcacagctagatccaggtgctcaatggctactgtcaggaatcagttcctgttcatcccctttctctgctttcctctgtttgcttcattctcaaacatggtttctcctcattgtggcaaatgacttctagaagtcccagctgtgtaccctaccttcttagcaacctctgtaagaaagggggcaccttgctctgacacttgcagcgaaagtcccagaacggactcccatcactgtggtcaggggtcctgaaatgcactgattggccaccccagccttgtttaaactccagtgaagcgaggagagatctccaaatggaatcagggctgtttttatcataaaagagccaagcaggcaaaaacagcatatatcccctagagaggcaggcaggggtctagcacatgccgttgcctagaggatgggaagctgggggtgaggacctagacacctggattcccaacaggccaggggactggaagttcacaaaagggatggcagtgaccactccctcaccccatcctacctacctctccctccagttacatcttccggcccagctgtactcgcctggggcagtgggccatcggctatgtgagctcagatggcagcatcctgcagaccatccctgccaacaaacccctgtcccaggtgctcctggagggacagaaggacggcttgtgagtctccattctsgtaggaggagggtgtcagcaaaatctggttggaaagatcttgcatgttgtgcactgccggtggccaccacgtttgagggtgcaaccattcacataggggacatctcaaatctgcagtactacaaaattccagcaggtggcagtcaaaggtcttgaggaaggggcgcctctgaggktcgcacaaagtggccatagatcgggcccagccacagctccgaggagaagtgtgtggggcattgggcacaaccgcaagggctccattccttggaactgagctcaagagcgtttgcttctattttcttcctcttttactttagttaatttttaaaaaatgagatggggtttcgccatgctgcccaggctggtctggagctcctgggctcaagcgatcttcctgcctcggcctcccaaagtgttgaaatgacaggcgtgagccaccgtgcccagccagcttttgtttctagatatgagatcctgctctagaatctagattgatggggcagaaacagaactggagaacttgctagacaggtgtttttttttttttttttttttttttttttttttttttttgagacagagtcttgctctgtcgccctgactggagtgcaatggcatgatctcggctcactgcaacctctgcctcccagattcaagcgattctcctgcctcagccgcctgagtaggtgggattacaggcrcccaccaccacacccggctaattttttgtgtgtgtttttagtagagacagggtttcaccatgttggtcaggctggtctcgaactcctgacctcatgatccacccacctcggcctcccaaaatgctgattacaggcatgagccaccatgcccggtcctaagttttggatttttaatagagatggggttttgccatgccaggctggtctcaaactcctgacctccagtgatcttcccttctcgaactcccaaagtgctgggattacaggtgtgagccactgtgcccggccaggaagacaggtttcttttcagagtttcacctttagccagaattttcttatcagtcatatctatatgactactgacatacaagagaggagataggaaggtaggtagctagctagatagtcagataggtagatagatagatagatagatagatagatagatagatagataggcagataggtagatatgctgttgattatttgcaataattattattaattttttaatatataatttttttaacatttttggtggggcacggtggttcacgcctgtaatcccagcactttgggaggccaaggcaggcggatcacctgagatcaggagttcaagaacagcctggtcaacatggtgaaaccccatctctactaaaaattaaaaaaaattagctgggtgcagtggcgtgcacctgtaatcccaactactccagaggcagaggcagaattgcttgaacctggcaggtggaggtttcggtgagctgatatcacgccactgcactccagcctgggtgacagagcgagactccatctgaaaaaaacaaaacaaaaaaattttattgtatatttggtagagatgggggtggggtgtggctcaccatgttgcctaggctggtctcgaactcctgaactcaagcaatctgcccgcctcaccctcccacagtgctcagattacaggtgtgaaccacacgcctggccaatttatagtaattatcttctataaaatcaccacacaccctgaattattgaatatcaagccgttgctcccaggggaaatacattcttgggtcctgagtagctaggactacaggtgcacgccaccacgcccggctgggtcaccacatttttgtcaaccagtcacaacatagtaacctttatgtatgttttcgtttaaagacactttattcaaggccgggcgcagtggctcacacctgtaatcccagcactttggaacaccgagtcgcgcagaacacgaggtcaggagatcgagaccatcctgcctaacactgtgaaaccccgtctctactaaaaacacacaaaaaaaattagccgggcgtggtggcgggcacctgtagtcccagctactcaggaggctgaggcaggagaatggcgtgaaccctggaggcggaggttgcagtgagccgagatcgtgccactgcactccagcctgagcgacagagcaagactccgtctcagaaaaaaaaaaaagaaaaaaagaaaaaaaaattgacactttattcagtacctattgttggttcgctaacattgaactcacaaccaacagcagtataacttgtgtctcagcaaagcttatacaacacacacgttttctccataagacacatcacagccttctttcacttaggaacaggagacaacacttcagctactcttggggaccatttaaaacagaaaaatcagaggccgggcatggtggctcatgcctgtaatcccagcactttgggagactgaggcaggcagatcacttgagatcaggagttcgagaccagcctggccaacatggtgaaacctggtatctagccaggcatggtggtgtatgcctataatcccagctactcaggaggctgagacgagaattgcttgaacccgggaggttgaggctgcagtgagccaagatcacgcctctgcattccagcttgggtgacagagtgagattccatctcaaaaacataaaaataaagtcaatcataagctgggcrcagtggctcacgcctgtaatcccagcactttaagaggctgaggtgggtggatcaccaggccaggagatcgagaccatcttggctaacacggtgaaacccygtctctactgaaaataacaaaaaattagctgggcgcagtggcgggcgtctgtagtcccagctactcaggaggctgaggcaggagaatggcgtgaactcgggaggtggagcttgcagtgagccgagatcgcgccactgtacttcagcctgggtgacagaaccagactctgtctcaaaaaataaaaataaaaataaaataaagtcaatcrtagaagtcccttcttattgggtgtttatgcacagaggaggacgctgcatttaaawtttttttctaatttaaaaaatttatttgcaccgggcacccagcaaagtgctgggattacacggtggctcacacgtgtaatcccagcactttgggaggccgaggcgggcagatcacctgaagtcaggagttcaagaccagcctggccgacatggtgaaaccccgtctctactaaaaatacaaaaattaaccaggcatggtggcaggcgcctgtaattccagctacttgggagggtgaggcaagagaattgcttgaacccgagaggcagaggttgcagtgagccgagatcacgccattgccctccagcctagggcacaagagtgagacttcatctcaaaaaaaaaaaaaaaaaatttattcgccaagcatggtggctcatgcctgaaatcctagaactttgtgggaggatcacttgagcccaagagtttgagaccaacctggacaacatagtgagcccccatctcaataaagagaaaaaaagcaaaaaaacaaattcagttaaccgcacaaggtcatccactcatgtttgtcccaggtctggcctccaaactggctgggctcaacgaaccctccctttgggctctccaaagtgctggggttcacaggtgtaaaccactgccacctggccagcgcttcatgtttcttttggtggttctttttttttcctgtgacagggtctcactgtcacccaggctggagtgcagtgacatgaacacggctcactgctgcagcctcgacctcccaggctcaggggattctctcgcttcagcctctcctgagtagctgagaccacasgcacatgccaccatgcccagctaatttttttaatttttttttttttagacatagtgtctttctgtgttgcccaggctggtctcgaacccctgggctcaagcaatcctcccgcctcagcctctcagagtgctgggattcaggcatgagccactgctcccagccagggctgcatgttttataagcactgtctttcttatttatttatttttaaaatttcttttttttttttttttttgagacagagtcttgctgtgttgcccaggctcgagtgcagtggtgcgatatccattcactacaatctctgcctcctgggttcatgaaattctcctgcctcagcctcccaagtagctgtgattacagacacgcacctccatgcctggctaattattattgkatttatttatttattttgctatttttagtagaaacggggtttcaccatgttggccaggctggtctcaaactcctggcctcaaatgatctgcctgccttggcctcccaaagttctgggattacaggtgtgagccactgtacccggccagcactgtcttatttaatccatcacaaatctttgcctcaggcatgatcatgtccatgttacagaaggggaaactgaggccagaaaggtcgagtggccccagccaggtcacacagtgtgttagtgagagagccactgtggggcccaggtcagggatcctgcactgctccacatgacaggccaggcagggccactagcctcagggagtctgagggtccaatatttcatgtgstatacatgtcggaataactggagtagcattgaggcatgccagataggccgaggaaatgatccagggggagacccagggagcccagagcttgcttctccggtgtcctggagcccagtgctgagatctcgcctacaaccctggttctcggtctctctggtccttgctgtgtgaccttgggcaaatgcctttcccaccctgagccttgggtcactgtctgtgagggaagaagtggtacaggtgctctcagaggatctttccatcctgatattatcagattctaggatttgatcactttcatgatctgtgacactaaaatctgttatgcttgggcgtggagaagggtgaggttctagaagagctaagccagagattttcccttttttttttttgagacagagtctcactctgttgcccaggctgcagtgcaatggcatgatcttggctcactgcaacctctgcctcctggattcaagcaattctcctgactcagcctcctgagtagcatgcaccaccacgcccagctaatttttatattttcagtagagacggggttccaccatgttagccaagctggtcttgaactcctgacctcagatgatccacccacctcggcctcccaaagtgctgggattacaggcgtaagccaccacacctgccctaagccagaaattttcatatcgttttctggttcttagtctatctcatccttgtttctggagcttgagtcactgaggttttgtgtgccctaccttgggagtctgaggggacatagccctgccctggggtatctgagaagacacagtcccaattagaggtgggtggagggaaaataagcccaggccagcaatggatttgggacagatcctcaactcagggaaatatggggccctgtagggggtaaaggtacttgttcatctgggggtgggaaatactggatggccccccagtccccctctcttcccttcccccagctacctctacccagatggaaagacccacaacccagacctgactgagctcggccaggcagaaccccagcagcgcatccacgtgtcagaggtgagacccgcacctgcacccgcagtcccagttccctgaccctgccacccccacgttgccttggctcagaggcctggggttggaatgttggcttggtggctctgtgaccttgggtaaatcacttgacctctctgaggctcagttattcttccggaaaatacggctcctcctgcctctttcccaggggtgatcacggggattaaataaggaactgatgctgctgagatcatcaggacagctaatgcattcgagcatttgccagcaatagccccgtgccagctcctaatcttcacagccaccctacgagtgagaaaaacaacaataacaaataaataatttattttttatttatttttatttttagagacagratctcttctgtcgcccaggctggagtgcagtggtgcgatcatggctcactgcagcctcgacctctgggctcaagcaggcctcccacctcagcctcccgagcagccaggagtacaggtgtgagccactgcacccagctaatttttgtatttctctgtagagatggggtttcgccatgttgcccaagctggttttgaactcctaggttccagcaatcctcccgcctccacctcccaaagtgctgggattatagccatgagccactgtatctggccctaaattttttttagtataaatatatcccgtgcaatatttgggacatccttatacttcaaattgtattcacggtttacatgaaattcaaatttggaggccgggtgccaccgcacccataatcccagcactttggtaggccgaggccggcagatcacctgaggtcaggagttcaagaccagcctggccaacatagtgaaacccatctctaccaaaaatacaaaaattagctgggtgtggtggctcacacctgtagtcccagctgaggcacttgagttgggaggctgaggcacgagaatcacttgaacccaggaggcggaggttgcagtgagctgagatcacaccattgcactccagcctgggcaacagagtgagacttggtctcaagaaagaaaaaaaaaaagaaagaaagaaattcaaatttaggttaggcacagtggttcatgcctgtaatcctagtactttgggaggctgaggcgggtggatcacttgagcctgggagttggcggttgcagtaggccaagattgcgaccctgcacttcaacctgggtaacggagtggggctcygtcccgcaaaaaaaaaaaaaaagaaagaaagaaaaataatgaaattcaaatttagcagcatcagcatccaatacttttatttgctaaatctggcaccactgggtgtagacaactggggagaagaagtctcataacaaggagtgaagacatggccgggcgaggtggctcacgcctgtaattccagcactttgggaggccaaggcgggcagattacttgaggtcaggagttcgagactagcatggccaacatggtgaaaccccatctctactaaacatacaaaaattagccaggtatggtggcttatgcctgtagtcccagctactcaggaggctgaggcacaagaatcgcttgaacctggaggcaaaggttgcagtgagccaagatcgcgccactgcactccagcctgggcaacagagcaagactgcgtctccaaaaaaaaaaaaaaaaaatgagtgtagacatgtaggaggccattggacatgccagccttggacttaggagagggttcagttctggcacagaggtttggtttattattttttttttaaatagagacggggtcttactatgctgcccacgctggtccagaactcctgggctcaagcattccacctgccttggccgccagaagtgctgggattacaggcatgagccacagcgccaagatagaggaggtgtgggattttctttctttcttttttttttttttgagacggagttttgctcttgttacccaggctggagtgcaatggtgcaatctcagctcactgtaacctccatctcccgggttcaagcgattctcctgcctcagcctcctgagtagctgggactacaggcatgcaccaccatgcccagctaatttttgtatttttagtagagacggggtttcaacatgttgaccaggctggtctcgaactcctgacctcagatgatccccctgcctcagcctccaaagtgctgggattacaggcgtgagccaccacaaccagccgaggtttgggattttcttcctgtggcccaagttgtgtcccygtggctgacgcatgcccctcgctgtcttctctatcctctcacctgccaggagcagctgcagctctactgggccatggactccacatttgagctctgcaagatctgtgctgagagcaacaaggatgtgaagattgagccgtgygggcacctgctctgcagctgctgcctggctgcctggcaggtgggtctgacccctgtggcgccttcccctctggtctccccctctctacagggaaagccccaaaaggatctccatgcctcattgatcatatggggaaaccgaaggccagagaggrcaaagagctgatggcaaccactcaggagcccggctgtctttcccagggcctctggttccatcccactctgcacacgctgcctctgtttctccctctccggcaatgttatcagtggaaagctctccttccttctctgcctaggtgatccccagccagtggcttcacgtctctgagccttakcctcgtcccctggagaacrgggctgagaatagtgacctcccaaaggccacagtgaggctgggcacggtggctcacgcctgtaatctcagcactttgggaggccggggtgggtggatcacttgaggtcaggagttcgagaccagcctggccaacatggtgaaaacccgtgtctactaaaaaaaaaatacaaaaattagacgggtgtggtggtaggggcctgtaatcccagctgctcgggaggctgaggcatgagaatcacttgaacctgggaggcagaggttgcagtgagcagagatcgtgccgctgcactccagcttgggtgacagagcgagactccgtttttttaaaaaacaacaacagcaagggccacctgagggtctgagcctggaaaggcctggcccggaagctgtggccacagctccatggggatccctggcctgtgtgccccctcctgacctcggctctggttccgttcctctctcaccttccctcccagcatttccctccacattcctctgctctccacgactcttctctccttccgtctcccttcctctgtctgtcttccccacatcaatcttttgggcggggagctcctcgttggcccaagggacaggatggagagcaggggagcactgaccctttccctcccgacctcccccagcactcggacagccagacctgccccttctgccgctgcragatcaagggctgggaggccgtgagtatctaccagttcyacggtcaggctactgctgaggactcagggaacagcagtgaccaggaaggcagggagttggagctggggcaggtgagcagggccagccgggagctggaatccaaattcctgaggcctgagtggggagggactggagcctggactcctgggtctgagggaggagagactgggggcctggactcctgggtctgagggaagaggggttggagcctgtactctgagtctaagggaggagggctgggggtcctggactcctgggtctgagggaggaggggctaggggcctggactcctgggtctgatggaggtgggtatggggacctggactcctgggtctgagggaggagaatatgggggcccggactcctgggtctgagggaggaagagctgagggcccacactcctgggttctaggagaggagggggctgataacaagattctcaggtcctagggaactggtcttttgcttccccaagggctggggctgtggctttccctggctgtaaccctcctaagtgttcatacgttgtcttggtctctgttatatcttgagtctagaacagtgccwgaatgctgagtcccaggcaggagaacatggaggcgagaagaaaatggcagctcacaagccccttctccttcctctgtcccmccccaggtgcccctttcggctcctccattgcccccacggccagatctgccccccaggaagcccagaaatgcccagccgaaagtggtgagtcaggcgctggtctgaggttgggggctggggtctcactcacctccagggtccctggttcacctgtgcactcaggggtgccagggcagggactcatccttggcacccatttccaaggcacccatcccctctgtgacctcttcccttgttttcattccccctctgggactttctttttttttttttttttttttttttgagacggaatcttgttctgtcgctcaggctggagtgcagtggcgcaatcttggctcactgcaacctccacctcccgggttcaagaaattctcctgcctcagcctcctgagtagctgggattacaggcacccaccaccaygccccgctaatttttgtatttttagtacagacagaatttcaccatgttgrtcaggctggtctagaactcctgacttcattatctgcccccctcagcctcccacagtgcggggattacaggagtgagccactgcgcctggcctcaaggactttctagctctccttccagcatcccagatgtgtcctacctcrgggcctttgcataagctgttcccttggcctgcacagtctttcctgaggcttgctttcccatcccttttcagggaggccttccctgaccactctgttcaagatagcacccctagctggggtggtggctcatgcctgcaatcccagtactttttttttttttttttgagaggagtctcactctgtagcccaggctgcagtgcagtggcataatctcggctcacagcaacctctgcctcccagattcaagcaatgctcctgcttcagcctcctaagtagctgggactacaggcacccaccaccatgcccgactamtttttggatttttagtagagacgaggttttgccacattggccaggctggtctcaaacccctgccctcagctgatccaccgccttggcctcccaaagtgctgggattacaggcatgagccaccatgcccggcctgcaatcccaacactttgggaggccaaggcaggaggacggcttgagcccaggcatttgagaccagcctgggcaacatcacaagaccccaacactacaaaaaaattttaaaattagcccaaagtggtggcgcacacccgtagtcccagctgctcaggaggctgaggtgggagggtcccttgatcccaggagttggtagctccagtgaggcgtgatcacaccactgcactccagcctgggcaacagaatgagaccctgtctctaaaccaataaaaaaaaagagtctgtaatcccagctgttagggaggcagaggcaggaggaaagcttgagcccaggattttgagacctttctgggcaatatagcggaaccccgttctctaaaaaaaaaaagaaaagatgaaaatagcaccgctgtccctcggggccctgctckgctgtatgttcaaagatctttcgccacccggcagagcttagggttggttttgtcggcttttatcactgtcaggttgcaaccttcctgcaggtcaggcctttgttgtcttctccgtcatatctccagagtgcagaacagtgcctagcacacatacacgtcataggtgctcaataaatagatgccaaatgaatacactgaagtgagtcttcccaacagccctatgaagtcaaaagtgttcctctcccggctgggcgyggtggcttatgcctgtaatcccaacattttgggaaggtgaggcaggtggatcactgagttcaggagttcgagaccagcctaaccaacatggtgaaaccctgtctctactaaaaatgcaaaaattagctgggcgtggtggcgcacacctgtaatcccagctacttggaagactgtggcaggagaatcgcttgaacccgggaggtggaggttgcagtgagccaagatcgcgccactgcactccagcctggatgacagagggtgagaccctgtctcaaaaaacaaacaaacaaatgaatgttcctctccccattttccagaggaaaaaarttcagagaggtgacagtacctgcccaaaaccacacagcctgaaagaggagaagtcagcgttggagtctttaaggcccccaaaccatctacttatttttttgttgtttctttgtttgtttgtttttcttttgagatggagtttcactcttgttgcccaggctggagtgaaatattatgatctcagctcactgcaacctccgcctctggggttcaagctaattctcctgcctcagcctcctgagtagctgggattacaggcaggtgccaccacgcctggcaaattttgtattttttagtagagatggggtttctccatgttggtcaggctggtctcgaactcccaacctcaggtgatccgcctgcctcggcctcccaaagtgctgggattacaggggtgagccaccgcgcccggcctacttattttttaataagccctgtcctggctttcttttctccctacgctgccaccccaggatttttgggaccctggaytgctggggagaagcagatctcttagtatctccggctragtacacacaggcttcgatcaatactgagctgtcttcaaacaaacagctcaggaagtccgggaacattattcgaccacagcaaacaagagagccagcaggaagcggggcggtgggggggagggtggcggtgaaaccagccagggaagctaaaaacagatccaacctgccgccaaaagcaaatggaaacattaggaggcactcagccggctcccagaggacagtgatgggggacacagccaggacagcaggctgacagggacctcgggcctgatggtgacacctttgcctaggccataccctccgcctcccccaccctttcctcctctccccaaaccctgcctgattaaaattccagtccactcccacctagtctttcattcttcaaaacataccacagaagagacagccttgggtttgttacttctcagcaaggcactgtcataacttttgttgttgttgttgttgtttgagatggagtctcactttgtcacccaggctggagtgcagtggcacgatctcagmccattgcaacctccgcctgccaggttcaagcgattctcctgcctcagcctcccgagtagatggggtcacaggtgctcaccaccatgcctggctaatttttgtatttttagtagagacagggtttcatcatgttggccaggctggtcttgaactccttacctccggtcatctgcctgcctcggccttcttaagtgctgggactacaggagtgggccccgcctgtcataacttttgctatgtgcctggcattgctttttttttttttttaagatggggtctctgtctagcggagtgtggtggcgtgcacctgtaatcccagctactcaggaggctgaggcaggagaatcgcttgaacccaggaggcagaggttgcagtgagccaagatagcgccattgcactccagcctgggcgacagagcaagactccatctcaaaaaaaaaaaatagggtctctgtcagccaggctggagtgcagtggtacaatcacagctcactatagcctcaatcttctgggctcaagtgatcctccctccttagcccccagagtagctgggactacaggtgcctgtctccacacccgaatcatttttaaattttttgagcagtgaggctggggctgctgtggacactggatgtgatgggactgtgtcagtggtcagtgtcaccgtggttgtgatctgtgtatggtgctgtggcccctggggttgctgtctgcacgctgctgttctccatctgagaaacctccctttaggggacgacactgccattgagctggatctcatcaccccactgaccactgaggacctctctgaccctcagtgttttcatggggaaaatggggaccagcctgacacaagccccacaggctgggtttttttgtttgtttgtttgtttgttttaatgttttaatttaattagagacagagtctcaccgtgttgccgaagttggtctctaactcctgggctcaagtctcccaaagtgctgggattgctggcattagccacttcgtctagcctccccatgagttttgatgaagccagcaagctcagtcatctctaacctgagtcatatcccctccctcacctctcagaaatctccactggcagccaagcgcggtggctcacacgtgtaatctcagcactttgggaggccgaggtgggcaaatcctttgcttgaggtcaggagttcgagaccagcccggccaacatggtgaaaccccgtctctactaaaaaatacaaaaattagctaggcgtggtggcgggcacccgtaatcccagctactcgggaggctgaggtaggagaatcgcttgattctcgcttgattatcgcttccgccaggaggyggaagttgcagtgagccragattgtgccactgcactctagcctgggcgacggtgcaaaaactccgtctcaaaaagaaagaaagaaagaaagaaatccccactggctccccagggctctaagaactcaagccaaagtcctctccgccgcccaaagacctggggctggggatctgactcttccccacctctctgatctcccctactccacctcctttccggcaacattggacccttgctgctcttctaacttgccagcaagcctccactcactcggagcctctgtctggatccttcttgcactcaggcatcagctgggtcattcccatctccaagaggcctccccggcatcttccctctcccaggcactttgaaggacatggaacttgctctgggacatttccttgttcaggagctgatcagtcactgcgagcctcgggttcagtggagcatcagctccaccaggacaaagatagttttctgtcttgttcacagctgtcttctcagagcgaaaaacagggccttggcctggcgcggtggctcatgcctgtaatcccagcactttgggaggctgaggcaggaggatggtttragcccaggaggtcaaggctgcagtgagctatggtcccatcactgcactccagacgaggcaacagagcgagaccctgttttgctttgttttgttttgagacagtttcgctcttgttgcccaggctggagtgcagtggtgcaatcttggcttatggcaatccccacctcctgggttcaaacgattctcctgcctcagcctcccaagtagctggaattacaggaatgtgccaccacccctggctaatttcgtatttttcatagagacagggtttcaccatattggccaggctggtctcaaactcctgacctcaggtgatccacccacctcggcctcccaaagtgctgggattacgggtgtgagccaccgcgcgtggcccctgttttttcggtttgttgttgttgttgttgttgtttttwaaaaagaaagaaaagtaaagaragagagagagaaagaaagggagagaaagaaggagggagagagaaaggaaagagagagaaatagaaaaagaaagaaagggagggagggaaagagaaaaaagaaagaaggaaggaaggagagagcgagagagaaagaagaaagaaagaaaagaaaagaaagaaaaagaagaaaaaagaaagagaaaaggaaaagagaataaaagaaagaaagggcctgacccactggagaggcttgggaactgtctgtggggcacacargtgagcagaagggtggacacatggatggacaggcggacagacaaactgaaacttcatcctacacgagttagaggtgagagggaaaaggcagcatggactagggacaaggccaaaggtcctgtcagatggtggccgccaccactgtgtcacccctgtccagggcctgtgaaaggacgtccacccaggctgcagcctagcagagacatttcttcatctcctccccccaggcacttttggccctccccagacttcgggcccctcttctcttgccaagaattaaggctgtggcctcagccgcgcaggaagccacctccagcccccaggtggtctgggactcccaggtctaagacaaaggggacagggaagaggsgcagagggaaagattggatgccgggaatcaaccgccctctcaaaatatctccattgcagagactcctaaaggggaactcccctccagctgcgctgggaccccaggaccctgccccggcctgaaggccaggtgagtccattccctaaccctccctggcccactccaccccactccaccctcctccacctggaggtgacctcatctaacccacccctctctccgcctacagggcacccagatgtgctgctcaagggagccccaagggctggaagggggttgtgaaaccgaaataaactgccaagcctggtctgtcctccagggtgcaaaggaagagtgcagtggccagcagggggcagcagagggcagcaggcactgggaaagggccgtccccaggcctggtccccacctgaacaacaggagtccaggccccagcccctcctccctcagactcaggagtccatactccagcccctcctccctcaracccaggagtccatactgcagcccctcctccctcagacccaggagtccatactccagcccctcctccctcagacccaggagtccatactscagcccctcctycctcagacccaggagtccatactgcagcccctccttcctcagacccaggagtccatactscagcccctcctccctcagacccaggagtccatactgcagcccctcctccctcagacccaggagtccatactgcagcccctccttcctcagacccaggaatccatactgcagccccttctccctcagacccaggagtccaggccccagcccctcctccctcagacccaggagtccatactgcagcccctcctccctcagacccaggagtccatactccagcccctcctccctcagacccaggagtccatactgcagccccttctccctcagacccaggagtccaggccccagcccctcctccctcagacccaggagtccatactgcagcccctcctccctcagacccaggagtccatactccagcccctcctccctcagacccaggagtccatactgcagcccctccttcctcagacccaggagtccatactgcagccccttctccctcagacccaggagtccaggccccagcccctcctccctcagacccaggagtccatactgcagcccctcctccctcagacccaggagtccatactccagcccctcctccctcagacccaggagtccatactgcagccccttctccctcagacccaggagtccatactgcagcccctccttcctcagacccaggagtccatactgcagccccttctccctcagacccaggagtccaggccccagcccctcctccctcagacccaggagtccatactgcagcccctcctccctcagacccaggagtccatactccagcccctcctccctcagacccaggagtccatactgcagcccctcctccctcagacccaggagtccatactgcagcccctccttcctcagacccagtagtccatactgcagcccctyctccctcagacccaggagtccaggccccagcccctcctccctcagaccyaggagtccaggccccagcccctcctccctcagacccaggagtccagacccccaaccccttctccctcagacccaggagtccaggccccagcccctcctccctcagacccaggagtccagacccccaaccccttctccctcagacccaggagtccaggccccagcccctcctccctcagacccaggagtccaggtccccagcccctccaccctcagatcttcaaatggaatctggggccaggcacggtggcgcacgcttgtaattccaaggctttgggaggccaagtgggaaagactgagcctaggaagctgaggttgcagggagctgtgattgtgccacagcaatccagcctgggtgacagaccgagatcctgtcttaaaaaaagaaaaaaaaaaaaaagaaactgggcccccagccttctctgtgatacccaggagtcctgctctcaggatttagaagtccagaatcccaagttttctgagaatcgggcatccaaccctcctgcttcatcatggcaaaaaaaatccctggacctagacccagatatccaggttaagtccctggtcaaaaggaccacacatttccctgatggttatccaccttgccttgccacggtctgtgctcatccctctctctgtccttcattcctctctgacatctttctcccagagtaactgctaacttccagtctaaatcttgctgaggaagaagagataccacctcatgattcatcttggagtggcccaagcctccctccaccttgtttaaattgccccattcccggagaccttgccctgtgcccagcgctgggctgagcaatgctgaccaggaagcagtgatcactgccccactagggctcaccttccactagaggaaagagacctgtccctagacagtgatgacccagagtgggcatggctggggtagggaatcccagggggctacaggaacccagagtgggcacctgactcagcctgggaggtcagggagtgcttccaggaggaggcgatgtctgagctgatacttaaaagatgatgaggccagacgtggtggctcatgcctgtaatcccagcactttgggagactgaggcaggcgggatgcttgagctcagaagtttgagaacagcctgagcaacgtgatgaaactccatctccacaaaaaattttggaaaaattagccaggcatggtggcacatgcctgtaagtcctagctactcaggaggctgaggtgggaggatggcttgagcctgggaggtcaaggcttcagtgagccgagattgcaccactgcactccagcctgggcaacatggcaagaccctgtctcaaaaaagaaaagaaaattttttaaatgatgaaaaagtattccaatggacaggaggcttgaaagaatgtatcagggccgggcgcagtggctcacagctgtaatcccagcactttgggaggccgaggcaggtggatcatctgaggtcaggagtgaaaccccgtctatactttcaccccaacatggtgaaaccccgtctgtactaaaaatacaaaaattagccaggcatggtggcgggcacctgtaatcccagctactcgggagactgaggcaagagaatcacttcaacccaggagatggaggttgcagtgagccgagattgtgccattgcactccagcctgggcaacaagagcgaaactctgaaaaaaaaaaaaaaaaaaggaaggaagggagggagagagaggaaaaggaaggagggaaggaaggaaggagagaaagaaaagaaaggaaggaagaaagaaagaaagaaaagaaagaaagagaattttcacagatttagttccaagcaacagatgctacctcaggggcagaaagggaatttattgagaggatttggggtcactcacagaatcccaggagtgaactggggaatcaggattggaaagtgagcaggaagaatcctggcaactggccagcaatggtaacccagccacagtgacaccacggaaccggtctgatgaggccatgctggcgatggccactagacactgtagttgtctcgctgcctctgctgccccagaaataggatatggctgctcttctcattagctgttgctggtaataaatcacttcacaacttagccgcaaatgacagcaatcattgcattaagtctcatggttgctgtgggctgggatttgaagaaaggcgtggctggtttgttttggctcaggatgcaaacaaacagtgcaatcagtgatgcttgccacagggcggctgggggtgctggacaagtgggcatctctctgtggtctcagggcctcccccaccatatagtctctgcactggccagcttgggcttccccacagcatggctgcctcaaggtagtcaaactttatatggccgctgaagacccaggcagaagctgcatggccttttctagctcattttgggagttccgcaacttcacttcagctgaattctgttggttgtatgcaagtcaccaaactgcacagatttgagaggagggtgccatagaccccagctcttgatggaaagagtatcaagctctcattgtggaaacacacatgggatgaaagacactgtcacaacatggcaaaaccccattcctacaaaaaaaaaaaaattaactaggagtggtggtgcacacctgtactcacagctacccaggaggctgaggtgagaggatcacttgagccctggaggacgaggctgcagtgagccatgatcatgccattgcactccaacctgggtgacagagcaagaccctgtctcaaaaagaaaaaagaaagagattgttgtagccgtctttggaaaacagaatctgtcccagctgccatgcatggctggaagaggtggccaattcctgatattcaaaagtgtggaaggatttgccaagcttaagtcaccttagctccaacagatgcaggaaagcaaacatccattcttgttggcttcaagagtgggcaacagaggctttcagacagtaggaatttccttaaatgtgggaaggagctgcagatgctaggtaatccttcccgcaaaatatgtactatagcccgctcctttggttttttttgttgtgttttgttttttagacaaggtctcactctttcacccaggctggagtgtagtagcacgatcttggctcattgcagccttgatctccccagttcaagcgatcctcccacctcagcctcctgagtagctgggactacgagcacaaaccaccaccacccccggttaatatgtattttttgtagatacagggttttgccatgttgcccaggctggtcccaaattcctgggctcaagcgatccacctgcctcagcctcccaaagtgctgggattgtaggtatgagccaccacagctggctttgaatgttcaatatcaataggccctttgcagaagttcttatcgaaactttccccgcacaaccgtctctcattgtacaatcaaaaaatgcattcacactgccacccaatacaaaaaatttcaatagttccattttccagatctgagactggaatcagggaagaaccattcccctccaaatatgtcattctccccatattccacaagctgtgagctagttgtaaagttaatcgtcacacactgtgtgaaaaataatgggaaaaaaggtcaagaaaagataagtcagccaggcactgtggcttccgcctgtaatcccaacattttgggaggctgaggctggtggatcacctgaggttaggggttcgaaaccagcctggccaacatggtgaaaccctgtctctactaaaaacacaaaattagccgggcatggtggcgcatgcctgtaatcccagctacttgggaggctgaggcaggagaattgcttgaacctgggaggcggaggttgcagtgagccaagatcacgccattgcattccagcctgggcaacaagagtgaaactctgtctcaaaaacaatgaaaaggtaagtctggccaaccgtggtggcccacacctataatcccagcactttgggaggctgaggtaggaggatcgcttgagcccagagtttcagaaaagataagccttgttagttaaaatatgtgaggatatacacctgcggccgcatggatggaattagaactttttttttttttttttgatactgagtctcgctctgtcacccaggctggggtgcaatggcatgatctcagctcactgcaacctccacctcctaggttcaagcaattctcctgcctcagcctcccgagtagctgggattacaggcacctgccacaacccccggctaatttttttattttaagtagagagggggtttcaccattttggccaggctggtctcaaactcctgacctcgggtgatccacccacctcggcctcccaaagtgctgggattgcaggcatgggccaccatgactggccatttttatatttttttgtagagacggggtttcgctatgttgcccaggctggtctcaaactcccgggctcaagcagtcctcccgcctcaggctcctaaattgctgggattacagacgtgagtccctgcggctgacctggacctcagcttttaccctaagtgagacagaagtcatgggaggaccctggggcagaagagtgacatgagttgattcacatgtaaaaggaatccttcaggctgttttgtgagaataaattacaggggacaaaggcagatgatgttacaagactagtttctgcaagtctgcaagggtccacggctgctgttttggtgtttctgacttttctccttcatacacatgccatagagttctcctccctcacccagaacctcagatggctaggttcttctttttttttttttttttttgagacagaatttcactcttgttgcccaggcaacatcgtgcagtggcacgatctcagctcagtgcaacctccacctcccagattcaagcgattctcctgccttagcctcctgagtagctgagattacaggcatgtgccaccacgcccagctaattttgtatttttagtagagatgcggtttcaccatgttggtcaggctggtctcgaactcctgacctcaggtgatccacccacctcggcctcctaaagtgctgggattacaggcatgagccacagcgcccagcctcagctggctgggttcttgagggaggtggaagtgggcgatggctgctgagagggcatgtaccagggtccagcccaaacagaaggtgcacaggctggggacagaagagctagggtatgggtgtcggtgctcacagtgtgtgagcttgacagcacctgggactgtcttggagtgccgccgcattccccatgagtgagtttgtattgtatatcctgggatgctccagtctggatggaatctgcacgtgagtttgtgtgccttgcaaacaaaccttccctgagcacctgcactgtgtctggtcttgtgctgggcggggtgcccaggggaggagcccttagctcaccacagtgatcaagacatccctggccctgccctcacaggctcacagtccactgagggagacagacctatccccagccagggacccccagagtgtgccgggctcaggtgggggagcccagagggggaacctgacccagccagggaaggcagaggggacttcctggaggaggggatggtacagttaatcctaaaaggtctttcccaatgtaacagttgctctgtaggatggatgcagtggctcatgcctgtaatcccagcactttggaaggcaggaggatcacttgagcccaagagttggagaccagcctgggcaacatagtaataccctgtttctattaccaaaaaaatacaaaaattagctggacatggtaacacaagcctatagtcccagctacttgggaggctgaagtggaaggattgcttgagcccaggcggttgaggtttgaatgagctatgattgcgcccactgcattcccggctgggcaacagagcgagaccctgtcaaaaacaaaacaaacaaacaaaaaaaacgttggtctcctgtatgaccaatggataaagtaaccttgacca

SEQ ID NO: 95031 - DNA, 28477 bp, Homo sapiens
tatgaatcaaatggcatcgtaaatggcccggtttgggaaagggatttgaggagtgcatgggggagggcattacagggtggtgggccatgggggtggagtgctgccctcccagagtctctcctggaggtggcagcctcttcctgagggtagggacagagacagatgagatgcttaagagtaagacagggtttgagggcagggctgccttgggaatggagggagaagagtgtagactgtaattccagttatactggctgtgaccttaggtaactcccttgcccttttcggccccagcgttcgtcctctgtgaaaagggggttcgacatgaagaagtggggatcaggaagagattaggaagacaagctccaggactgacagcctagtccagtcttgttctgctacttccctgctgtgtgactttcgataagtgttgcaacctctctgggccagccttactttcctgatttgtaaaaacggcagtaccttctagactcccagaagaaaagtaaattaaaaaaaaattggcagtactcacttcataggactgttggaaaattaaactagtgaatacccattaaagtccttggaccctgaagtcagatggctggggtgatgggagatgggttggggaagtgggtacactagagcctgatgacctagaaagaggctgacaatacagtctgatgtcggggagaagcctggaagttatttccaccaaagcctgaatccattcttggcagccttgtacctgtttgattcccagttctgcccccttccagctgtgtgactttgggcaagtcacttaacctctctgagccttattgttggggacgttaaataagtcaacatatgtaaagcacttagcacattacttgacatacaggtgtattcaataaaagttaactgtcagggcctggagtggtggtgcgcgcctgtagtcccagctactcgggaggctgaagcgggaggattgcttgaggcttggaattggaggctgcagtgcactctgattgtgcctgtgaataactactgtgctccagcctgagcaacatagcgagaccccatcaagaacccatgtctaaacaaacaaacaaacaaacaaaagcttctttgtggagtggctgtttaatgtccatgttaacctccttcgagcacattctcctgtcaatgaagaggctggaaagctaaagactagattttccagagggaaagtaggaaagtagttctggggcccgagcagtgttccttcagcccttccaacgattttgtcagtgcctaatacatgatagtacagtccttttttttttttttttttgagatggagtctcgctctgtcgcccaggctgaagtgcagtggtgcgatctcggctcactgcaactccgcctcccgggttcacaccattctcctgcctcaggccccggagtagctgggacgacatgcgcctgccaccacgcacggctaatttttttttttttgtatatttttgtagtagagacagggtttcaccgtgttagccaggatagtctcgatctcctaacctcgtgatccgcccgcctcggcctctcaaagtgctgggattacaggcgtgagccactgcgcccagccaatagcagagtcctttctatttaagctgggtagtggttactctcgcctacatctgccagatacagttactattatttatttagtcaacaaatactcatttaccttgagggcactggggagccatggcaagctctgaggaggggaggtcagcaggtagggtttaggtgggaatggcaaagactgggacaggagtccagggaggaagttgggtcaggagggacagtggagggggtcttgagctagagtgggcagtggaggggcagaggtcggattgacagtcgggctctggggggtgggatgaagatacgtgatgagggttgtaaagctccccaaggccaactgtttctttaagactcaaagcagagggagctcacggcacaaggtcctgctggagcgtttgattggctcagcccaggtcactggcctggaccattgctgcaagggattctgggaaattgagtttctggcatctttggcttctccaaaggaggagggcttacagtggggaatccccgaacatagaaaaggcttctggcactgtgtggctaaaaagaatgtgcaatgggcccggcagggtgcctcacgcctgtaatcccagcactctgggaggccgaggtgggtggatcacctgaggtaggagtttgagactagcctggccaacatggcaaaaccccttctctactaaaaatataaaagttagcagagcgtggtggcccatgcctgtagtcccagctactcgggaggctgaggcaggagaatcgcttgaacctgggaggcggaggttgcagtgagctgacatcgcaccattgcactcctgcctggtgatagagcaagactccatctcaaaaaaaaaaaaaaaaaaacaaaccctcccacaaggtgtggctggaccgtgccacccaaaatgcgtgtggcatggatccagcctcttccctgcttatgaccctcagtgcctcctgtcagtctcacagtgggatgatgatgatgattttttccatttaatattttaaaaaattattctaaaaaattttttgtaggtatttagtaggtgtgtatatttatggggtatatgaaacgttttgttctttttttttttttttttttgagatggagtttcactctttttgcccaggctagagtgcaatggcgcgatttcggcccgcagaaacctctgcctcccgagttcaagcgattctcctgcctcagcctaccgagtagctgggattacaggcatgtgccaccaccccggctaattttgtatttttagtagagacagggtttctccacgttgatcaggctggtcttgaactcccgacctcaggtgatctgcccacctcggcctcccaaagtgctgggattacaggcgtgagccactgcacccggccatgaaatgttttgatacaggcatgcaacttgtaataatcacatcgtggagaatggggtatccatcttctcaagcatttatcctttatattacaaacaatccaattatactcctttagttattttaattaatttttgtgtgtgtgagacagggtctcactctcttgcccaggatggagtgcagcagtggctcgatcacagctcactgcagcctcgactgcctgggttcaagcaatcctcctgcctcagcctcctgagtagctgggaccacagatgcactccactacgcccagataatttttgtagttttttttattttttgtggagacggggtttagctatgttgccgaggctagtctctaactcctgggctcaagggatccttcctccttggcctcccaaagtgctgggattacaggtgtgagccactgcacctggcctattacccttctcaggctctggagtccatccttctgctctgtctccctcagttcaattgttttttgttttttgttttttttttagacacagtctcgctctgtcaccaaggctggagtgcagcagtgcgatcacagctcaccgcagcctcacctccccaggctcaagtgatcctcccatctcggcctcctgagtagctgagactataggtgtgtcccaccatgtccggctaatttttgtatttttagtagagacagggtttcaccgcgttggccagggtggtcttgaactcctgagctcaagcaatcctcctgcctcagcctccttgttttgatttttagatcccacaaataacttgtgatgtttgtctttctatacctggttcatttaacattttctttttcttttcttttcttttttttttttttgtgagactgagtcttgctctgtcactcaggctggagggcaatggtgccatctcagctcactgcaacctccacctcctaggttcaagcaattcttatgcctcagcctcctggctagctgggattacaggcgtgtgtcaccatgccaggctaatttttgtacttttagtagagatggggtttcaccatgttggccaggctggtcttgaactcctggcctcaagtgatccacccgcctccgcctctgcctcccaaagtgctgggattacgggcctgagccactgtgcccggcccatctaacattttcactgtcaatcacaatgggattaaaactcctcccacagcccctagggcaccatgggtctgctcctgtctcccctccaacctcatcttcttcctcccactctctccttggccccatgtgctccagtcccctggcctccttcctgtctgtcctcagatgtgcccagccattctcacctcagcgcctttgcacctgctgttccccccagagccgcacatggctggctccctgttctccttcaggtctctgctcagatgtcatcttcccaaagaggcctgcctcgacctcccctgctgctgtgccgtcccctcatctgtgaccctcttgcactatcacctccaggacggcgggggttttgtgttttgttgtagcctcaggaagtgcctgatagatccctgtttcgagaccagttccatttggttttctgggcctcagtttccgtaaccgtgaaggagaccctcggcaatctgagcttgctgggaaagggctgggccccatgtaaatatttctaaagcacccctctcccctcccccctcagatcaggagtctgagggagaggcacagaggctccctttctctaagccagtcctcacctgcctaagaagatgtgaaggagacccaggagaccctgggatagggaggaactcagagggaagggacattcttttcttcgtcgcaatcctgggagctccctggaggaggagacccgatcagcctgcaatcctggcgcgtcccaggaggagaaagcggcttcctctatactgtactctcctccacagaacccccctctcagccctggaagtccttgctcacagccgaggcgccgagagcgcttgctctgcccagatctgcgcgagtctggcgcccgcgctctgaacggcgtcgctgcccagcccccttccccgggaggtgggagcggccacccagggccccgtggctgcccttgtaaggaggcgaggcccgaggacacccgagacgcccggttataattaaccaggacacgtggcgaacccccctccaacacctgcccccgaacccccccatacccagcgcctcgggtctcggcctttgcggcagaggagacagcaaagcgccctctaaaaataactcctttcccggcgaccgagaccctccctgtcccccgcacagcggaaatctcccagtggcaccgagggggcgagggttaagtgggggggagggtgaccaccgcctcccacccttgccctgagtttgaatctctccaactcagccagcctcagtttcccctccactcagtccctaggaggaaggggcgcccaagcgcgggtttctggggttagactgccctccattgcaattggtccttctcccggcctctgcttcctccagctcacagggtatctgctcctcctggagccacaccttggttccccgaggtgccgctgggactcgggtaggggtgagggcccagggggcacagggggagccgagggccacaggaagggctggtggctgaaggagactcaggggccaggggacggtggcttctacgtgcttgggacgttcccagccaccgtcccatgttcccggcggggggccagctgtccccaccgccagcccaactcagcacttggtcagggtatcagcttggtgggggggcgtgagcccagcccctggggcggctcagcccatacaaggccatggggctgggcgcaaagcatgcctgggttcagggtgggtatggtgcsggagcagggaggtgagaggctcagctgccctccagaactcctccctggggacaacccctcccagccaatagcacagcctaggtccccctatataaggccacggctgctggcccttcctttgggtcagtgtcacctccaggatacagacagccccccttcagcccagcccagccaggtactgcacggggcgggaatctgggtgggggccagagtaggggatttctgtgggtgctagaggcttggcttgggaaagggtctgtgtgtcaccccttgctccaccaacatcctcctatacaaaggcaggtcggtgcgtgggaaggttgacccttgtgtgtctgggaggcccctccatctgtgaggctgcctgaaccccccactgggacctgtgatttctgcggcacaagtcttgggttatggggagggatccgagatgaaaggggtcctgacagctgccaactgtcaccccctgcaaggggctgttgagccaggcctgtgttcattacagtttgtcgccaacactggcgccacaagccgtgggaggtgtgtctgtcgcctagcagagtctgcaagagcaggtgtcgcaggctttctttgcgtttgctactgtgtgggtccctgtgaccttgtwtctgacttagtagcggacacatgagtgtcctgggcatgtccttgagtttggaagtgtgactgtgtgacttagtttacagtgtgatctggggagtctgcggtggtgggggtgtgtggctctggggctttctgcttatgtctcttgtsgggggggtcaccaccctgcctcagtgccctctcctggggtgtccctggcagggattaggggggcawcctctgaagggagggggtctgggctgccatcccaggatgtccttgagccccgaggcctggacccgtgtcctcccagccaccctggcccacctgtcttgggcctgctgacttggtgcaagccgagccccggaatgtgggggtggggcggggcagcagctgggggtgggatggcaggcagttgccagattctaaaaataaccaccctggacagcagcacccaaggtctttggcgggtccctgttcctcttccctggcttcagctcaccgtggtcccaatctccctcccacaatcccacctgcttcccatccccktctcccaccgctgctggaggccccttctcctttctgggtcccttctcctttctgggtccagtgaataaaataataataacagtaggacctggcgcagtggctcacacgcataatcccagcatcttgggaggccgatgctggaggatcacttgaggccaggagtcccagaccagcctgggcaacatagtgagaccccatctctgcaaaaaagtagtaataacaaataacaataatagcagccaccagggttccaggctccaactccatgccagggcctgtgctcagccaacctcatggccaagctcagaggatcctggcaatcctacggggcaggctcagttcacaggagacagaggtccagagaggcctagtgactggcctggggtcacacagcagggaaatggcataggtgggatttgaacctgcctctgacgacccagaggctgagcttttcttcccttctgagccctgtgggagaactgtcagcaggcagaggtgggggcagctacccagccctcccccgacccagccctttgtctttggattgataatccaagaacctgctcacatactcccagcagcaccctcacctccaccttctcaccagctcctcgcacgaacctttaaaataacaacaacaggccaggtgccgtgactcatgcctgtaatctcagcactttgggaggcagaggtgggcggatcacttgagttcaggagttcaagaccagcctggccaacatggcgaaaccccaactctactaaaaataccaaaaaaaaaaatagccaggtgtggcacacgcctgtagttgcagctactcaggaggctgaagcaggatagttgcttgaacctgggaggtggaggttgcagtgaactgagattatgycactgcactctagyctgggcgacagagcgagactctgtctcaaacataataataataataataataatagcagctaagtgaaataatgcttattgtgtaccaggcactgttccgagagctacacctgtattcacacatttaatcttttcaacactcccatgcggcaagtgctgttaggatcctcattttctagatgagtaaattgaggcacagaggttaagcaacttgcccctggccacacagctggttgtaggtagcagagctgggaatcaaaccctgggctgattccagaacctacactcttacccacacaaaatatttttccagcctccgggaggggcccgttttccacctggggaaattgagtttccagcaagaatgactagtccaggctcacccaactgggatacggcagagccaggcccttgatctaagactccggatgccttcctgctgagacacaggggctcagagagaggatttctcttgctccaagttacacagcctgcctgaccccaacgccttgcccagttctcttgctgctgtctgcaagaygcgagctaggcggggcacagtggctcacgcctgtaatcccagcactttgggaggccgaggcgggtggatcacttgaggccaggagttcgagaccagcctggccaaccagtagagatggtgaaaccccatctctaataaaaatacaaaaaaattagccaggcatggtggtgtgcgcctgtaatcccagctactcaggaggctgagacaggagaatctcttgaacctgggaggtggaggctgcagtgagccgaggtctcgccactgcactccaacctgggtaacagagtgagactccatctcaaaaaaaagaagaaaaggccgggtgcagtggctcacgcctgtaatcccagcactttgggaggccgaggcgggcggatcacaaggtcaggagatcaagactatcctggctaacatggtgaaaccccgtctctactaaaaatacaaaaaatgagccggcgtggtggcgggcgcctgtattcccagctactygggaggctgaggcgggagaatggtgtgaacccaggaggtggagcttgcagtgagccgagatcgtgccactgcactccagcctgggtgacagagcgagactccgtctcaaaaaaaaaaaaagaagaagaagaagaaaaaagatgccagctaatcttcaatcttcccctyctgccctgcccatcaggtctcctacaccgccaccatgccattcggtaacacccacaacaagttcaagctgaattacaagcctgaggaggagtaccccgacctcagcaaacataacaaccacatggccaaggtactgacccttgaactctacaagaagctgcgggacaaggagactccatctggcttcactgtagacgatgtcatccagacaggagtggacaacccaggtgagcctccccagtggagcactgaaggggctacatgggggctctggaggctgccggcyatgccccaatcccaccacycttgaaggggggggggcctcagttttctcatctgtaaaatggggctgttgtgggaatcaatgcattaatatacataaaggcttgggacagtgcgaggtactcagcaaaccacgcaataaacatgcacgagaataatgtgagatccccaaggaggtcggttcacctcctgaacctcagtctcctcatctgaaaaatgggcgcccacgttgtgaaaacacaagtcaatggctgtgcagtgcttagagtggcacctggcaccaagtgagtgctcaagctctgacaggggggccaggtgcagtggctcatgcctgtaatcccagcactttgggaggcccaggtgggaggatcacttgaggccaggagtttgagaccagcctgagcaacatagcaagaccctgtctctacaaaaaatacaaaaaaattagccaagtgtggtgatgagggcttgtggtccaagctactcaggaggctgcggtgggaggatcgcttgagcctgggaggtgcaggttgcagtaagccgagatcgcgccactgtactccagccacagagtgagaccctgtctcaaaaaaaaaaaaaaagaatctgacaggggatgttattaatgttatggttgtttctcaaaggacattgcaaggcgaagagagctgggagtggaggggaggctctagtgcccctcacatccagctcactgtgtgatgccrgggagaagcccctctctcctggcccctgtttttccactgggaaacaagagggtctttcaagtctcttaccctcctgaccctctgtggtacggtggtagcctgagatcctaacatttcaggctaagatgtcatgactttgggtgctaatgtttccgaggtgctgatgcttttagcaccatgtaccctctgaagctcccctttctcctttgaccccgcccccagcactctttcttctctcccaccttgacccctcccagccaccttgacctctcccagccttccctcccagttcccaccagtcctcagtgttctctctttttttttttttcctttggagacagagtcttgctctgtcacccaggctggagtgcagtggtgtgatcttggctcactgcaacctccactcccttggttcaagcaattctcatgcctcagcctcctgagtagctgggattacaggtgtgtgccccacacccagctaatttttgtatttttagcagagatggggtttcaccctgttggccaggctggtctcacactcctgacctcaagagattcacccgcctcaccctcccaaagtgctgggattgcaggcatgagccactgtgcccaacccttatgattctcaattcccacccagaggtattgaatgtacccgcccccatcccgacacacatgtccacacaggctccactgagcccacaagcccacgccctgtttgctggggacaagcagctctgacctcacccccacccctccaggtcaccccttcatcatgaccgtgggctgcgtggctggtgatgaggagtcctacgaagttttcaaggaactctttgaccccatcatctcggatcgccacgggggctacaaacccactgacaagcacaagactgacctcaaccatgaaaacctcaaggtcggtgtctgcgcaggaggggagggccgaggggtgaggaggagagagatcacaggagaaatggggggagacagagaaatacagagacagagagagacacagaggtgtggagaagcagagagatggaaagagagagggacattgggaggctgaggygagcgtatcacttgaggtcaggagttcaagaccagcctggccaacatggcaaaactctgtctttaaaaaaaaaaaaaagggctgggcacggcggtggctcacgcctgtaatcccagcactttgggaggccaaggcgggcagatcaccttagattgagagtttgagaccagcctgaccaacatggtgaaaccccgtctctactaaaaatacagaattagctgggtgtggtggcacatgcctgtaatcccagctacgtgggaggctgaggcaggagaatcgcttgaacctggaaggcagaggttgtggtgagcagagatcgtgccattgcactccagcctgggcaacaagggcgaaactcgtctcaaaaaataaataaataaataaattaaataaattagctgggcatggtggcgcgtgcctgtaatcccagctactcaggaggtggaggcaggaaaatctcttgaacccaggagatggaggctgcagtgagctgagatcatgccactgcactccagcctgggtgacagagcaagattctatctcagaaaawaaaaaaaggaaagagagagggacagagagacacagagacagccaaggagacacagacaaccaaggagacagacagacaaaggagagggagagggagaagaaaggcacaaaagcatgtagaaaaggaagaggcatagccsggcacagtggctcacscttgtaatcccaacactttgggaggctgaggtgggcggatcataaggtcaggagttcgagaccagcctgaccaacacggtgaaacccagtctctaytaaaaatacaaaaattagctaggcatgctrgtgttcacctataatcctagctattcagcctgggtgacagagcgagactctgcctaaaaaaaaaagggtggggggagaggcagagacacagagggagacagaagggagcatcagagaaggcaggagagacagggagagagagacacacgcagttgcagtcagacacagacaaggagagtgggagaaagggagacaggaagagaaacagaaatgggcagaaaggctgggtgcagtggctatacctgtaatcccagcacttatggaggctgaggtgtgaggatcacgtgaggccaggagagttcacgaccagcttgggcaacatagcaagaacccgtctctgcccaaaaaaaagaaaaaaaaaagcctaaaaatttagctaggcatggtggctcatgcctgtaatcccatcacgttgggaggctgaggcaggaggactgtttgagcccaggagtttgagaccagcctgggcaacatagtgacaccctgtctctatttttttttttttttttgagacagaatctcactctgtcacccaggttggagtgcagtggctcgatctcagctcacggaaacccctgatccccaggttcaagtgattctcgtgcctcagcctcctgagtagctgggattacaggcgcgcaccaccacgcccagctaatttttgtatttttagtagaaatggggtttcaccatgttggccaagctggtttcgaactcctgacctcaggtgattggctcacctcggcttcccaaagtgttgggattacaggtgtgagccaccgcgcccagtccctgtctctatttataaaaaatttattttaagttagccgaacatggtggcatatacctacctgttagtcccagctacttgggaggctgaggcaggggaattgcttgagcccaggagtttgaggttgcagtgagctatgatggcaccactgcactccagcctgggcgacagagagagaccctgtctcaaagaaaaaaaaaaaaaaaaaaarggaaaagaaatatacgaagatggggagagagaggtataaagaaaaacagagataggagaggggagagagacagagaagggagagacagagcccaggtatgggtggcggggagaggctccacacacccaatcagtgaggatgcagaaggcaaaggaagcaacagggagactgaggggagcatctgggggagacctgggcttgctggagagggcggaggatctgcctggtcctgatctcccacccgctctccagggtggagacgacctggacccyaactacgtgctcagcagccgcgtccgcactggccgcagcatcaagggctacacgttgcccccacactgctcccgtggcgagcgccgggcggtggagaagctctctgtggaaggtgagcgcccctaccccgtccactgctggggtcacccagccctggctctgttcctccatgggcaggtcctcgggtctctttgggcccccgctttycaaagtaggggaagagcttggtaaatcgtgggggcttggggaatggygcgggctgtcagcattacctgctgtgttggagattcagggatgctgtccagacyygacggcccctgagaagacctacgcagacacctggctgcccccagcgtcctgccatccgttcatccagcacacatttccaggggttcttgccctgtgtggggagataggggtccctcactgttctcacagagtgttcagctggtggggagacaagaggaaatacagaaacccacagatgaacaagataattcaaaagtgccatgaagccaagacatgggtgtggtggagaatgaccgaggggagccacctcagataggaggagttgaggccgggcacagtggctcccacagcagtgcgggaggcctaggagggagggtcgcttgagcccaggagttcaagaccagactgggcaatacagcaagaccctgtctctacaaaaaakacaaaaatgagccaggagtggtggcacacacctgtcatcccagctactcaggagactgaggtgggaggatcacttgagcccgggaggttgaggctgcagtgaatcgtgattgtgccactgcactccagccagggtgacagagtgagaacctgcctcaaaaacaaataaaaagaggccaggcacagtggctcacaccgtaatcccagcattttgggaagctgaggcaggtggatcatttgaggtcaggagtttgagaccagcctggccaacatggtaaaaccccatctctactaaaaatacaaaaatcagctgggtctggtggcacacacctgtaatcccagcgacttgggagactgaggcaggagaatcgcttgaacctgggaggcagaggttgcagtgagctgagatcacgccactgcmctccagcctgggggacagagtgtgactccatctcaaaaaaaaaagttatgtttatcctatactgtagtctgttaagtgcacaatagcattatgtctagaaaaaaaaaagtacataccttaattttaaaatcctgctaaaaatgttgtgatcatttgaggactcagcaagttggaacctttctgttgtgtagggccttgccttgatgttgatgggctgctgactgatcagggcggttgtcgttcaaggttgagatggctgcggcaattccttccttccttccttccttcctttcctttcttttcttcctcccttccttcccttccttccctccctcccttccttcccttcccttcccttttcttctccgtccttccttccttccttctttcctccctcccttcctcccttccttccttccttctctttctctctctcttttcaagacagggtcttgttctgttgcccagctggaatgcagtggtgcaatcatgacttaccataacctccaactcctgggcttaagtgatcctcccatgttggtctcccaaagtgctggcattacaggtgtgagccacagtgcctggccagcagtaatagtttgaaaagaatctcttttttgagatggagccacactcttgtcgcccaggctggagtgcagtggtgcaatcttggcttactgttacctccacctcgtggttcaagcaattctcgtgtctcagccacccaagtagctgagatcaccggcatgcgccaccacgcctggctaatttttgtatttttagtagaatcggggtttcgccatcttggccaggctggtctcaaactcctgatctcaggtgatctgcctgcctcagcctcccaaaccactaggattacaggcgtgagccaccgcacctggcctatgaagctttttatttaaagtgaaaaatgttgactcttcctttcacttgaacacctcgaggccattgtaaggttatgaactgaattggcctgatttcaaaatcatgtgtctcagggaatacggaggctcaaggagatggggagagatgagggaatggctggtcagtggggcagtccgagcacacacatttatccattaagttcacccttttatatgggcaaggtcggtggcaccccccaaaattaaaacagtaacatcagagatcactgatcacrgatcgccatgacagatayagtaataatgagaaagtctgcagtactgtgagaattacccacatgtgacacagagacacgaagtggcacatgctgtaggaaaaatggctccaatagacctgctggacaaagagttgccacaaacctccaatttgtaaaaaacacagtatctgcaaaatgcaataaaacgaggtatgtctgtatattatatgaatatgtataagatatataaatattatagatttattgtacatatgcacaaacacaaattcattatacacatattttatacatgaatatacaaataaacacacaattttttttcttttttttttttttagacagaatctcactctgtcacccaggctggagtgcagtggcaaaatctcagctcactgcaacctccacctcttgggttcaagtgattctcgtgcctcagcctcttgagtagctgggattacaggcgtgtgccaccatggccgactaatttttgtatttttagtggagacggggtttcaccatgttggccaggctggtctcaaaatcctgacctcaagtgatctgcctgccttggcctcccaaagtgctgggattataggcatgagccactgcgcccagcctacaatttttttttttttaaagattggggtcttgggccaggcgcccaagtggagaaaccccgtctctactaaaaatacaaaattagccgggcatggtggcgcatgyctgtaatcccaggtacttgagaggctgaggcaagagattcgcttgaacccgggagacggaggtggcagtgagccaagatcgcgccattgcgctccagcctgggcaacaagagcaaaactccgtctcataaaaaaaaaaaaaaaagatgggggtcttgctatgttacccagactggactcgaactcctgggcttaagtgatcctcctgcctcagcctccccagtatctggactacaggctcgtgccagtgcacctggctaccattctactttataataatttttactaatggcctctcaaagtcctgagacttcagccatctgtgttgccagccattaggagcaggcaccagcacactgtggcctgcaggtggattggatgtgagggtccctcaggggaagaggtgggtctgttttccagattgagcacatggggtggccattcctgggggcctggacagatggcaggaacagattttggggagccgtcacaagtgtgggtttagacacagggttcaggtgcctttargacatccagggggccaaggcccasgcccgttaggagcagcagcaggggraaccctgggcctccacaccctggttgaggtgggacaggctgctgaccactccctcgtgtgtccccatagctctcaacagcctgacgggcgagttcaaagggaagtactaccctctgaagagcatgacggagaaggagcagcagcagctcatcgatgaccacttcctgttcgacaagcccgtgtccccgctgctgctggcctcaggcatggcccgcgactggcccgacgcccgtggcatctggtgaggcccctccccgccccctggcttcctcttcccccagcctcctccagtcctgcaacggccctcctcactcctccaccaaaaccaaggccatatacrtaattatgatcttctaaatgccacggaaaatgatcttgccctccgccmctgcccatcctgtggtctgtgtgtcagattttgggatatctggaccggagaagtggtagttaaaaacttaagacttggcggggcacggtggctcatgcctgtaatccctgcactttgcgaggccaaggcggggggatcacttgaggtcaggagtttgagaccagcctggccaacacggtgtctactaaaaatgacaaaaatttagctgggcgtagtggcaggcgcctgtagtcccagctacttgggaagatgatgcaggagaatcgcttgaacccaggtggcggaggttgcagtgagccgagatcgtgccactgcactccagcctgggcgacagagccagactgtctcaaaaaaaaacaaacaaaaaagaaagaacttagacttggccgggcacagtggctcacacctgtaatcccagcactttgggaggctgcagcaggagggtcgcttgtgcccaggagttctagaccagcctgggcaacatagggagaccacgtcgctacaaaaattaaaaaaaaaaaaagccaggcgcggtggctcacgcctgtaatcccagcactttgggaggccaaggtgggcggatcacgaggtcaggagattgacaccatcctggctaacacggtgaaaccccgtctctactaaaactccaaaaaaaaaaaaaaaaattagcccggcgtcgtggcaggcgcctgtagtcccagctacttgggaggctgaggcaggagaatggcctgaacccaaraggcggagcttgcagtgagctgagatcgtgccactgcactccagcctgggcgacaggagactccgtctcaaaaaaaaaaaaaaaaaaaaaaaaaaaaaaagccaggcgtgatggcgtatacctgtggtcccagctactcgagaggctgaggatcagctgggcccagaggattgaggttactgtgaatcatgaccgaggtactgcactccagctacctgtctcaaaaataagaactcagacttgaaccgtactccctaggttcaaatcccagctctaccatttactarmtttactagctttgtgaccttgggcaacttattttatttttctctaccccagtttcctagctataggatagggatcacaataatttgtagtttctggtgttcttgtgaggattaaatgagttaatttatgtaaagtattaaaagcagtgcctgggccaggcgcggtggctcacgcctgtaatcccagcactttgggaggccaaggcgggcggatcacgaggtcaggagatcgagaccatcctggctaacatggtgaaaccccgtctctactaaaaatacaaaaaattagctgggcttggtggcaggcgcctgtagtcctacttactcgtgaggctgaggcaggagaatggcgtgaacccgggaggcggagcttgaagtgagccaagatcgcatcactgcactccagcctgggcgacagaccaagactctgtctcaaaaaaaaaaaaaaaaaaaaaagcagtgcctggtatacactaagtgttcagtacatcttggttattcgtcttatctttattataaagtattattgctagacttgttttgactctttgaatccctgattcagatagtcaaagatttagagaacctaggtttcaatcgatgaagggagcctgggtgctaagatatacagatgggatgattctaagatttcaagattttaaatatttttaggttttaagattccactcatttatttatttatttattttgagatggactctcactctgaggcccaggctggagtgcagtgggttgatctcgactcactgaaacctccatctcccgggttcaaacgatcctctcaccctccgcctccttagtagctaggacgacaggcatgtgccactgtgcccagctagttttcgtatttttggtagagacagcgttctgccatgttgctcaggctggtctcgaactcttcaccttaagtgatccgcccacctcagcctcccaaagtgctgggattacaagcgtgagccaccatgcctgccctcaggtttttttttttttttttttgagacagggtcttgctctgttgcccaggctggagtgcagtggtgggatcatagctcgctgcagcctggaccttccaaggtcaagtgatcctcccgcctcagcctccccagtggcttggactacaggcatgtgtcccaccatgcctgctaattttttaaattttgtagatatgtgggtcttgccatgttgcccagggtagtcttgaactcctgggctcaagcaatcctccggccttggcctcccaaagtgctgggattacaggcatgagccaccacacccggccatttccggatcttaatattttatgttcttttttttttttttttttgagatggagtctcgctctgttgcccaggctggagtgcagtggcgcgatctcgactcactgcaagctccacctcccgggttctcgccattctcttgcctcagcctcctgagtagctgggactacagatgcccgccaccatgcccagatttttttttgtattttttagtagagacagggtttcgacgtgttagccaggatggtgtcgatctcctgaccttgtgatccgcccgcctcggcctcccaaagtgctgggattacaggcgtgagccaccgcacccagccttaatattttatgttctaagatcctgcttctgagatgctaggattgggagctaacacactacgatgggaagattttctggtcctgaaaccagatgtaggattwccaagtgttatcagttctgatcccaagcttctgtttgtcaaacatcctgagatcccaaggatctataataatactgttcaaagacttaagtccctaaaagtccttgatcccaggattcagcgttttgcagatcctgtgacattagagtctacaggtttaagcttctgcgttttgaggaggcagatgccacccacctcccacccctcaggccctcttcccccatcggtgggcagatgttttgggggagggctgggaatggggttcccacggggctgacaccttggcctcttgctgcggcaccttactctaggcacaatgacaacaagagcttcctggtgtgggtgaacgaggaggatcacctccgggtcatctccatggagaaggggggcaacatgaaggaggttttccgccgcttctgcgtagggctgcagaaggtgggtgtctgcccttagctgctgacttctgactccaccttgaacgccccacctgctttccgaggccccgccccttcccctatactaagccctgccccacccattttccagggccctgccccccggacctggctccaccccatgccaaaccccgccccccaaaactagccccacccgcttttcagggccccgcccctggacccagctccaccctatgcccaagccccgcccgtaaggatccgccttcaggccgggagcggtggctcacgcctgtaatcccagcactttgggaggctgaggagggtcaggagttcaagaccagcctggccaacatggtgaaaccccgtctctatactaaaaamttaataaataaataaattatccaggcgtagtggcgcgcgcctgtagtcccagctactcgggaggctgaggcaggagaatcgcttgaacctgggaggcagaggttgcagtgagacgagatcacgccattgcactccagcctgggtgacacagagagactctggaaaaaaaaaaaaaaaaaacccgccttcaaagcgttcttagtccccgcccctcaaaatcctgccttggtccccattgtctagccagcaccctcggaatctcctacctccctgttcccctcagaatcccacctccaccacgttcccacgccctgtccctccggaccctgtccatgttgygggtgcatttgggggtgcctgcyggcgctgacccctggtcctctctctgaacctcagattgaggagatctttaagaaagctggccaccccttcatgtggaaccagcacctgggctacgtgctcacctgcccatccaacctgggcactgggctgcgtggaggcgtgcatgtgaagctggcgcacctgagcaagcaccccaagttcgaggagatcctcacccgcctgcgtctgcagaagaggggtacaggtacggctcccacatcctttgcaccacgacrgagggggagcgagggccctttgcagggatgcaaggagaggtgcgacatccctgcgagttctggggatccggcaagggctgaccctctgtgagcttgcatttcttcctctgtaaaatgggtgtcaatatgcctatgtgataggagtcaatgtgggattttcatgattatataatatgcattgcacatgcccttggacctccctcggggcctcagtttccccatttataaagcgaggagtggtcaggattcgaccctaggccgcctggctccagaacccactctcttacccactatactatgtttgataactgagtggcgtggtaccccatctgaagtcagagactcgtgagctcacgaatgaacaggcattacctgtgtgcaggtaacctgttacacagtaggcactcactacatgcggctgttgcatttggcacgggggccacgtcccagcccctctgcaccttcgctgcctcttcacgcccctgtcccttgctcccacaggtggcgtggacacagctgccgtgggctcagtatttgacgtgtccaacgctgatcggctgggctcgtccgaagtagaacaggtgcagctggtggtggatggtgtgaagctcatggtggaaatggagaagaagttggagaaaggccagtccatygacgacatgatccccgcccagaagtaggcgcctgcccacctgccaccgactgctggaacccagccagtgggagggcctggcccaccagagtcctgctccctcactcctcgccccgccccctgkcccagagtcccacctgggggctctctccacccttctcagagttccagtttcaaccagagttccaaccaatgggctccatcctctggattctggccaatgaaatatctccctrgcagggtcctcttcttttcccagagctccaccccaaccaggagctctagttaatggagagctcccagcacactcggagcttgtgctttgtctccacgcaaagcgataaataaaagcattggtggccttagctttgtgcgatagttattgagggaggacgtgcaattggccactgtgtggtctcagagtggtttgtcctgtctaggcatgtactaaacatgtcttatcccgggtctaaaatgaggcaaagttaggtcacagaatctagtccaaaaattagaaggctctatggggaatctgagacccagagagacactgagcccagtgtcactcacccaaagcatgggccctttccaactatggctttgaattagtcatgctcagatctcaaacacgaggtccacgctggggaggaatgcagccaaacgaaatgtctgaaacttgaatttagcccaacggtctccagttttgagacctcccatgcagctcgtcacatctacctatattctgcttctcagtggcctccttctgtcccgtctgacttcatccctctgtagctgctgccagtcccttactttctcaagaacctgccatggctccccatttctcctagaaagcttttctgttattttgcaactcaaggccacactgaaatgcataccatttgctggaggctcacctttccagttctttccccattactcctctgattctttcacacctgacaccctccaattcccacctcaatgtctttgaccaagctgtttccctctccaatctgtgagtctgagcatccccatgaagtctttagggataggccttttggagaactcagtcccaggaaggaacaggaaagaggtgtggtagagcaattggtggagggagaagagttaatagaagtcaagcagtagctgaacatgcattgggtgttgggcacgtcaatcacctccacccagtcaaacaggccaatgtctacgttaacaaggacacagtcggtgggccccaaaagacaaacgttttagggaaaaaaaaaagtgaggtgggagtaaatggaagaaccgacaaagccctcaggaacctaaggtgctttttcaaacctcaagagtcacagagattaagggcccttgtagttcaatctgccctctgttttacagaggggaaattgaggcctagggatgtccccaaaagttcccagggagattactacaaggaaggttaggagagattctaaacattaaggtatgcagaacctgtgagatgctgtgatgttctttactgtactgtccccagttgaagatcccagctccacacccagaggctacatagaccacacacgccagtggggaccttctgagccagccaaagccacagtccagacacctgttaccaggtcctgcccactttgcctcacaggactctcttaaatctatctgcgctctccccatctgtccagccccgacctctttcctgatcttctgacctgtcaacttccctcccttccaccctgcacatagcacaaacccgcccatctctaccctacctacaaccttgccatggctcccccagtgcccttggaagaaagcccaggcccctgtccataaccttcaaggccctactgacgcccctagccccatacctcacagcaattctacacttaccaagtcacatgccatttgttgaggacctgtcctctctcttgctccctggcccttgtatgtgccatttgctgtgcctaaaacgcactcctatccatgtctagctggctccttctcctccaggaagccctccctggctgaggcaggcatcacctctggactcccctataccagccctgcccagtcgctgcctgaggacacatctgcctcctccattggactgtgagctctatgagggcagtgttggggctgtcttgattaccactgtgtccccagcacagaggatgctctcaggaattgaccaagcctcttccctgaagttccctgaacttccatggttccccagtgccatggggagaaagtccagcttattcattttggccccaaaggtgctgtgtgaataagctccgcccttctgtactgcacagacttcaaccactataatctgtccagctcccatgccttttctcctgctcatgacacttgaccttcctttgaggaacccctactaagtgcagctctgagtctggccactctagagtcacagtgattggtttagagaaaatcacatggcccatttgggccaatgagagtctgccctgggacttttgctgggaaactgacaatgagggtctttctgctgcagaaagctggagggatagaaacttctaactgctgaagtcatctgtgccaccaggaaaggagcccttacttgataaaaattactagaattcaacttacactgaaaaaatagatgcaatggcctgatgcctggatcaaacctacctgaagccaggtgcccctggactattaagtaacataaaccaacaaatacctttttgcttaagcagcgtagatggattattagtcctaatacagcatttctcttgctgattctccatccatgcccaacacagcagccacactgaaattacccagttctctgaagatataccacatactcccacttctgggcttttgcccagggcaaactcaatgcctaactaactcctactcatccttcaacaccccattccagcattaattcctctagagcatcttccccaatgaccccaccctgcccactttctcttctgggctccccaagacaatggtttgtccggtgtctgtgtcagaatccctgtctcccacagacagagcttcatgtctctgtgtccagcactgggcctggcatggagtaggcatgggtcaatgattgtttattgaataaatttactactggagtaagaagtggcttagagtccagtgtaacatggtggctgggagtgtgagtggatgaatggggggcccgatataggaactggggcctcggggatgaggccgagttccatcctgccttyttccacgaccatccttaccttcccacccccaccgctcccattctgcagatgagaaaaccraggctccgaaaggaaaaaccactgcctggattcccacgcctcttctttaactcatttgcaggtgagggcagggaaggaaaatcctagggtcagcattggggagggggggactctcytaaatttattgggcaacaggctgcaggtgagggggctgacaggaggagggtcggggtgtaataacttaaaaaccgtaggtgacagcggcagctcctcaagagacctttgcagaggggagggtgtggggtatttacaaggatttgtacaaagtgccccgcgccagcctggggcaggaagtgggggtttgagcgtgaggggacgggaggggaaggaatctgcctctctgacccccactcccagtcccccagattctccagtctttaggctcagcagctctccctgcccctgcccaaggcctaattttgagctgttgggaggaatggaagatttcctcagtttccctccctgcccctgccctgtccccaaagtctcctcaggtgccctcttggtagggcgagggaggacaggactggctggaggctccaggaaggtgccagctccccccgctgagccccctcatccttcttctgtgctgagcggccccagagaacagcagaggggacaatctttgcccccaaatataattcagggaaactgaggtgatgataaagggagaatcccctccctggccccttcccctcctgtagaagtgaaggcgacaagggagaggaagagtaagggccctgggaccgtggtggctcagagctcgaggtcgttggagatgcgggtgacgagggtgcggaaggccagggcggtgcccgccacacggcggaagagaactccccgcaagcctggccggggcagctggcagacctccacttcgaagtgggacaggggctcgggcccgcccgcacccccgtgcaggcaggccagcaggaacggctgtggctggcggcagcggcagcgggcggctgctgtggcctggcgcagagctgccatcagggcctcaggagggcgcgagctggtcagcttcacactccaggggaatcggagcagccggggggcggtttccgtttgatcccaaggtagatggcaactgaggcgagaagatgtcaggggtcagagatgggagcgaagaggaatgtggtggagggctgaagggacaactcttcccaattcgggacacattcctagccatcccctcaaaaaacatcttcccctgttaccccagcgacagtttcaactggatacagagctgcccagctagagaccacactttccagcctcccttgcaaccaggtgtgaccttgtctgtaaattctgggacatgagcagaagtgagatgtgccatccacatcagttccttcaaagaacctgcatgtgccaggctctcctgtcccacatctcccaggagctggacttagcagtggcacaggccagcctcaactgtgaagatgacaagggctccagggaatcgggatgcaataacctggggacctgaatgaccgcatagatcacagtggccttaccagcctggcttggccacatggtttgaatgtttgaatgagaaatttcttttttcttttctttttttttttttttttgagacggagttttgctcttgttacccaggctggagtgcaatggaacgatctcggctcaccacaacctccgcctcctgggttgaagcgattctcctgccatagcctcctgagtagttgggattacaggcacgcgccaccacgcctggccccagctaatttttgtatttttagtagagacacggtttcaccgtgtcagccaggatggtctcgatctcctgaccttgtgatctgcccgcctcgacctcccaaagtgctgggattacaggtgtgagccactgcgcccggctttttttttttttttttttttgagacagagtttcgctcttgtcgcccaggctggaaggcaatgacacaatcttggcccactgcaacctctgcttcccgggttcaagcaattctcctgcctcagcttcccaagtagctgggagaacaggcaccacggccagctaatttttgtatttttagtagagacggagtctcaccatgttgggcaggcaggtcttaaactcccggcctcaggtgatccacctgccttggcctcccaaagtgctgggattacaggcgagagccacagtgcccggccacttcttagtttttttgagacagggtcttgcaatgcagtagtgcaatcacagctcactgcagcctcgacctcctgggctcaagtgatcctcctgccttggcctcctgagttgttggaattacaggcataagccactgtgctcggcctctgggggctttttgattgtcacatgtcttaggatgggagcactgctggcactgactaggttggggatggggtaggtcaggaatgataaacattctccaatgtgcaagagggccctgcacaacaaagaaacgtcccgcctgaagtacgagagtgctgctctacatgagcatcccaggactagcctcccttgttccggtggggccgcccctcagcttgggtgagcacgactcagctctgccaatgatagcattctacttcccggccactgtgcttgggtcaagggtgaccacatgaccaggtctgaccaaccagagtacttctcctctctggctgcaggcattggtttaggaatgagcatgtgaccaagtcccaaccaatgagagtcagccctggcagtttgttgcagctgctgggaaggctccggtttccacttgggtctctaaaccgggaactcagacaaaaccagggcttggcaaactccagtgctgtctgcttttgtaaataaagtttcattggaacactgccatacccatttgttttgtgttgaatatgactgcttttgcactacaatggcacaactgaacaggcgtgacacagggtgcctggccctcaaagcctaaaatcttcatgatctgggtccgtacagatgtttgcctcctgctggccctgagctgccagcaaacattgtgccatgactggatgagaggcaaaaggaggtggg

SEQ ID NO: 95032 - DNA, 22784 bp, Homo sapiens
ggtttcaccgtggtctcgatctcctgacctcgtgatccgcccgcctcggcctcccaaagtgctgggattacaggcgtgagccactgcgcccggcctttgtgtgcatttttagtagagacggggtttcaccatgttggccgggctggtctcaaactcctgacctcaagtgatccacctgccttggcctcccaaagtgctgggatgacaggcgtgagccaccactcctggccattattttttaaattaaaaaattatggccagaaggtgaaaatagaaaagctcccatcctatgtacccattttcctgacgtggcaaactaaggccttaagggatagggtggagtatttgttggatatgcaagcaatttctcctctctgagcctcagtttccttttttatttattttttgagacaggctgtcactctgtcacccaggctggagtgcagtggtatgataatagctcactgcaggctcagactcctgggctcaagcaatccccctgcttcagcctcctgagttgctgagaccacgtgtgacacatcacacatggctaattttttttttaattttttttggcaggtgggtgacgcctgtaattccagcactttgggaggccaaggcaggcagatcatttaaggtcaggagttggagaccagcctaaccaacatggtgaaaccctgtctatactaaaaatacacaaaaattagccgggggtggtggcgcatgtctgtagtcccagctactcaggaggctgcggcaggagaattgcttaaacccaggaggcggaggttgcagtgagctgatatcgtgccactgcattccagcctgggcgacagagcaagactccatctcaaaaaaataaacaggctgggcccggtggctcacgcccataatcccagcagtttggggggctgaggtgggcagatcacttgaggtcaggagtttgagaccagcctggccaacatggtgaaaccccatgtctactaaaaatacaaaaaaattagccaggtgtggttcctgtaatcctagctactcaggtggctgaggcaggagaattgctttagcccagggcacggaggttacagtgagccaagatcacgccactgcactccagcctgggcgacagagtaagactctatctcaaaaaaaataaataaataaatttttttttgtagagataggttcatcctatgttccccaagttggtctcaaactcctaggctccagcaatcctcctgcctcagcctcctgaagccctgggattacaggtatgagtcaccacatccggccagtttcctcatttttaggtggggctggtaatagtgcctaccttggggggtcagctacaaagattctggggctctgctactccttggctgtgtgacctaagacaagttactcagcctctctgtgcctcatctttttcacctgtggaatggagcgaatcatcgcagctggtgtgaagattaacaatttgtatataggagttggcacagggccattctggggtaagaactcaaacatcagccattgttggcgttgtgcaaaagtacttggaacaccgctggcctaaaggaaggttttcctggccaggtgtggtggctcacgcctgtaatcccagcactttgggaggccgaggcaggcagatcacgaggtcaggagatcaagaccattctggctaacacggtgaaaccccgtctctactaaaaatacaaaaattagctgggcatggcggtacgtgcctatagtcccagctactccggaggctgaggcaggagaattgtatgaacctgggaggcggaagttgtagtgagccgagattgtgccactgcactccagccggggagaaagagcatgactccgtctcaaaaaaacaaaaacaacaacagcagcaacaaaagcaagaaaggttttccttagttaacactttcttcttctttcaatctttatctcatttaagtctcacctcaatgctgtgtgatgagtgtgatcatccccattttactagacgaggagacagaggctcagccagagatcattgttcccccggtttacatggaacagaaatggcagggccaggatttaaacctagatctgcctggctccccgcccggctccatcccctgccctcccccaacacacatagtatttaccgggtgctaccctgttctaagccttttctgggggattatacagtaatcctcaccacagccttaaagtagggtaccctgtgagtctcgtttgacagactagaaatctgaggtccagagaggttacttcttggctcagagggtcacacagctagcaaatgacccagctgagatttgtccctgctggcctggctccagtccctgcactgcctgtggtaagcgtgtagcagatccagatccaatgtccagcgtcgtgaggccaaaaaaatggggggcagggggaaggctctgctgcccctcgatcctgtgctgttgaaatagctggagctagcactttggaaggccgaggcgggtagatcacctgaggtcaggagttcgagaccagcctggccaacatggcgaaaccctgtctatactaaaaatataaaaattacctgggcgtgatggtgcacacctgtaatcccagctactctggaggctgaggcaggagaatcatttgaacccgggagatggaggtttcagtgagccgagatcatgccattgcactccagcctgggcaacagagacactgtctttttttttttttttttaggggatggagttttgctcttgttgcccaggctggagtgcaatgacgccatcttggctcactgcaacctccgcctccctggttcaagtgattctcctgtcttagcctcctgacaagctggaattacaggcccatgccaccaagcccggctaatttttgtaattttagtagagacacggtttcatcatattggtcaggctggtctcgccctcctgatctcaggtgatccgccctcctgatctcaggtgatccgccctcctaggcctcccaaagtgctgggattataggcatgagccaccactcccagtgagatgctgtcttaattaaaaaaaggaagaaagaaagaaatagctggagcttggcacagtggctcatgcctgtaatcccaggactttgggaggccaaggcaggaggatcgcttgaggtcaggagttcaaaaccagcctgggcaatatagggagacccccatctttacaaaaaacaacaaaaagtagctgggtatggtggtgcatttgtagtcccagctacctgggacttgggaggctgaggagggagcattgcttaaacccgggaaatcaaggctgcagtgagttacgactgccactgcactccagcctgggtgacagagtgacacctgtcttttaaaaaagctagagtaggccgggcatggtggctgacgcctataatcccagcactctgggaggccgaagtgggtggatcacctgaggtcaagagttcaagaccagcctggccaacatgggaaactccatttctacaaaaatataaaaattagcaaggcatgatggtgggtgcctgtaatcccagctgcttgggaggctggggcgggagaatcgcttgaacctgggaagcggaggttacacaatgagccaagatcgtgccactgcactccagcctgggcaacagagcaagactgtcttaaaaaaaaaaaatgctggagtagttaggatatgagtttgaatttttatttccatgattcaatcagcacctattctcccaaatgccttctctgcgttgggcctgtgctaggtggcactggggacacagtggagactgacatggcccctggccgcctcctcccttcttggggctcatagtctaatatgggactgacctgtctccccacactgatgacccagagttggcagggctggatgtgggagcccaagagcctggaaacctgggaaataagaaagggcttcctggaggaggaagcatcagcactggggctcagacaacagggaagtagagggcacgttggctgcaattcggagggagcgcggagctgtgccgagtctggagtttggtccacggaccagcagcgccctctgctggaagcatttcatagtgtagtgaccggggtaccgcgcgcattgagccatgtatgtatgtatgcatttatttatttttgagatggagtttcgctcttgttgcccaggcaggagtgtaatggtgtgatctcggctcactgcaacctctgcctctggggttcaagcgattcgcctgcctcagcctcccaagtagctgggattacaggcgtgcgctaccacacccggctaattttgtatttttagtagagatagggtttcaccatgttggccaggctggtctcgaactcctgacctcaagtgatccagccccctcggcctcccaaagtgctgggattacaggtgtgagccactgcgccgtcctcaagttatattagaatcgtgtcctcccagctttggccagcttactattctaggacttgattccttcattcagtcacaatttattgagcaccgactttgcatcaagctcttgctgaagataacagtgctgacaatatacagccctgccctcagagcttatatagtagaggagaaaaagtgaacccataatatacagtcagtagcgagtatttactaagtactttctatttgcgaggccctgataaaagtactgtcctggccaggcgcggtggctcacgcctgtaattccagcactttgggaggtcgaggtgggcagatcacctaaggtcaggagttcgagatcagcctggctaacatggggaaaccccgtctctactaaaaatggaaaaattagctgggcatggtggcgggcgcctgtaatcccagctactcgggaggctgagacaggagaatgacttgaacccaggagttgcagtgagccaagataagatagcgccattgtactccagcctgggtaacacagcgagactgtgtctcaaaaaaaaaaaaaaaaaaaaaaaaaaaaaaaaaaaaaagtactgtccctgtattagttaacattcaattctcaaagccttagactatttatattttattgactagggaaactgaggcacagagaggttaagttacttgcccaaggcctgcacagcaagtaagtgccggaatcaaatttgaaccctgagcccaattcttagatatcacattcccttgccaataacataatatataacataacataatgatgtgatatatgttatataaaataactttaggggccgggggcggtggctcactcctgtaatcccagaactttgggaggccgaggcgggaggatcacttgaggtcaggagtttgagaccagcctggccgacatggcgaaaccccgtctctactagaaatataaaaagtagccgggcgtggtggcagacacttgtagtcgcagctactcgggagactgagatgggagaatcgcttgaacttgggaggtggaggttgcagtgagccgagatcgcgctactgcactccagcctgggtgacggagcgagactccctctcaataaataaataaggtaattttaggccctgaaaagttttgtgaacaaaatcaagaggagtatgtaatgttttggtggaagggtgccatttagaagggggcaatcagggaaggcctgccggaggaggtggcctttgagaagagacctaaagacgatgagatctgtgggaagagagatcgaagcaggccacacaaccaaggaaaaggctctggggcaggcactgcaagaaagccacctgtctgggatctaaagtttccaaagttttagcttggccaaggcccctgcgctacaatcaccctgattcgaggtgtcctggaggttaccagttccgcgtgcgaagttctgccattcccgcggggctggagccccgaggctgaacttcccacgggcggtgggcgtggccggctcacctgcgggggcgtggctcccggcygccccgcccctcggaggagccgcccgaggtcccagacgcccggcgcagcgggagcggcggggcgtgcctggcctgcgggacgcgactgatcgcagtggggcgaagcggggccggagccgcccgcggtcaggtgggtgccgggagtggggcgcgggactctcggagagccgcgatgatggggggcgggggcaaccctgggcccgctcgccctgagacggggaagggccttggggctcccggatgccccctgccccgtcctggggctctccgggatctggaggcctggctggggtcccatgccccccaccccagcgcaggtaaacagcgaggacggggcggggcctgggagggagagggagggggcccttgtgactgcgggtgagcctggtgcgcggggctgggcaggccagggtaagttggtgcggcttgcggggctgggccacgatgggagtctcctgcctgcctgtgtttktgtgtgtgtgtgtgtgtgtgtgtgtgtggctttgcgtgtgtgtaagagagtgtgtcaggctgtgggtatgagggtgaaagcgactgtccgtgtaaccctgtgatgggactgtgtgtatgatgtgacacttttagcaatgtgaaaacgtgggcgacctctgactggaatggtgtgtgtgtagaattggattgctggtagcactttaygaccaagagctagtgcgactgtagtcgactttctgcttggcctgatgtgcatgtgtgtggctgtgtgtgtggctgtcttcatggcagagagtggaactggttgtaggattaggtgtgattgaccaagaggctgtgcggctgtggttgtctttctgcctgttggtgtgtgtgtgtgtgtgtgtgtgygcgcgcgcgcgtgtggtggacagtgtggcactggatcagtgataggtgactatgattgacttttgattgtgtgtcactgtgatggtgcatggggctgggcggaactgtgtccagaagtggagctgtttcatgggacggtgcgcgtggaaccttggggttggatgagtgaggtgtggaggtgtgtgaagccgtgtgtgcgtgtgtgtgtgtgtgtgtgtgtgtagagaggaactagagggtgtgtgatctgcattgataccgtggctggcagtggtgtgcaacggagagtttgtgggagatgggagtggagacgtggacatttaagtgggatgctcctccaagcgggtgacaggatggaaaagggggtccgcgtcagggatcagtgtgtgggastgtgcctatgattatcagctgtgcggttgtgcacccggggctctgtgtgagtgtgggagctgctgtgtgtctgggacacagcccgagtgctggatggctgtggttgagccgtgtttgttgctgtggttgtcaatctggctgtggagtggtgtgtgtaaggctgtgtctgaggttatagagggaggttttacatcggcaaaattgtgtgaagaatggttgtggttgtcaggatgactcttgaacctgtgtggttgtgagttcaaccatttatgatgtttgtgtgtgaggtgtgagaataggtatggtgtgatatacacaagcacacagattggccgggtgcagtggctcatacctgtaatctcaacactttgggaggctgaggcggcggggattgcttgaacccaggaatcctagactagcctgggcaatatggtgataccccgtctctacaaaaacaaaaattagctgggcatagtttagttttttaaaaattaaaaaaaggttggctgggcgcggtagctcacgcctgtaatcccagcactttgggaggccaaggggggagcgggtggatcatttgaggtcaggagtttgagaccagcccggccaacatggtgaaaccccgtctgtactaaaaatacaaaaattagccaggtgtggtggcgggcacctgtaattccagctacttgggagggtgagggaggagaatcgcttgaacctggggaggtggagatcgcagtgagccaacatcatgccattgcactccagtctgggcaacagagcgagactcagtctcaaaaaaataaaattaaattttttaaaggttgatatatacatcacatatatacacatacatatatctagagagagggagagatcaatgacgatcaagtctgtggtgcacaaaacgtacaggacccttactgtatgtgatcgtgcatgtacaacatgtgcaaaaaccgctgggctgcttatggtggatgcagtggcttgagtgaagtgtgcgagaacgtggcatccctccacgcgtattcacagctctctgttccgacagtggagctgaatctgagtacttgtgtgtgcatggcgtgtaggtgtgggagtccctgctggccaggcctggagtgggagggagaggaagtagggaaactggcgagggatccatagtgaatcttgggagtgtgtgcatctggaggtgcgttgggcacattgtggggagttggctgcttgggagccatgtgagttcgggggacagcgagtgtcacggtcaagtgcaaggagatggtctgaatgtgagtgatttggggagtgggagagacagagttagtttctgcgtgggttggcttttctttcttttttttaaataatattatcactttttgacacggagttttgctcttgtcacccaggctggagtgtggtggcgtgatcttggctcactgcaacctccgcctctcaggttcaagcaattctcatgcctcagcctcatgagtagctggggactacaggcgcataccaccatgcctggctaattttgtatttttagtagagccggggtttcaccatgttggccaggccagtctcaaactcctgacctcaactgatccacccacctcggcctcccaaagtgctgggattacaggcgtgagccaccgcgcccaggcttggtttttatttctaagagaatatacctgtgtgttgggagtgtatacagattgtttttgaaagaatagtatatgtgtgtgcctgagtcagtgtgttgtcttaggttgtatttctaaaaggaaaatgtaaatgtttttactgagttgtatatttaataggagaaagtgagtgcgtgttctaagaggagaatgtatattatgctgtcctttctttctttcttttttgactgggtcttactctttcacccaggctgagtgcagtggcactatcatggctcactgcagcttcaacctcctgggttcaagcaatccttctacctcagcctccaggtacaccatcaccacacccagctaatttttttatttttatttttgtagggatggggtctcactatgtttcccaggctggtcttgaactcctgggctcaagtgatcctcctgcctcagccaaaatcccaaagtgctcggagtacaggtgtgagccaccgcacccggcctacattgtgtttctaatgagggagtgtgtgtgtgtgtgtgtgtgtgtaactgtatttctgggagggtgtgtgtgtgtaccgtcttttttttttttttttttaaatgaagtctcactctgttgcccaggctggattgcagtggtgcgaccttggctcactgcaacctycgcctcccgggttcaagcaattctcctgcctcagcctcccaagtagctgggactacaggcatgcgccaccatgctctgctatttttttttttttttttycagtagagacagggtttcaccctgttggccaggctggtcttgaactcttggcctcaagtgatttacccaccttggcctcccaaagtgctggcattacaggcgtgagccactacacctggccccatgttgtattggaragaagggaragtgcgtgtgtgtgtcaaattgtatttcggagaggaaaatgtgtatgttgcattgtgtctttaaraagggagggtgcgggtgtgtgaggtgtttctgaggagtgtgtttgtgtgtatatgaggaccccagaggcaccaccagctaagtttctgtgaccttgtcacccacatacaaccacatgaagtcccatagaggggggcccccacccactatgagctgggcttcaractctcagctgtcacatggccagtgtgacatacctggaccacacctatcacacgtgtgtcccgacaggccctgggctggctaagcttgtccgatggaggagggyggagcccctgttcccccagggtccatctgttgcctgggagccaacacatggycccatcctcattccccccaacctagaggcctcctgggcttctgggggccctggcccctcggccctctcctcccaccccacccacccccagtggtctgactggttccsgacaaaaacaccctaagaatgagctcacgcagaggctgccrcctccacacgccccgcctcactctgccggcagaggagggtgcctctggtcccagrtcayacggccaaccgggagctctgggccaggggatccaagggccttggggtggggaaggctggccaggtgagctgagggcagatgggggaccccaggctagctgtttgctttctcttggttaattacacataggatttgggaactgtcctcagggcagaaccctgggttgggaggacagacgaaggtagacaagactgttccagatgagagctggctgggawgggtgtggagactgggatggagagggtgtggaggcagagggctggccaggatgggtggagcagggaagagccaggatggggagaagttaggggtcctgatggccattatgggaatagaggctgggggccaactgactggcccgggcaatgattccccaaacccctcaccattgctccccaggagcagcaatgtctgtgcaggtagcggctcctggaagtgcagggctgggcccagagcgcctgagccctgaggagctggtgcggcagacgcggcaagtggtccaggggctggaggcgctgcgggcagagcaccatggcctggctgggcacctggcggaggccctggcgggacagggcccggcagccggcttggagatgctggaggaaaagcagcaggtggtgagccactcgctggaggccatcgagctggggctgggcgaggcccaggtatgagggggccaggtggggagctgggggaaggtcagctgagggcggagggagggccaggcatgagggggacaggtatgtaggggactgggagaggggttcactattgcagaggggcacactttgggaggctgaggtgggcagatcacttgaggtcaggagttcaagaccagcctggccaacatgggaaaaccccatctctactaaaaatacaaaaagtagctgggcatgagggctcctgtaatcccggctactcaggaggctgaggcatgagaatcgcttgaacctgggaggcggaggttgcagtgagtggagatcgtgccattccactccagtctgggtgacagagagagactgtcccaaaaaacaacagaaaaaagtatggcagagaggcacatccggggcagggggaggcctaggggaaccaggcctgggaaggggaggctccaggtcagagatggagtcccttggcagctttagggggtccttgkgtgtgacagggacccctgaaccagatggcattcttcagtaaactgtgggtcctagggcaagtttgggggtaaaatcagaggggcccctgggagcctctgagggcactggggccatgttggcagagtctctgcagaatctgggcgtgtcgtgcatagtagtggggtgctacggcctgactcgaggcctgggctgggtcaggggcygtctggcagggcaggaaccaacctcgacttgggacccccaccccgggcaggtgctgctggccctgtcggcacatgtgggtgcactggaggcagagaagcagcggctgcgctcgcaggcccggcggctggcccaggagaacgtgtggctgcgggaggarctggaggagacgcagcggcggcttcgggccagcgaggagtccgtggcccagctggaggaggagaagcgccacctggagttcctggggcagctgcgacagtacgacccaccggcggagagccaggtgccacgggcagggcgaggcggggggtgctgggcccttcatagagccccacagtcccccagaycctccttagaatcccacagtccccaagatcctccttagaatcccacagtcccccagaccctccttagaatgccacagtcccccaaccctccacagagcccccagacccaccagaacttccacagacgcccccactagctactccacgaagcccccgagcctcgccagacccccagggggcctctgacgctcgtgaccaccacctccctcaaaccttgagataggctgggtgcggtggctcacgcctgtaatcccaacactttgggaggcygaggcgagcagatcacctgaggtccggatttcaagaccagcatgaccaacatggagaaaccccgtctctactaaaaatacaaaattagccgggtgtggtggcacatgcctgtaatcccagctactccggaagctgaggcaggagaatggcttgaacccaggaggtggaggttgctgtgagccaagatcgcaccattgcactccagcctgtgcaacaagcgaaactccgtctcaaaaaaaaaaaaaaaacaaaaaaacaaaaacctgagatagagccagggccccggtctctgaaacaagcccccaccaccccggccccccactttcctgtctctgcagcagtctgagtccccgcctcgccgagacagcctggcctccctgttccccagcgaggaggaggagaggaaaggtgggtgttgggagtacatgccacagaggatggcaggccagggtggggagggggctctgagctgcaggaccccaaaatctctgagccaggggatggggaggtgagggcagggtgaggaggaccctgaatgtgacagtgcaggtgaggctgggagccacraagacagggtagccgctatgagcctggcaggccccgtattcacatcccacagggcaggtgggctgccgtgttcctgtcccgaggccaggatgcatcccaccagctggttagatgctagtgactcctatctcagaagttagmgtgggggcccatagtcccaggggccagttaggcagtccggcagttctgaggcacgtgtcccctcatgcgaggctggaggggcaggaggcttgcagtgacccagagcccaccccaccccacctaggtcctgaggccgcaggagcagcagctgctcagcagggtggctatgagatccctgcccgccttcggaccctgcataacctcgtgatccagtacgcggggcagggccgctatgaggtggcggtgcctctgtgccgccaggccttggaggacctggagcgcagctcgggccactgccaccctgacgtggccaccatgctcaacatcctggcgctggtgtaccggtgagcactgcggccagccatggctgggggcaggaacggcagggacccattgggtgcaagtggaaggatcctggtgccccctctgtcaccatggagcacctagggaggtcaggggaggggacagcaagaatgggaaaggaagggaaggctcctgctgtgagaacggcaaagagggagtgggacagggatctgggggggccactgagccaggcagagaggagtcagagagcacggacaccagggaccccaacagagcaggcaggagacctggggtggctagaagcttggcagaggtctgggggtacagggcccagtgttagagaattgcgaaatatggaggggcccacaaaaggccctcaaagggtgtgccacccatgcttggttcagccaggttccctgggcctgtcaggattggcccagcccctgtggctgcagctgccccaacccttggctaaccccctccattcctggggcrccccccacagggaccagaacaagtacaaagmagccacagaccttctccatgatgccctgcagatccgggagcagacgctgggccctgagcacccygcggtgagtggggccccagggagacgaagtggggtcaaagtggggccacacctgcccatccctgacctgtgcctcccccaaccccgcaggtggccgccacgctcaacaacttggctgtcctctatgggaagcgtgggcgttaccgggaggcagagcccctgtgccagcgcgctttggagatccgagagaaggtcccatccccctcaccccaccccgaggaaccccttgtcccatgtagccctccccagggatgctgagcacgtacatcgtgaccctgaccctcgggccccttgcgtttggtattgggagaccccagttggagcctagatcacccaacccatcacccttgaccttctgagatcccagtttggtcttgaccctgactgacctctcgccttacctcacacatcaccctccaactgggtccccccatagcctttccaacccctcatggccaccagcacaagcccaaccctgacctacccatctcaccctgtgccccacgtttctggaccaccatgacctctgaccttggtaatccygttagatggtataacttgtgtccccagcccccaacctctcaggtcactctctgctttgaccctgtaatccccaactcatgaccaccatacagcagtgatgtcacgtgtcccaccaatcctgtatgatccctctgacttgtgacccctggcccccaggtcctgggtgctgaccacccagatgtggccaagcagctcaacaacctggccctgctgtgccagaaccagggcaagtttgaggacgtggagcggcactatgcccgggccctgagcatctatgaggcactgggcgggccccatgaccccaacgtggccaagaccaagaacaacctggtgaggcccctggggctcagagtgggccaagagtggagggtcctgccctggggaggcacccattggttggatacagggtgagcaacgtgagggtgggggggggccccccaggccgggcccttggagcaagtgtcagacacaggagctggctcagcacagaacacggaatcaggaaacgcgtaagtccacggcagccagaggacagccagtgaagcggaagctggcaggcacagatggcagcagcagacatttattgagctcactgtggccggctcccctcttagcccggtccccacatcgctagttcttatagcgtccctatgaggtgggagctgtcgctccactttgcgtgtgggaagactgaggcaccgaggccatgccaccagcccaaagtacagcagacaggctcagaaacaggaggctgcctgtcctccatccccagggcaggaagtaaggccgagctccaaacccactctgccccagggcaaggctttaggcaggggaaggatacggccaggtcagcacattagaaagtggggccagacgtggtggytcacgcttgtaaccccaacactttgggaggccaaggcaggaggatcacttgaggctaggagttcaagaccagcctgggcaacataccaagacccctgtctctacaaaaaaaaaaaaaaggcgggactggatgcagtgttgggaactggggtccgaaaagttcccagacactcccttctccgcaggcctcagcctacctgaaacagaacaagtatcaacaagcggaagagctgtacaaagaaatcctccacaaggaggacctacccgcccctctcggtgagcccctagcccctgtctgtcttccctcctggtggcttctctatgtccccatctcagtgtcccccatctttccccctaggtgcccccaacacaggcacagctggtgacgcagaacaggtgaggatgggctgtgcttcggctcctggggtgggcgtggggactgcatgggcctgggggactgagcagcatccccggcccctccccaggcccttcgccgcagcagctcactctccaagatccgtgagtctatcaggcgaggaagtgagaagctggtctcccggctccgaggcgaggcggcggcaggagcagccgggtgagtgttgatcaggtcggcaaagagccctgacatcagcagaatccacagcccaccccacccccacccccatcttgctcaagaaccttccatggctcccatctcccctgtgatacacacagatcaaaccctgtgctggaaaggtccctcgtggaggggggccactcctggattcactcatttcctccctgctgccctctttgcagaatgaagagagccatgtcactcaacacactgaacgtggatgctccaagggctcctgggactcaggtgagggggacatctgggtcaaaaatagaggaggccatgtgggtaggtgcagagatgaggcaaaggcagggcggtcgggccagtggtggagtcagcaggtggtgggttggtgtcagaagagacccaggacaggagcaaagatgggttttacttggggtagaggcgagggggttggatagttggctgccaggctggacctggagctggagggtggatgtaacacttgcccchcccctccaaccatcccctgtgcctgtctccagtttcccagctggcacctggacaaggcccctcggaccctcagcgccagcacccaggacctgagcccccactaacgtccagtgaactgcgctggccgcagcttcttgggaacagtgcaggagggatgggctggtggggtgagagggggtctatcatctcctggcccccccttgcstctgggtacctggtggatagctgccttctcctgcgattaaaggctgtggacgtgacagtgagaaatgtcacctgacttcataagaccttctagcaccaccgccgctgggaaccagggccaggcaagactcaggagtcaccaggaaccgtttatggccccacccgccccactcagagctgctgagcaatctgctctatcctctkcagcgtctcctctgattctagctgctccaggctgagcagggacaggcccagctgatcctcctgcagagaacagaggaaagggagaggggggcactgttgggcaggggcccaggcagctgctgcacttccccaaccaccccsccgaatggccagtagggacaggatgtttgaatgaatttggagatgtccgtataatccagagcgggccatccctgtcaacataagatggggctgagggaggagccagctagggagtcggagaaggaccggctttctccaggccagcaccgtctctcctgaaaacgcccaatgcctcctcaccccaacttctctcaccctgccttgcctgggccacctgctggcatctgtggcccctcgaatctcccccttccccccagagcctggcacgtagatgcacgataaacttctctttgctgagggcaggaggacaggcaggctgagggtggggagtggggagaatccaaggggactttctggaggagaagctcagcctgggagggtgccgggagggggacgcaggcctcacccggtggaagggctrtgscatctgccgcaggaagtacttggccacctggacacsctcrtccacggtcaggttgaggttggcatctgtgaggtgctcctggatccagcggggcagcttcccccgcttgtccccacgggcaaacyrctgtgggcagaagcgcaggccagggacagaaggtcattcggggagcctgggccactctccaccctgcaacccaccccacctgggaaatgaacgggaaacagcctggttcttggagcctgggatgggagcacaggggcacccctgaagctgcaccttgtyggcaaagaccatgaggccgtagtccgtcttgcccctgatggcccracccacacrctgggccgcgtggyvcatggcatcgaaggtaagaaagtcattctcacgaatctggaactggtcccgcaggtattccagccgcrcctgcagatacggaggatgagaagctggggaggtgggggagccactcctcccttgatcctaacactgtgggactccctgggagacagagctactcaccttgagaatgcggctctgtgtgtagacgtaggggacgccaaacatgatgacggccsrcccgtagtggtgcactggtgggcagaggagagggggcgaggggggttacaagtgtggctggtgggacagggacagcctcacgcracccaggatgctgtgtctgagttggggggagagggtgtgttcccgccgggtgcctagggacagaggggaggggagggcccctctgtgcacctaggctgggggtgggtggttccccgcgggagcagacagcagagcgggcaggtgttccagagagctctgggaagacacctggggaggaagagcccagtccactcaccaaagtcgattccctcggacactttgccccgggccactgacagcaggatggscccgsggccattctcgcaggcctgaggtggggagaccgagacgcaagttaggtcactcctcagagccacctccccsacccctctccacgctggcctcgcacacccacctcctggtacttctccagggcgacactggtttcggcaccatcctgggtctcaataaagagcagcttgttcctctggatgttctcaaggatcccctggggaaggacccagggaggtcagggtgggttcagggcacagccatcctggttacatccaactcttctggggactcccacatcaccatgtctctgggcctcagctggctcatctgagatgtggtgagggagggtggaattgtccaacctcagttctttggggaaacagtgatctgggtggggaaccaatcattgctggataagtggggcaggcatgtggcccaagcgggtggccaatcagggcaccccaacccctgccagcgattggtggaggggctgactgtgaggcaggcagagccaatcagaggctgccctgagacttcccatatgacactacaatagagacagtgtggagccaatgcaaggacagaccactgggacagaatggagagtccagaaacacacagccacctgtgcagttcagtggggagagcttttactggagcaagtggatttccaaatggaaccaaaaaatgaaccttgaccccctacttcacaccacatagaaagatgaatttgaggtacctcatagacctggatgtgaaagctaaaaccacaagctcctagaaggaaacaaaggagcctctctctatgaccttggggtaggcaaaggtgtcttaagtaggacacaaaaggcacctgsgctgtggggactgggtcacctttcccgccgcgtggaagccgcctattgaagcacaaggccgatgtcctggctgtgaggatgacgttcccgcctcccatgcgtgcctttccaatacctggattagccaagttcactcacctcaccccaaagtgctttcacccactcctgagagcccggccatggtgtgctcagaggcacaaagtgcagagtggcctcccctcccacccatgtcctgctggtcacccagggcctggctgtggtgagccctgtttccagaatgccccacgacctcctctagctgcttccctgaaggggctcctgcagacccttgagaggctcgccccgagtcttggtccagccttaattctctagaattcctctaacccagctagagccacgcctgctatctgggcctccccaccaggccatctgtgctggaggataacagggatgggtaaccccaaaagcagcagagaagcaaggaacctagaacgtgggggtgactctgccacagggtactcctctgagggaggggcccacattggggcttatatctgcattctcagcctgatgtactgggggcgrggcatgggggtgtgtgctgcttacaccccattcctacatgctgcacrcactctcctgtcacacaggaaacctgtcaccatcagagtgtgagaggaatgaagctgacatagcggtgcagtgccagggactgaggagagcaggtgcagggagggggtggccaggcgtacctgctcataccaggaggccacggtgctctccatgtactggyagckggtgaagaaggccacgatgccatcagggaccacagcggacatctccagcaggaggttcccatagttccggatcacagctgcaaggggtcagaggttgggccctctcctggcccaggtcctcctcccttctctgtcttagaactaggagtttctggaaaccccactgaggctgcctgtcaggcttttcacacatatccccctcctcctcctcccgggcgtgtctgaggacccgccttgccacttcctgaagtcacacctggctatgtgatttgccatggccaatgaaatgagtgcagaaggggccgggcgctgtggctcacgcctgtaatcccagcactttgggaggccgaggcgggtggatcatctgaagtcaggagtttgagatcagcctggccaacatggcgaaaccccatctctactaaaaatacaaaaattagcccagcgtggcggcagaggcctgtaatcccagctactcgggaggctgaggcatgagaatcgcttgaacccgcaaggcagagactgcagtgagccgagatcatgccactgcactccagcctaggcaacagagcaagactctgtctcaaaaaaaggccatgtgtcacttccaggggagcacccttaggaaccagtgcacaatacactgtgaccactgtgatcccacctgtcacattatgctgcctctgacacacccagcggtggaggttcccaggtgaggagacacagggcaggcccctaccagctcacagtggacgtgtaccacgggcaagaaggaaactctgggctgagcaactaaggccagggatatttgttacagcagcatgactcagcccacctgactgatacacctcccctcttggaacccacagaaaccagccccactggcagcataccaatatcctccygggtctcaaatttggagctgatggccacctggtcattgccacggccgatgatctggagagcaacagaggtcacgataagcgaggcagcagcaactgctccagcgtgagtgctgaccacctgctggtgctgttctaagctttttttttttttttttttaaagagagacagggtgtcaccatgttgcccaggctgatcttgaacacctggcctcaagtgaccatcccgccttggcctcccagagtgctgggattacaagcatgagccaccacacccagtctgctctaaactttttataaacacagtgtcattgaatgaaccctcagcaaccctgttatctgcattgcacaaatgacctgggctcagagaaggtgagttgcctgcccaaggtcacacagcaaacaggtggcaaagatggaaccggacccgagtctgtccacactctccaacagcagctacactctagccagccccaggccctgggccagccggatcccgaagaacacccctcgccatgccggcgggcatcccaccagccggcaacctcacacaaccaccatgcagtgggggtcattaccggtccacaacctctgacaggcaactccaaaagccaaaagctctgaacacatttctttttcaagtttggcacaaactcatgaagcagcaaaacctgccctgccccgagtctctccagaggcctgacttactccttagtgtgatgcttcccaatcttttactgccgaaatgggagtttgactcgggggagctgcccagaccccactgtgggcatcacacaccacacagcataggccttgtctctaaaggctggaaaattctgaattccaaaacaaatggctgcgcgcagtggcttacacctgtaatcccagcacttcgggaggaccaggcgggcggatcacttgaggtcaggagtttcagaccagcctggccaacatggtgaaaccccgtctctactaaaattacaaaaattagctgggcatcgtggcacatgcctgtaccagctactcaggaggctgaagcatcagaatcacctgaatccaggaggcggaggttgcagtgagctgagatccgtgccactgcactccagcctgggcaacagagcaagactccgtcgcacaacaaaaacaaaaaaccacatccagcctggggacttcagataagggactgagggctcatgttgacatgcacgtgttacagagacggagacggagaggaaggctcacttacctgggtcacagccagaccacgtactcggcaagatgctaagatgctgactaagcgcctacctgtgccaggccctgggcgacctaagtggtttaccccagttctctctctcaatcctctcaaccaccctgggagatcagggaggatacattcccatttcacagatgagaaaactgaggcttgagagtcgagcccacagagaagcagaatcaagcctaagtctgtctgaatcccgaacccagcctcttcgctgtaaagctctcctgcctgagcagtgggggaagccaaggaaggagggcggccccttgcccccatctcccctcccggccccagccctagcctctcccactcaccatagggcagaggcagacccstgccagcgtcatggtgaaggttgccatggtgacggggtggaagtccaggatcttggggtagatgtccagcggggacastgtctgtggcgggacagtgggagggatctcagcaggactgggcagggaccaggaggcccatggagggaggtcagggactaggaggggacggggaagggtccttaccccagatgtgatgatgacagactggaaacgctcaaatacgggtttgatggccag

SEQ ID NO: 95033 - DNA, 45429 bp, Homo sapiens
  misc_feature (1)...(45429): n = A,T,C or G
cttgaacctggaaggcagaggctgcagtgagccatgattgcaccactgcactccagcctgggcaacagagcaaaactctgtctcaaaaaaaaaaaaaatagaataagaaaataaaatatttatcttactttcatttatctcttctctggtattcttcctttctgtatgtatatctcagtttctggcctaaatatttttccttctttctaaagaacttcttttactagttcttgtaaagcatgtctactagtaaaaaactccctcaatttttgctttttactacttcttcacttttttgaagcttagaaacttagaacttacttttataaaagcatgttgacaaatattgaaatgttatagttgcaatttgaacattattagatgaatataaaacacaaaacactctaaattgaatctcctatggctgactcaatttagatattattttatatcttatagaaaaaaactttcagagttttgtcaatgcttatagcatgtattattactcctcaataaaatcttcatgaaatctcaaaggttgatagtaaaagtaatgatttttttcctatggaatatcctaaaacatacctgtatagattagccttcagactttcaggacgttaaaaatatacagagtacctcagaatacttttcacacacttaggttaaatttgcttacagttatgacagaaataacttcaacttttatataataaaaaataaatcctaagcaaacataaaagttatgatgaccaagttactacttagtaaaaataatacaccacatcaattaatgtttaaactaaatccttaaagcattcaaaaaacatttatggcttctagttgtcaaacaatgtatctatgttgtggaagaagatgtaagatcactaatagaaatttttaaatctcaaattatcctgatttctgaaataagaaatttgcaaaataagaaattatcattgttgcttgggaaatacgccttacttttttatctcaaatttcctttaaatttttggtatataatttaatacctagaagtattctagctagattttatgttaatatgtatagagttcacttttttggataaacaggttttcaacagtttttaatgctgaaaatataacttcttagttgtaatcacaagtaatgattgattaatgggttattggtttattcagaaatgtgggtggcataaggaccaataaagggaataatctgataatttctctctgttattctgcccactagtaatactaagacaatatgttatatatgttctactcagtttcacttgtatttttccatgtgtgtgctttaatttaaaaaaaatgtacacaatgtcaaactttttttcttcttccttttttaaatatcaactcaatgatttgggggactggttaatacaatgctgagaacttggttgggctcccagaggaaaaactaatgataatatggggtccctctaagactaggctccccagaatttctaaactctgaatcttattcacactgagcatctagcaatttgtcaattacagcttaaatataaaatttcaattttgaatttaaagtttaaattttcctactgtggtactggtggtttctgctccctaggctctgatccattaacctgtgattgtttgcatttacccggattgtgtgtctctaattttaggagtaaaagtttgccctgttatcttacttttcttatcaatctaagaagagttgttaactttctgtttgttcagcttttttcttgttgcgaagacaggagtgatgacttccaagctccattcacactggactggaaaccagacatatttacaaatactttgtatagcagttaaaaggagaaaggagaagaaatacgcatttatgccatcttttatgattgcataatgaactttgcaatttgtgtttccacgtagtgtctaattactgcctagggtcattttctttcaatctaaggacattcttaagtatttgttaaagtctgctagcaataaattctctcatttgttgtatttttttaatctggagatagctgttttttccttcatttaaaaaaaaataaaccatctgcttcatataagattcttggctgacacttttttttagggagaaaacattcacaaatcatatatttgataagattaatatacagaatacataaataactcccataattaaacagtaaaaaattaaacagcccaattaaaaattggcaaagaacctgaatacacatttttccaaagaagatatataaatgaacaaccagaacatgaaaatatacttagcatcactaattattagggaaattaagatcaaaatcacaataagatgctactttacacatattaggatgaatagtataacagaagataacaaatacagatgaagtggtggagatattgaaaatcttgggcacagcttctaggaatgcaaaatggtgtaatcactatgaaaaacagcatggtagttcctacaaatattaagaaatagaactaccatatgatccagcaactctgtctctgggaacacacccaaaagaattgaaagcagaatctcagagatatttacacaccctcatttgtagcagcagtattcacaaaaaccaacaggtggacacaactcaagtgggttaacagttttctgagtttttttcttttcttttagcacttagaatatatcatcctactgccttttggtctccgttttctctaattacaagtcggccgttaatctttttggagttccaacttactgaatgaactatttctctcatgctgcttgcaggatttcctctttgtctttgtctttcagtatttttactatgatgtatttgagtgtggattcctttgcatttatcctacttggagctcactgaaatttttggatacatggattaatgcttttcgtgaaattttggaaattttacagctattatttcttcaaatatgtttctgctcttttctcgccattgtattctatggtattctgattacatatatgctggtgtgtttagtgatgtcccacatttctctgagattgtttgttctttttttctgtctctgttttctatgttgcataatctatatcaagctatcttacagttcactgattctttcctcttctactttacatctactgttgatcccctatagtgatttttaaaatttcagttattgcaattttcaattcaaaattccacttttttataatttctatctcattattgatatcctctatctgttgagacattgtctcataccttactttactttcttcaccatgattttgtttagttctttggacatatttataattaagttgctttacagtctttgctacgtttgacatctggctctctcacaggcagtttcagttgcctactttctttcctgtgctgggtcacactttcctgcttctttgcatgtcttatcattttttggtgaaaactgtacattttagataatatattatggcaattatggctaatgatctgctcttctctcccaattctttttgtttgtaatttcatttgtttactgacttgacaggactgactaatttagtgaaacatattttccccacagtgtaaagcctctgacatcacttacctgagggcatggacttgggtgtacacacagtcacaatacaacgacattggttttagcagggctgtctttgactttttctctgttctgtatttaaaactgtctgcccctgttggtattacacacagtctctgctgacttccagctgattgctctactgttttcaacaatgccttggggcatacattacttcaaaatttgatgcaattaaatttgggcttcttctcaggaatagtctttgaggccagactttgagatttgttctggtcccaagagggttcttcctagctaactcttgtgctgaccgactttggtaaacttctagttagcctatggtttatcctcttgttctcatagaattaccagcctcctattaattgcttaccaccaaaatctctattgtttcaggcattcatctctggtgtttgtggctaacctctcccagtgtggaacctctatctcatgagaaagctgggatgagggcaattatggcccggggtaggtattatttctgccttacaagtcagggctggatggaggaggatatccctagacctcttagccagtcttgcctagaatagagcttctgcaacatgacattctgggggctgggtataagaaatgctggcagtttttccatctcagggagatactgtagccttcatttgagagctagggaaagtgttcttggatttaactgtctagaatggggtttctgtcacgttgatctggggactaggagaaagagtgagttatggctcaaatgccacagactcttactgtgtttactagcatttagtagattcttcttaaataaaatttatttatttactgtatgcctttagaacaattttcagggacttaaattattttagttttataaataatttttagcaatcacaattttttactaggaagaggttctgtggggtttctcatgctgccattatggaagtcattcccctgcatcattctttaatgcaaaaaataaaaaggaaggagagatataacaaacctgacgtccactgatacgggaatgagcaaataaattgtggcatagtaatagaatactatccatctattaaattaagtgaattagagccacatatatcagtcaggataaatctcaaacacataatactgagttgtagaataattcgtgtaaaaatatcatatataaatattagaaatattgtatggatgcataacagctgtagtaaaacaggaaaatgtggactagaaggataaaagctaagctctgactagtatttctctctggaccttagaaagagaacaagagacttcaactctcatttcatttcttgctcacacctgtaatcctagcactttaggtggctgaggtgggcagatcacctatggtcaggagattgagaccagcctgaccaacacggcgaaaccccatctgtaccaaaaatacaaaaattagccgggcatggtggcatgtgcctgtagtcccagctacatgggaggctgaagcagaagaatcgcttgaacccgggaggtggaggttgcagtgagctgaactccagcctgggcgacagagcaagactctgtctcaaaaataaagaaataaaataaaatattgtaagcagaatatgtgactctatgttgagtacatgagtgtgtactatactattcctgagctatgtttcatgttttcagtctcaccatttgtgaaacccaagcaggcactcaccagatggtatgaaaggctggaacctggaggtcccacagtcttggggctttggagaggagcctaatagagcaaaccagcaaggatcggaactaagacattccttcaacaaatgttaattaagcacttattatggctgctgctcagtgctagcagctttggtgtagtgccttttaatcttccagacactttcaaatacaggacctcgtttagatgtgtttcagaagggtggatttatttgttcaccacatacttagtacttaacttttctgtttcctcaacagcaagatgagactaccgagagcttctccttcataattttgtcaaaatgaaataataatctatgtaaagaggcggatgtgctgcctggcatatagtaagagcccaagaaatgttaggtactgctgttgttatcgctgtttaccaggcacagttccaatcataggagagacggtgattgaaccgaacagaggctcaaatgtctgtggcgctctcagtaaacccatgagctttctaaatagaaaagaaactgctcctagcctggccttttctgagaccggtgcgtgtcctcccgggaatccagcgcctggcatcttcgcagggtgctgcgaaggggcgggctgggaggcggggcacggctgggagcgaggcggggcggggaccgtcgcctgctgggaccgccgcctgcttggaccgcagaagagcaggaggacgtctgagccatgctcgcggcgatgggctctctggcggctgccctctgggcagtggtccatcctcggactctcctactgggcactgtcgcctttctgctcgctgctgactttctcaaaagacggcgcccaaagaactacccgccggggccctggcgcytgcccttccttggcaacttcttccttgtggacttcgagcagtcgcacctggaggttcagctggtaggagtgggagaaggtgcctagcgtgtcctgaccctaactctgttctgcagcacaagggacgttccggcaacgtgggtggggtgggggatgaagggcaggaagaggtgtggctaacgctggtaacctggtaaaacccactttgagtttcatttcctaacccattaactggcatgattccacctgcactttctagggatggaatattattaaatgtttactatttgcatgttgtcatgttaaacattactggaacaccttayttgtaatgtgattaccttgccctcttttatatgattgtccttaaaaatgctatactttctttctgagaaacttcatttcccatacataaaatggtgataatactacctcaatcttgatcatttctcaactgagttattcccactacactaactgagccctccagcttcaacctccttcccttgcagtgcactctcactaagtaataattttaaaatgttcttcctctgcttaaatttttgccaaacggtgttcagactcctgactgaaccacctgggacccttcttgatgcagcttctttccgtctctatacaataatctcctatcagggctccccgactctggtgaccaagttctttcaagttctctcagacatcaaaccctatctcaagaaaccaatactggttttcctgccactcagcacaggtaacttgctgagagacaacagtgtgacaagtgattatgaagattagataaaatagtgaatggtcaatactgacatatagttggtacataacaaatagtagttcccctttccctgcacatgcctgcagtactttaaacacatggctgtatattgccctcaaatattgatagacaaagttttatcactttatgggagaaatacccaattggtaatactaagtgacagaattagccacagaatgttaaaactaagcccccaaacctgtgtccttatttaattaatatgttgtttaatttccaagtatgtggagattttcttgttatcatttctgttaattatttccagtttgactccattgtggtcaaacatcatactatgtacaatttcagttcttttaaatatgttaaggttgattaaatgacacaagatatagtctatcttgataaatgtgccatggaggctggaaaaaatatgtatttgactattgttgggtggaataattgatataaattattgttgggtgaagtaattgatatcaatatcaatttgattttactgggtaatgatattgtttggtttgcctatatccttgttgacttgttatctacttattctatcaattactgaaagaagaatgttgaagtttcaaaggacagttgagagtatctatttctccattcagttctagtagtttttccttcatgtatttagaaactctgttgttttgcacatacacatttaagattatcatgtcttcttagtgaattgatccttttatcctgtaatgtccctcttaattcttcataattttatttgcctaaactgtactttatctgatataatatagccacaactttttttctgattagtatgtgcatggtatatgcatttctattctttaacttttaaccttcttgtattattatacttgaaattagtttcttgaaggcagcatatacttgggtcttttttttcattctggcaatctctgtcttttaattggtgaatgtagactatttatatttaatgtaattattgacatattaagatttgtctaccattttattatttattttgtttttcctgttttttatgcctctgttttccttttcctatcttcctgtgaattacttgaacatattaaaaataattttattcttatttatctgaggtgttttttagcagctctgtttgtattatgttttacaagtgattgctctaaggattacgatatgcagatgtagctgattgcagtctattagtgtaaaaattttactacctcaagtgaaatatagatatcttgcaaccatttaggttcctttaccctctctacttcataattgttgtaagtgttatctctatatacattgagaactacatcagataatattataattttgcttttgaatgttaaatgcaattttgaaaactcaagagaataatagtctattgtatttactcatttatttacccttttcatttatctyttttcatttctgatgttacaagcttatcatatcctttcagatctgaagaactatctttagatattcttttagtgcaggtgtactggcaagaaattctcttagctttccttcatctaagaatgtatttatttcaccttcatttctgaagtatatttacactggacatagaattctaggttgacaattcctttcattcaacattttaaaagtttatgcttcttctttttggcctctgtggtttctgttaagaaatctactgtcatctgaattgttatcccccatatgtaatgaactttttctcactgccttccttcaagaaattttctttgtttttgtttttgkttaattttcagaggtttagttatgatagatcttggtgctactttctttgggtttatcctgtttgggtttctgaaaatatagatttstcttttgccagtttgagggagcttctgccactctttcttcaaatatttttcaactacacattctttttcctctctttcttggactcttggatactgatggcacaaatgttaggtctcttgttgtgccacgagttcttgaaactctgtttttgttgtttccaatgtagtttctctgtgttgtttagtttgaatrtgttcttctgagctgtcttcaaattcacagattctgctatcattaccattctgctattgagctattttactgaattttaaaatttattctattgtattttcagttctaaaactttcacttggttcttctttatcttttatttctttgttaaaatgtcctaattttttgtttgttttgagactattcatagttattggaaaagctttataacagctgcttttaaatatttaattattctatatttctaacatctgtgtcatctcactgttggtgtcaactcactcaattgatgttctcttgattcttggtaaggtgagtaattatggactatatcctggacattttatatatttgttataagacttaccctggatactatacagatcttttattttagcatatagcctatttagattctgaatgctcacttttgtgggtggcagttcaaatatcaatgcaggttataaagcctctgcagtgctattctggtctactccacttttattacccactcccacaggagcccatctcacattctcatcagtgcaagctggggaaaaggaagatggaacagaagacagggwtccctctggcatagtagcttatgctttactacggagggaagagagtcagagatctgcctatatctcctccaaggggaagtgcacctccttattactgtagaagaaggctggaaagcctaatttgccctctgactcctgcagggagtttctttacttcagcttaggaatagaagtcgcaattcagctcacagactcagcagagaagggtactacctcattattgcaaagtaggctgaaagacaaggtactatccatgtactccagtgctataggaccttttagagttgggaagggtcaaatgtttttcatggtatttgcctccacaacaaagaagtaaaaaggctaaatggtttctgtcctgttgggttttccttttcctggtcctttggctagagagagtagacttttcttaaagatatttttgtctgtgttaattggtgtcatgattaatagaagtaaaatggaatgctttttttcaaccttatctggaataagaagcttgatctgcacctttgttgtattcctaagataggtgttaaaagaggggttaaatgacttgcctaatgtcacaaaactagccagtgacaaaactgagactgggatctcatccttggccctgtgattttcttatcacactgtcatcatttatttttattttatataggtttgcatttttatgtttctgggtgtaaaacaaatggagttaaattatgaaatttagttataattaaatttacattcttgcaattgggaaacattaagtactaactaatagatcttacataagtatttttatgtcagttttcatttcatcttcatgatgggcacacaagttaggtatgatctggtggtgcttccattttaccatggagcaaaatgactgagaacgaacagtgaactgcccgggttattcagctaaataataacaaataaggatttgagcccgagactatttgatttgtatacctattgtgggatctggccagcagcctgcagtgcaacagggctctttctttgttcccaggtggatcggcaggtcgagaaataaaagatacacacaagatagtgaaagctgggtccaggggggtcacsaccttctggacctgcgatgccgccagtgcgctggatataccagcatttattattaagtttagtgaggatgggggtaggttagtgagggatttagggttgtttgattatgaggtgagatggtcacatggggatgaagtaattctttaacatcagtatgcagaagtacagtatacagagataagaatttacaatatagtgtgtgcatcagcaatttctaacagagccttagaacagaaacacagtctatccataacctatgattagcaagatattaatcagcatggttaatcttgccatggctcttctaggtctctttaggattaaggcatactcctgagaatttttggtctaaccggttnnnnnnnnnnnnnnnnnnnnagtatgccttaaccctaagagacctaggaagagccgtggcaagataagggcgtttataaccctatcttatccatgtgaacaggtgcccctcatgggtccatttataggctctccacaagggttgcattccattcccagagctatgatcatctgcttttctgggataggaatcttggtgatgtgaaacctccctgactgcatgtccatttataggctctctacagggggaagcacatcacgcactgttggctcattctggcagcccaacctggcattgtctttacacaatcctgcatgcaattttgcatttacaataatcaggagcatttcatcttttattccgtaacaatagtttcagggggtctccctacatatacccattatctactttatgttgcctgacttttcatgacatggttagaggacaattgatgtactcacatgtttattcactcaacagacatttattaagtgcttatcatatgccaggcaaaatacaaggctgtatatgactaaatgtatactgtacactcttggtaaccaaatgagatataaggagattggatcactgaatggaaaccctggggataaccttttgtagaatgttggaagaaattgggctaaattttaaaggaaattttgatttttggcaagtggctaaatggagtaaagggacagaagatttttaataggggaaaatggtctgagccataataattttattattaattttagtattatgattacttatcacaacaatactaaacatgggaactaataaagtctataaaatttggaaactaagacagagaaaagttaaataactttctcccaaatcacacagaaactaagaagcagaacctggattcaaacaagtttgtataatttcaaaatccaaactcttaagcactcccttacatcacctcccctactcaaacatcttagaattctgattgaaaaccaaacaagatccaaaatattatacctgatattaagactctcctcagcctagctcagattaccttgtcagccttgtctcccatctcccttatcaactgagaagatgcttttcccaggagccttcctcaaccctggtcctcttatgtggttcttaacttcctcccatcaaatattttattgtaaagaatgataataatgagaagtgattatttatctatatgctccattagattgttagcttcttgaagtgaaggacttgttgcactccccagcacctggcattgacctgccacatggtcagtgctctttaaataatgaaccctatgcttcagtcagacaaggtagctctcttgctcccaaacaccttctgcatttcccctttacatctgtatatggtgttctcaccatctagaatgcctttgatttcttactacatgttttttattatcattgtggtttgggggttgttggtttttgtttgtctgttttttggtggcatcctgactttcatttaagatctggctcagataccatctactctttaaaaagatatttttcttatatctgtggtggaaaatcatctcttcttgcgatagctttatgtccctctctatcagcataataacacatgtcatctgctgtgcattccattttttttctgcacagtcagtctctcccaagagactttgacactttaggaacacatcatatcatattgatctttgtattacctccatgtatgatatgccagtgccagaaggtgcctggcaactcttaagcatctcataaaagcctgttaaattgaacatgaatttaatctccacagcctgttctcagaaaccagcgcagccccaagaactacctgtgagaccattattcttggaaggagttcatgggccccagaggactggtaactcctgaaactgcatgcaaagctctttatgtgtatagctgtgtatgtgtttactagagatcaggtctatcatatacattatattttcaaaggattctataactcaaaaaagtaaagaaccactgttttaaagctttatttcccatttccttgtttatttttttttctttattggataaaaaagctttttgactgtaaaggcaacaatacatacacagtgagacaacatattaaaatacagtttaaggagagagagaatcttacctgtctttgtgcctatcctgccaccactgtgcatgcgtgcacacgtgcacatgtgcacacacacacatacactcagcggtacctctataggaccttggtggatatctttccagatttgtatgtaagtgaaaataaaattatatttccaactttttattagaaattccacgttatcaatgagaaaaaagttgaataccttgatacagaaatgtttgaaagacataaacatacgactttaaaaatacaacatccagattgagggacagatgttaaacctcagagaaatatagaaacagcatgcatttttgtgcctcttaggatctctctctctctctcgctgtcacacacactcacagaggcacagctcaggggaacagaccctctgacctactgctggtaggagtgtgaattagtacactctttttctgtttttcttttcctcttttcatgtctttgttctgttggttattaaatttaagaacttagattcagtggaatctctgtaaactttatrtctcttggtagccatggttcaatagttcagtctcttctcccactaatcctttacttcttcctctttactgtaaacatttattttgttccacccttttttaaatgcttatgctacatttggaatttttattcctagcattacatttcctgtctcctattgcttttgtttgacttttatagattctgtttcagttcttttctttttctattttcatttctgattttaagactgtttttgcctttcaaaaggcatcttatttttatctccttttgttttattctgttaaggttttttttttttcgtggctcatttaatgatatacaattgaaaagtgtgccctgccttacaaagtcttctcagaggccctctgggtcatttaatctttctaaagaaatggataaaatgactgacagggtgcacgtaagaattgttagacatcgccatcctcatcccagggctcctaccccgtgtttaaacagttgataataccatacaagttttttatctagttctgtttaattcgaaatatgcagtggcagagagttggtagagataaaattcttaggaagtttatttcagtaaatagtaatggagttctgaatccctcccaagtacaagctaagattctaggctgtatactttgctagttagaagtcatttttaacctgagatttttcagctcttccaaaaacatccttatttaatgtcctaaattagtcaagaaatccttcttgtcaggcctaagaagttcatccaggaattcagcaagggtacattaaaaaaattgcttaatgtgtatggtcccattactgccatttcttagaagcaaagatgcttactttaggagcaaactgacttgagattgaatctcagctctgcttttcctagcaagacaggacatgctgtgtaggagataaggactgatggaggactctgggccaaaagaatacaaggactgagttcaggcttggactttaatgtgggagcaaggtggtgggataagactgaatccactgtatttgctccgatggggaccattaggaacaggactctaagaggaatatggtggagtgtaagtgcaaaggcatctggattgtggagaagaggccacaaacacctaaaggaaatgaagcccttcggattgttaccactgcctgcagctagacacaacccaggcagaaaaaaggcaggggcagggtctacctgggaccctctgttgaacagatacattaggaaggattttgattcgtgaccatacactgtcctccaacctacatttgcagatatttgcacacttgtgcacattcatgaacatacacatccccattctccctctctcccaccccaactctctcactctcactcattcttactttcactctgtcactcccactaaactctgtcactcaggttctggagccatcttgggctcaygtctttgtcctcaaatcttacataatgcctgggaaattccctgcaccactcaatagctttgtcacctttgctgtgttgtttcagctataattcattttccgtcttgaaagataagaactattactactgtaaggtggttgtgagattaatgagataaaatatgaaaggtgcttagcaatggctgcctatgaccatgagtgccttcttcccacacaccagtgggttcctgtcccctttgccaccataagaatgcatccacggccctctgcacacagagctctttcattcctcggagactcgctgggtggctgtgcgcctggaacaagaaaacaaagtgcctttcacattgctgctctcattcttcctcacagaaccttaagagagaggaataattttctcccttttatagctggggagttgaggctcaaaaaataaagcaacttccgcaagagccgaaaacgattgaactatacagcccagattgtcacataactccagagctcgagggctttcctccatgcctggcacctgccctaaaatgcacctcgtattatctagcatacgtttctattatctatgcccagtctaggaagggggcattctcatttggttaaacagatagttatgatttactaagaagtccatacttggtacaccagattaacactaatcatgtctcagccttcttaagtggctgagacatgattagtgttcaggtgagaattcagatgtgctgaattctctctattcactagactctaggatgcttggggttagaaatcttgtttactatgtctatatattgagacaggctttcactctgtcacccaagttggagtgccatggcacgatcatggctcattgcaggctcaaactctcaggctcaagtgaccttcccacctcagcctcctgagtagctgggtccacaggcatgtaccaccatacccagctaatttttatttttttgtaaagacagggtctcactatgttgcccagactggtctcgaactccttggctcaagcaatttgcctacctcggccccccaacgtgttgggattacaggcgtaagccactgcacatggccagaacttatttattttattacagttttatcctcatgccttgctctagggacacatgatagatgytcactcagttcatgttggttgaatacataaatagatatttataaagaaacattcacattctgaagtgaattgaatctgagccttgttgagagaaggagaaaaggaaataaaagcattcccatgagaccaatgtacactcactcacacacacacacacacacatgtacacacacagacacagacacacgcactcctctcaatatgatcccctccagctacacacatcctccatttctgaacacatggacatgtgcatattcaactgttacgatttaactatttttcagtttgtgaagaaatatgggaacctttttagcttggagcttggtgacatatctgcagttcttattactggcttgcccttaatcaaagaagcccttatccayatggaccaaaactttgggaaccgscccgtgacccctatgcgagaacatatctttaagaaaartggtaagtttcttggccaacgaaagrtnagtgtttgatgttgatagtcctataatctgttaaaggcaccttggtgactgtaattttccaacactcctagaaaccagccccataataaacttcctgccactaaagaaagctggatattcacatttcctgattgaagtcactccctsagaagatttgataagatcatccctcactgggatttgggagaaaccacatgccctgcccaaacctactctggatgcttttataatgaagtaaccatgttacccatttatagcagaggaacgtgttctctctgttttcctcttccaaccctctctccttaggaaaatggatgtggatcttcctcctcctgctgctgcttcttcctgtctctatttccttattctctttcattaaggttgtgtcacacagaggatcttgagccttctggtctatgatagaacagattggcatgaacagattggcatgaacacttaaaattaccattaaatataatgaaacatttaaaaattgaaatgaaaatctcaaatctattattctattaaatcaccacttttaggtatgaagggggccagcccttccacacctatgggtatttctcctcaagtgggacaagagactgagaaaagaaataagacacagagacaaagtatagagaaagaaaagtgggcccaggggactggcgctcagcataycaaggacctgcactggcacyggtctctgacttccctcagtatttattaattactattttcagtatctcagcaggaggaatgcggcaggagagcagagtgatagtggggagaaggtcagcaagaaaacatgtgagcaaaggaatctgtgtcacaaataagttcaagggaaggtactatgcctggacatgcacgtaggccagatttatgcttttctccacccaaacatcccagtagagtaaagagtaacagagcagcgttgctgccaacatgtctcacctcctgccatagggtggtttttctcctatctcagmattgaacaaatgtacaatcgggttttataccgaaacattccattcccaagagtaggcaggagacagtggccttcctctatctcaactgcaagaggctttcctcttttattaatcctccccagcacagacccttcacgggtgtcaggctgggggtcggtcaggtctttctcatcccatgaggccatatttcagactatcacatggggagaaaccttggacaatacccggcttccaggggagaggtccctgcagcttttcacagtgcattgcgcccctggtttatcaagactagagaatggcaatgattttaccaagaatactgcttgtaaacattttgttaacaaggcacatcctgcacagccctagatcccttaaacattgattccatacaacatatgtttttgtgagctcaaagttggggcaaagagattggggcaaagaggttggggaaaagttacaaattaacagcatctcagggcaaagtgattgttcagggtacaggtcaaaatggaatttcttatgtcttccctttctacatagacacagtaacagtctgatctctctttctttaccctacaaggtgcttttcaattcttagaaatatttcatcagttaattctatatccattcactgtattatctgccttgtgaagcatggtactaggcatgagtgatggaacagtcagaagaatagataaaatccatatcctatgtagtttatattctatgcagaaagaaaaatagtatcagttaactataatagaagcctacagtgttatgaagtcaagttcaggatgtacttattaatgcagtcctgggatgcagaaaaagtaaataaatattcatttaataaactggtgaaacaatctggcagacagaatagaaaatgaaaagcccctgaaatgaaaaggacagggaacttgaagaaatgaaaggtggccaacatgacaagcatggggattaaaaggagataattaaagggagatgaagctactgagcttggctaggaatagttcatgcaggttcctgttaaggacactagttgttatcctaacattaatggaagctcttgaatggctttaagtagagaagggaattatatttacactgtatatttttaggttttatttaggctgccattcagagaatagaagaaaaggarcaagggacttttgtagcattttaggttacagacagtggtagcycaggctaggaaggtccaatagcagtagggaaataacagtaggttagtccaagatagtagcagtgaagacctggatttgagatatccaggaaggtacacctcttaagacatgatgatgtaggtgcagggagaaggaggtgttgaggtgacactcaaatgggtagatgatggaaagaaggaacacttagaagagtataaggtatttggtttagttgggcatgggtgaaaagtcatatggagaaaactgtgagttcaatcatggatatgccgaattcaaaatacctttaagtcagcaaagtgaggcaggcagcgttgtatatatgcttctggagctcagggacagaaatagatggtcactatcaatagatgttatttaaaattttaggagttgataagatttcccagaaatagagtatagggtgagaaaaagaagaggttttagatgaagaagaagttcctgaagaactccaccatttcaagatttaatagaagatgaaccagcaaaatatataggaagttgctggcagagaattaggamgaaaatctggagacagkggtatcctgagcaccactggaaggcagtatttcaagaaagaagtgtctactgctgctgcaagtaagacgaggtcaaaaggtatccggaccaattcagtgggtgagcaggccatagtcagatattaaaaggtgttgaggagtgctctggaattgaagaaattgaaaggagtatggcattacctgtgttataaaacaaatgatggtctgtcaaacacaccaaaatttttttttctttgcttgtactcttctttctgtatggaactttcactcctccttgatctcttgattccttacatcatcttttaatgtccaggttagataggacctctcctataaagcctttcttagccttagcctctttaagagtatgggcattgtcttaaccattagtgcattcctagtgtttagcataacataaatacttaactttacttatgtaactaataatcaaagcatgggctttggaataaggcagacctgaaattgaatacctgtttagttgcttacttactgtgagaccctgtaaaatgcattttatcctttatcccttgttcctcagttttttcattagtaaaatgtgtggggtggtaataattgtacctatcccagagagtttctatgagtactaaattatataatgcacaacaaaatgcatattaaagtgcctgccattgcaagcaatcagtaaatattakccattatatccattgctttgggattatttctctgggcagttttcaagtgccttaatgatcttctcctgtccttcatctgatacacattcycatatcatttgctggatattcatattatggaatcagaatactgtaatgttgactttctttttcccaggattgattatgtcaagtggccaggcatggaaggagcaaagaaggttcactctkrcagcactaaggaactttggtttaggaaagaagagcttagaggaaygcattcaggaggaggcccaacacctcactgaagcaataaaagaggagaacggtgagcattgcatatgacagaggtgagagactgtggcccatttgttcattggacagatacttactaagtgagtaagtgcttgttctatgcccagcactgtgctaggaatggaagatagaacagtgaacaactctgtcctcaaagagttttagaagtaaatacacaaagatgggcactaaacacattactgaatttaagccctggtccgcagtttgacttccctggagttgactgaatacttgttgtatgtcagatgcagtgtaaggtcatgtggccagctcctcatatatggttctgcactargtatgtcttatgccatgtaaagtagactctcagtaggaaatggagacaaatccatcagaaggatccatcttgcccttcctccaccttcaggacagccttttgaccctcatttcaagatcaacaatgcagtttccaatatcawttgctccatcaccttcggagaacgctttgagtaccaggatagttggtttcagcagctgctgaagttactagatgaagtcacatacttggaggcttcaaagacatgccaggtaaggcagctgtctctccatatctttgttcagtaaattggggccgatgtcagccacagatgggtttttccttttagttttttttgggtttttgaagttaaaatataacctttcaaaactaatttcaacacaaacttatttgaaatnaatctattgactttagttttttaactaatatggaatatttatatgcaaaaaccatttctaacatgcatgtaaagtacaacatgttatatgacatacgcctatccacctatgttgttctttttamaaagaaaaacaatattgctrttgcccttgagtctctcctctctgtgtccttccccaactcgtccatttccctcctccctcagaggttctcttctgtatcctctttcttcctcagcaagttgctttgagagtcatctgtgctggttgctcttttttaatgcagattagtatttcattgtatgaatgtgccactttttgtcaatctgttctgtactgacggacatttgtttccaagttttggatgctatgaataaagctgccatgaacattcttgtacaagtgttcttgtggttacatccactcatattttttatatctgtatctggagataaaagaagtttaaagattgccaagctcattgcattatttgcctgcccaccagcacttaatatcatcaatcttctaattccatagagtgtagccgtttggagttcaaactcacttctcccttggtgggccctgcaccacaatttttgtccctctaagcctttgagtctttgtcaaaaactctgctcggtttcttggttcctcagacactttttggaatttggaagacatttctgggagctggggggaggggggagaagttgaccccaagtattgagttcataccctgggctttcttcttcccctaagccttatcctggaaactacctcactaccttgatttgtatgtatgtgtgcttaaatgtttacacatgtatctttttcatcttttcttggtgttctcagtagaaagagtgcccttgaattacacagtatgccattatcaaaatttttaaaaatttccttggtttaagaaaatgactttatttttgaaaattacaaatgtgtataaaagaatacaatcatgaatcactgtgtatactcatcagtgagctctaacaattatcaacacatggccattttcactgtatctgcatctatgccctactaccacattcccactgtccctgaattattttggagcaaattacagacctcaattatttgatacataaatatttcagcatatatttctaaaaagacccattttaacaaaaataaaataccattgtgcctgaaaaatatgaacaatagttatttaatgccttcaaacactcaaccagtgctcagatgtccccagatgtctcataagtatttttttttggtggcaagctgttgcggtggtgagaaatggtccaaggctggatatatwtttgacagagagctgaactgttttgctagagaggtgagagagaaaagaggggtcaaggataaccaaggtttaagtgtgagcaaataaaagagacggaaagagaagatggtttctgttgtcttaaaaagaaaaaaatggcaccatgttatctgcatgattgttttgtttttctcaattagctctacaatgtctttccatggataatgaaattcctgcctggaccccaccaaactctcttcagcaactggaaaaaactgaaattgtttgtttctcatatgattgacaaacacagaaaggattggaatcctgcagaaacaagagactttattgatgcttaccttaaagaaatgtcaaaggtgagaaaaccaaagtcattttgtattttgttcttagagcacaaatagaggtatattagtttccaactgctgctgtaaaatatgatcacaaacttggtgcctaaaatagcacagattgattctctcacagttctagatatcagaagtatgaaatcagcttcactgggttacagataaggttttggctaggctggatctctttggaggtgctggaggagaatctgtttctattactttcccagcttctaggagccgcctatgtcccttggcctgtggtcccctccttcatcttcaaagccagaagcacagcatcttctcttctctctggtatctgcttccatcctgacatactttctctctgactttgaccctcttatttacctctaataaagactattatgataacactgggcccactggaatgttccaggataatctgcccatctcaaaatccttaaccacatctgcaaagttcctttttccctataaagtaacatccctaggttccagacattaggatgtgaatggatatctttgcgggtcattactcagcctgctacaggagtaaaaataggggcaatatttcagaaaatgtagggtagcattaactcaggattgatgatgcaattagagataaagacaagggttaatagcatttggtttgaggtcctgtgaatgcccaaatacagccctttcatcccccatcccctaccctttactgttatttggaggtatacacaaagggggaacatagcagttaatcctcaaagctctgttctatcattagttgggcctagacccaatgacctaccattttcgcagccctcatagagaacacaagtaaagctgagttggatgccagagtttaaaggccaactttattaaggcctgagttggactttgccttcccttctgttttgtacctttcactttccaacattataggccagaggtgaggaagaaaccaaatgggatgcgtgacctttaacacagttacccctctggttaacacatatcactgcatcaatactgtcatctttacacatcaggaattgggtcctacttctggagtggaaagaatggtggatttctttccctcttatttcaccttattggtatgacatttatagaagtattgttttctcctcagaggaggagactcgctatatgttgtgcaggtaaggaagggatcattaacattaagagcaacattggacaaattgaagtttccagaagatgatggtaaagatgacagagtatcatgaggaatggttggtagaatcagtgagtttcaaattggaaagaaaaaggtgaatgaagagatatgagaattgttgttcataagagaaattccatttgccttttctgttatcagtacaaatgtttgttgagtatttgctctgcgtccttgcattcatataattcataatgccctcttaagaggtgtgcactcctatttccagtatataaaacaggaaactgaagaacagagaggttaagtgacttgccctaggtcacacagctgctaattgaagtggttaatattggaagccaaatctgtctcgttcacatcccattctcctttcactgtactaaaagcttccccaaaattataggcataagaaaataattgtcttgattttcatccatccaaaggtgtccagcacttggggcaggacantgctaatgatattgctgtaataagagtctgccttctgaagaggccaaagggaaaattgtttcttttggggaccttttcttccaaatgtcctcctaggatgaagcccctntgtgttacggcaatcaggaatcctctgaataaaccaataaataacatcaaacattgtgttttctagcacacaggcaatcctacttcaagtttccatgaagaaaacctcatctgcagcaccctggacctcttctttgccggaaccgagacaacttccacaactctgmgatgggctctgctttatatggccctctacccagaaatccaaggtgagcatgtcagtgagtaagcctgaaccaggacagaatagtgcctcctgggatgtgctgcctgaagtcggggccagaagatagcattgtaggatgaaaagagaggcagarcagtcatgagtgatgaggacttggaaactgcacattcttcanattttctgtctgaattgtgatgggcccaggtaatacaaatgtaagagagaatccttgtcctcaagaagctcagaggcaagagggaaatcaacgaagtcagtcgacattgagatagttccaggaaacagttaactttctgatgtgaaagtctagttgtgtccttcccttcttttaagtgatgccttccaatttcctccagaataatgttcaagcactttagtctggtatatgttaacctccgatatgccccttctgcctgtctagccttggccgcacctaccctccatggtggcctcactaagtgacacgtcactttctttgcagtctatatttatgcctctatgtcrtgatagatgcttttccctctacttgcccagttttcctacatagtaaactcctagctcttcttgaagaatctgttcaagtactacctctctaagatgtttctgtgctcccctaggaaattattagcattttctccctccagagatgatgtaatgtgcctttattactaggcttatcatgtattatctatatatagcttccccacagactatagtccactcaagaatgatgttctcattatttttcttcctccagcttccagaaaagtttgaacatatgggggtgggaactcttaacaatacagtttttcaaattgtgggtaactgtttattaatgaggcataaaatcaatttagtgaatcaagaccaacatttttttcttaagataaaaatagaaaagatcagagtgcttcccatgtactaaggtaagtttgtttacagaactttatttttttcatctgtagttgcataatgtatgctttatatgtatatttaggtatatgcatccaggttcatgctcagttaaaaaggctagtaacaaacagataagcactgtatgattccacttacatgagttatcaagaatagtgaaattcctagagacacaaagtagaatggtggtggccagaggctgagggaggggatatagagcctcagttctgcaagatgaaaaagttytggagagtgattgcctaacaatgtgaatatatttaatactactgaactgttcatttaaaaatgctaacatagtaaattttatgttatgggtattttacccccaaataagatgttttacaaaaatgataatttatttcgctttcaggtaaaaaaaaaaaaatccaaactaggctttgcaaagccattagggttcccagctccttccaacttgttgctctgttgtgattagaatgatgcccttgttagcactctgtaagacggctcaccaataggctttccaccagtaggaagcaaaagggggaaggaagtgcatatcctttctttaggaacctgttccaaggattaaacatcacttctgcttacattctattagccagaattgagtaatatggtcacacttagttacaataggacctggaaaatatattcttttttctcgctctgtcacccaggctggagtgcagtggcaccatctcggctcactgcaagctctgcctcctgggttcatgccattctcctgcctcagcctcccgagtagctgggactacaggcgcccgccaccacgcccggctaattttttgtatttttagtagagatgggatttcaccgtgttagccaggatggtctcgatctcctgacctcgtgatccgcctgcgttggcctcccaaagtgctgggattacaagcgtgaggaaaatatattctttagctgggcagtcaggtctccagctaaaatctctattactctagagaaagagaaaagagataaggctgctacagtttctctctttggctaggtgagcactcaaccaatgaaagaaactgggagcagtcctatctggtcacacaaatctcaaaacatcagttcatgtgaatgtcaaaacatccttaagatgaaggtagatttatcctcactaatcaaataaggaactgaggtttaaagagtgtaagtaacttgcagcatcaatgttgtagagcaagagtttgcaacctgatgggtcttacctcagggcccactttccactcttacatatctacctgagaaattagagtctgtagatctgctatgggttgaatacttgggcccaccccagcccaaatttatatgttgaaaccttattaccagtgtgatgatattaggaggtggggcctttgggaggtaattagccttcaggaatgggagtagtactgttataaaagagactccagagagctgcctcactccttctactatgtaaggacacactgagaaagtgccatttgtataccagaaagtgggtcttcaccagacaccaagtccgctggggtctgatgtaatgaagtttagccatattaatcctggtcattccatcccatagcctaaccaggctcaaggagatttacagaggtggtagttttctgaataagcctttcaaaaggttaagaaccattttatttcttgcaacctggtcactaattgaaatacaacagatgacatcttggagaccactcatacctctttataataaagcataaaagtttaaaaaataatagaacccttccctctttaccagaaaaagtacaagctgagattgacagagtgattggccaggggcagcagccgagcacagccgcccgggagtccatgccctacaccaatgctgtcatccatgaggtgcagagaatgggcaacatcatcccccwgaacgttcccagggaagtgacagttgataccactttggctgggtaccacctgcccaaggtaattaagcagatcttcaagcccatcttttaggggggtagaaacttgaacttgagaagtgacatttattcttgtcctaaggaatcatttaaatggaagaaaaagatatcttatacctgatataatactagattttctccatgtgtagtcttcaactagataaataggtattgtggggaggggagcaggaaggattcctacgttaaatatgtttagataaagactggcttttctttcctgtggggcctctcagtgtttttactatgctaatgtgcattgtgagtctgtgggcacgtggcaggcagcagttctaggtcagactttatcacagaacacttttctttgttttggtagaacatctcaccagactagggatctgccaaactttgggaaattctgcttcatgaacctggggttctagaatgctaaaatgtgaaaggacatttaagaccacctgggacaacatcatattaatgctggtgtttttaacataatatccccacaggtatttttccagttatttcttatagtcccgtgatgtataatttattaattaatgtatgtatttatttatttgagatggagtctcgctctgttgcttccaagtagctgggactacaagcatgcgccactatgcccagctaatttttgtatttttagtagagayggggtttcaccatgttggttggccaggatggtctggatctcttgacctcgtgatccacccacctcggcctcccaaagtgctgggattacaggtgtgagccactgcttctgacagatgtataatttattatcttataaggaagccaatctaagcgtgtgcaatattcattattgggaagggaaagaaaggagtgaacatgtattaagcaatgattatgggttgtggacaatgtggtctctttcaaaatgtcttattcaattctcagagtaagtttactcagaagaagcttgttatttccatgttatggattgcgaagtcaaggctcagaaaaattaggtttgcatgagatctctcaactatgaagagttgggatctggaagcagatctgttctgtttctttgtgagacaccatgctcccttcacaggacttgctttacattgattttaaaggcatctccctattattttttcaattggtctaagttaaattccctgtactcacaagtggaactctttctttttctttcaacttttgttttagattcagggagtacatgtgtaggctcgttacaagggtatattgcacgatgctgaagtttggagtatgattgaaccattacccaggtgactggcatagtatccaattagtagtttttcaacccttgccccactctctcctccagtaatccccagtgtctattgttcctatctttatgtcgatgtctatccgatgtttacctcccattataagtaagaacatgcagtatttcattttctgtttctgcgacaaacagaattctgatgtcactccattcgccactcttaggatctctgcagacaactatcctgtgccctctagtgccctctccccacattgcacattttcagttcctttccttgctttctaaccactttggtcagcctccgtggatcgattccagtctgtctaagtacctctgagtgtgtcatacctggggaaaatctcgagaagtagaatcagaagagcttacccattgggcactacttggttactatccctgcagagccaggaaaagcagctgttacatttactatttccttactgattgaccatttagtggataaaggctgaggtctaaattccccaggtgctgtttgcatttttctagcaatttatttaactcaaggaaaccagcttgacttctgctgctgctgatttttgtcagctttaaaaatcatcttgggaactgacaagttgaaataattgtgtgttacacagtctacgagctatgactttgacgtcaaatagacctaattcaaatcatggctctgcctcctcccactctctgactctgggcccattattttacctctcaaagcttcaatttcttcatctgaaaaatgcatttaaacctacttaacaagatccacatggaggtaaaatgagatcatgcatgtagggcatttaacccagtacttagtacagaaagtgcttaaaatagcaattattggccgggcatggtggctcacacccgtaatctcagcactttgggaggctgaggcgggtggatcacctgaggtcaggagttcgagatcagcctggccaacatggtgaaaaccgtctctactaaaaatataaaaactagccaggcgtggtggtgggcacctgtaatcctagctacttgggaggctgaggcaggagaattgcttgaacccaggagatggaggttgcagtgagccgacacactgcactccagcctcagtgacagagtgagagtctrtattaaaaaaaaaagttattactaatattggcaatcattgatattaattccttgaagtaatattatattaatatgttaatatttgaatgaattcaacaaacactacatacctgaaatgctcaggtctggcaaaacaaccctgagaaaagtaatcatgcaagtacatatttagaaacgtgataactgcccaaaggaaaaaactcactgtggtctgtaaaaacagactagcaggagtggtcagggaaggcttccaaaaggaagtgatgtttgagctgaggattagcttcaagagttagcttgatgacaaagtggggaggaggaacattcctggcaaggcaaatagcatttaaaaaggatgctgaattaagtaggaaaatggcatgtttgagaaactgaaagaagagccctgtagtgggagtgcaggcagagggggagagtagtgcagaccaggaccaggtgaagagtctttgccctgagagcaatgggtaactattgaagtgtgtcaagtcctaggtatgagcagtgggggctgtggaggtggggaatgacatgactaaatcatgctagaagctcactctcttccagagtgtgaagcagattgaaaggggtgacaggatttggggcacagttaggaaactataacagtggtccaggcaagccaggaagaagtctggactaagtgagcattggtggacatggaatggaggtgaaagtaaaattgaccagtctcactgatgggttggataacgacagagtaaaggaaaagctccctctgggaactcctgtgtttcttagcatgtacctggatggacaggggctccttgcatgggtctacctgattctattactaaacctaccatggggagtggggtgccrtgtactagacattggaggaaagagaatggtgaaaccaagatgaatgagatgtcttttacctttgtagagctgccatcgttatagcttcactgagcagctgggctggttttggtacagtgcagactgactgttggattattctctcatcagtgcattcatgccccctccttccaagccctactgaaactgacctgtccctgtaaggaagctcgatcctgcagtcaagagtagccagacatccttgttaaaattcccagcagggaaatccaatctaatttgaaagctgtcccagacaaagagaagggtcctgggttgggggacacaggagactgtgtaccacaattggggagggtggggcagtatgttcaggcccccggcaaggaagccggaggatgaccacccctctgcataggtgtgctttttcatgggtcaagccttgcctgagtctctgctgctttctctagggtaccatgatcctgaccwatttgacggcgctgcacagggaccccacagagtgggccacccctgacacattcaatccggaccattttctggagaatggacagtttaagaaaagggaagcctttatgcctttctcaataggtaagttgtagtaaacaggtgtgtgggagtccagggcccctctcccagccctcccctgctctctcctgttttcccttgttttcattggaatgtctccagacagcctggccagtgcgactcactccatcttgctgtagggggcagccctgggatttccaaggctgggcattgcttcagcctgcccttacttcctaagccctccattcattgcctctgctagagatttcagctttcctgtgttctgtcctctggaaaactggtgacagagatccagactccaccaccagctcacaaagaggattaggtgcttccattttttttctttttttgatacgaagtttcactcttattgcacaaggctggaatgcaatgccatgatctcagctcaytgcaacctccacctcccaggttcaagcgattctcctgcctcagcctccctagtagctgggattacaggcatgcaccaccatgccaggctaattttttgtatgtttagtagagacgaggtttcaccatgttggccaggctggtctcgaactcctgacctcaggtgatccacccgcctcggcctcccaaagccaaagtgctgggatacaggtgtgagccaccacacccggtcgggtgctgccatccttactaaatgttaaaatgtcctcagttctttttaagggctgcccactcacacagaaatagagctgatttataatgagatagagagggacaaggggaaggagaaacttatttgccacatgggcatcagtcagtggcttaacttgattggattctactctctaagtactcccttgaaaaggttctttggcctttgtaaattttaattcattttttaaaatctaattaatacatttatataatatgtaacttgaaaattaagaaagaagaggcagtgaaaactctctttttttctcttgtttttaagatagccaggtccaaaaatatatttttaactcacgacattgaacaatcaataacaaaacttcttaatatgttccaggttttgagttagatatgttgcatagattatttcaaataatttcacaattctttaattccatcaatatttattgagcatctattatgtgtcaagcattcagccctggtgatatgacaatgaatgagtgaaacagaaaccaaaacaaaacaaaactgctcccatggtgcatatgttctagtgtaatcatataaagtttatattactataaccactttagtgatgaggaaactgaggcttaaccaagtatagaaactaaagtcataaaactcatctggcagaggtaggatcaatgtcaaccagattaatcaaaaactaaagtgggtgttcttgctaacactatctactgaaaataactaaatactacacagacccacactgtggaatgcacgatagtttgcttattgttaatttaaaatatgtattgatgttccgagacaagatcattttgctgagaatgacactgaggctcagaaagggcagaaacggaatgacccatgttggtgtgactccaaagcccatgctctccccctgtgctgtgttgccttaggtgtctctgggctgattctgatgatcgatgctgtctttgtctttcttcatctaattctgtcacctccgctcacactggacaattcacttagaatatgaaagctgatataagacataggactatcttccagtcttcctgtctacaagagtttgaaattttgtattatagcacaaagtttcggctgttatgttccagttattataattaattattcctgttctttggctcttgcacaacatccatgtggaaatgctagaaatgtgacctctgcattccacaaaaaatgcttcacctaatgccagctgcaaccgtgatgagaggaatcttattagaagtccgtggttttaaaaggaaaagggatcctctgggctaagtgatgcctggataccttttcttcacatcacagaagcctctttctcatagttccttcatgtctcctgttttaaaaaaattatcttatctgaattagcagtagtctttttaaaaactatacatggtgactcactgctgctttgctattgagaggtgtattgcaccctcttagagacttcatttgcaagaaaattgtctaatttaatcattacaacagcccagttattaatagttaggcaggaaatggataggtatctccttttaatttaagataactaaaaataagagagagttctttcttatccaagatcatatgctcaaggaatttgcagaactggtcctaagactcaagattttatacttctagtctagtgttctctctagtacgactagaatgtagcttacttccccatttaaaggcctaagattcactaatttcataacatatgcatcagttagcatattgctacataacaaacagtccaaaactctgcagcttaaaacagtaagcatgaattattgctcacaagtctataagtcagatatgtggctgtgcccatcttggctcggccccctggatatctctgatcttggccagtggtcaacaggctgatggctgatataggatatcttcacctgggacagtggggcccttctcacattatccctcatcctccagcaagctgtcctggcttagtcacatggtggtgataaggtcaaaagagggagaatggaagcacacaggcctcttaaggtccagactgggaactgacacaccatcacttccattgcattatgttttccaacaccaatcataaggccagccccagtttaaggggaggggatattactacaatttttgatgggaagagctatgacatcgcattgcaaatgatgtggatccaaggagaggggaaaattgaggctgctttgttcttaccatctctctttctgactgagaagaatgaaattcatagaaggcaaaaaatttatctgggatgtcccaaagcagatgtgataggatgaggaccatttaaatggatcaggagatagaaatctgaagaatccaaagggttgacaaaacatcaacacaactgtctgtttttttcatcacatgcccatcttttggcatgcagttgcttttccttgctgttcctttactcttggtaaagagtcttctagaggactcttccgaagtcctcactttagaagatgtaacagcttctaaagtgtgcataatcaagacaggtttcaaagtttttattgcaaatttatatttacttttcctcatttaaattcttcctgtttgatccatcaaagcagcaagcagctttatgaaatacatgagcccagttcctctctttccagttaaaatcattagattctaggagatagggctggaaagaactttgccaaaattgtaagtcagttctctcattttactactgaggtaactggcctggttggttagtgatagtcagtttgtggaagcaccagggaggggagccaagtatcctttcttccaggccaaagctttgacacctaacagtcctagtttccatgcttttaaaagcaaattcatatctgccattgcattgggatccttgcctagccgtgtaacatggttaggagagaagttatttcatgtatgtgacaaatgagataagtttagttttgcgagaatgaatggtttattaatagtcacacagttggttactgatgaagccagttctttaaccctggttcctgacttgctaggtccagtttgtcatgatatatggattcttttaggataatcttgggtatttacaataaactgacttggtatcattttagcatgttgctaattgtactatttgtgatggataaagagataaaggtgaggggaaccgagatgaattagacacacactgttgggaaaacaggcacaaataatataacgacataaccatgaagcatgtttgcctttactaagcatttttgcatatatgatctaactttatttccttaacaacctgttacagacaaaggacaaaacttaggcatgcatacatttccacgaatattaaattacatgggaaaatataaagcagtaaaagcagcaaatagaattgactatagggaataatatctgttatgatgtacagataatctccacaaggacaatgaggaaatatgttaaaatgttgacaatggttttgtctagattatgggattacaaacattttatggttttgtctttataactttctttttcatgctttttaaaattattgctgtgaataggtactacttagggagaaagtaagctactaaaaatacacacaatagagatggtggtagtgacttgtgtggggtaatgtagcccaggtggggtgaggaggacattcacataggggagggggtggtggaagctgagtgctggcctcagagcacaaatggtatgaggtggagtctgcacagggtggctgtggcagtgatgagaggtaagttatatacaagggatactgatccaataagtaaatatattgaggataatgagaggaagttgcaaataaagaaagggagaaaatcgaactttgtgrtgttggrttggaatctgatgtaatctacaatgaactcagattttcaataggtgaatcaataaatgtagaaatgtagatgtaaatatgggtatatatatttggtgtatatatatatatatacttggtgtgwatatatatatattttatatatgtacacacacacacttttggacatatacccacattatatacatacatatatttcttagctctgcccactgatataagctaggggcaacaacatctggagagcaatgagcatgcctaatgcccagatcttgatttctacatattattatccactaaaagaaaccaggacttttggaaaaaaatggctgattccagggctggggaagggaaagtattataaacctggaatagattgttgtgcccaaagtcaggaaatatcagcttgattgggcatctaatggtcaaatctggaatattttgagcatcagaacaagtaatgatagtaacagattataaccctttgaataaaaacaggaatcccatgcatttaactgatatcaataaatgagtgaataaataaatggggaggggagcaagcatttcccttagtaaagtgttaactaataaatgtggaagaaatgacagaattttaaaaatcgcgatttggtagccatcagcaattaataatatggtcaagagatatacctaatgctagatgacgagttagtgggtgcagcgcaccagcatggcacatgtatacatatgtaactaacctgcacattgtgcacatgtaccctaaaacttaaagtataataataataaataaaaataaaaataaatcaaaaaaatatatatggtcaagaaatagcaatggaaaagaatggatcacagcttaatgagaatggtttgttgacatagtctcaaagtacttattagttacagagaaaaagaataattttacaagagaacttggtagacaccaccttaatcaagtgattaccaataatgtaacacatcacaattgtatagcacttgatagkataaaatgagaagaatacagtatcactttggtgatattcctacccaaaatggaaaactccacagcctgaatccaatcatgaggaagcatgagaggcatttacaaaacaactggtctgtaatctttaaaaaggccaaagccgtgaaagttgtataaagagtgaggacttattccagactgaagaactaaggcgacatgacagctaaatgcaatccatgatcatgtactggctgtactggacccttttctaatgaaggactttgggacaactggtaaccctgaatgggacctcgggaagatgttggtcatgcatcagtgttaatttcctggcttggatggttgcattttgactatgttggagaatgtctttctttttagaaaatacatactgaagatttcatgggtaatgtagacaatttacttccaaacaacttagaagagccaagttctttgtctatctctgcaagttttttgtacatttgaaattatttcagaataaaaggcttgttatggaaagtatcacagtaaagaattgtaatatacagaaagctgtttgagtaatgctaccacccaaaagattttctttaraggtcatcttttaaattgtattctcctgttttttgagaattaaccagatcaagttaataataagcaattgtacagttatgtttattattacctaggtgacattttaaaatactttgttttgaggtataaattattaaattatttagcttatttggattcagcatgtagctcacacaatatataaagttctcatcttaaacacatattcgttttcactaatatgcacaatgtacattttcactgattcctagagaggttgtttaatttgccccaatcacgtggttaggaggtgggagaagctgaattgaatctctgcccttctgcctycagttcacccacacataacagggagtgggacaaggtcagggcaatgctaggtgtcagctgtggagaccaggacccagccttgggccacacttcagaagaaatgcctgcaaagggaaagggccactgtgcataagaagaaccactgaaggaggaaggccaaagcagtcrcaatacagagggccacccatgccagtaggtcccccatgattaaggaggaaaagtggcacagggaaaagatgacttataccttaggaactctgctctgacatttatttccttatattttcaacaatttttttaaggattaaaaaagtgaacatatttggttgtttttgttgtctttttttgtcacgtttgttaaatgatttttttaaagctcttaggctaaacatcccctttctagctcagcccacgccttccgcttctatggtcctacaccctgcaacttcattctggaagctcgcctgccggacccctgatggcatttgacttcgtgttcctggacttctgctttctatgcattgatgaacccaagtggttatcagacttaaataagctgctggccataacaccctggggcctacaggcccttcctctgctccatttttttggggatatgattgaggatagcaatctctgctaggcacaaatgccacctgagaagataacccgtcttttgattttgtcttacaggaaagcgggcatgcctcggagaacagttggccaggactgagctgtttattttcttcacttcccttatgcaaaaatttaccttcaggcccccaaacaatgagaagctgagcctgaagtttagaatgggtatcaccatttccccagtcagtcaccgcctctgcgctgtwcctcaggtgtaatattgttaagaaagaaaggggcaaggaaagyaagaagacatggcacgtgttctgaaaccactggtgtctgctcagatgtgttgggacmaaatgaaagtgactttcaagaaagatcagaggaatttgactcagagaaaactagatccaaatcccagctctactgtctygtccgaattagccttgggaaaatcatttatatgctaaataatttacctttttatctaggagatgaaaagaggataatgwttccttccataaagaaagttcttgtaagaatcaaaagaaatggtgagctttaagtggtttgtaaaccataaaacacatcataaaagttctatctrtagtgtgcctccttcctgcttcctttgtgagatatgtgtttgcttctgacctgttgagaagctcaagtcaaagtggtgcaaaatagttgataagagttaaaagtgggccctaggagcagccacagaagtgagctatgaagactccccagtttggtagcactgtgcatgcgttatcttgtttctgtctcagactgatcctctgagaagtcagcagggcaggttttattcctcatttagagacagggaaagcaggtgtcattgaaacagtttctgtagtttacataagcacacacctaaggccaagtggaatgtgaccacaattaaccaacctgggaaacaggtttcaggaacaaatgtggaaatatttttcatccttaacaataccttcttgcctttaatcctccatcagacacttattcccatgttgtttcacactggctttaacgatggtgggtgtgatcttttcttgcaactagactgtaagctttttgtggctattaccagcctaaactccctgggccctgttttttgttttttttttttgtttttttgttttttttttttgaggtagtgtcttgctccgttgcccaggctggagtgcagtggtgtgatccacttcctgggttccagtgattcacctgcctcagcttccctagtagctgggattataggcacatgccaccatacctcgctaatttttgtatttttagtagagatggggtttcaccattttggccaggctggtctagaactccagactcaggtgatccacccacctcggcctccataagtgctgggattacaggcatgagccactgtgcctggccgaccttggtattttatagcaggaaaacagaaatgccaaaatcctgctcactcactctaggtgtggctgctgaaggaagataaggattatgaaatagaaggccaggtaacactgatagtacacgaagttttgaccccaataccaatgcaaacaaatgaactcccagggaacctgggctaagccttataaaaagatcctttttcctaaggtggtgtcttagtctgttttctgttgctgtaatagaatacctgagactgggtatttataaagaaaaggagtttatttgtctcacatttctgtaggctgggatgtccaagggcatggtggcagcttctggtgagggcttccatactgtgtcatcacatggcagaaaagcagaaggacaagcaggtgcatgcaaaagacagaaagcaggaggtgccaggctcactttatatcagcccactgtcacaacaatgaacccactgccataacaatgccatccatccattcacgagggccatgccctcacaacccaatcacctttcattaggccccatgttccaacactgcaacattggggaccaagtttcaaaataagttttggagaggacaaacacccaaaccatagaaagcagttagacctaaataatttaaatagcttaaaacaaaatgggccatgaaatcacggggctctttcttcctgctgtttgggattcagagaaaagccaattcaattgacgctgtgagaaagggaaacagaaaaggatgggaggaatgtttgactgctgctaatctagctggggagccaagaaaagagtatgtctggaaggcatggttgggtttttaatgtgtgggaggaggttttgtttcttccctagtaaaagaaagaatagaagtgagagccccacctatgcccatttttttttttttttttggtaacccaccagaaatttgcatctctagaaaacaggccatgtggtattctgagaataaaaccaatcaaatcaggccctgaacttgaacttctcaaacatccaggacttccatttttccccaatcagatcacccaagtaggagactcaaatggacactggccaaaatacatcatgtgtctcagtttcctcatttgtaaaatgaaggactttgttgaagtcatctctgagttccatttctactctgctgtgcattttctgtgattctagatgggcagtacatacctgttacttgggggaataagtgtaaaaccactgggaactcatcctgacctgataaatgcaatggaacccagggccaaataggatgtgagcacaattaaccagaaaccttggggaatagatgactgtgagtaactgaattttctggccatataaaatatcttttttctcaaagcccatggagaggctctaaaatatgagcccccattttgtccaagcacttcctgtcccacacaaagattttgttctatatgcacatttgtaattctctttttcccccatctattttggaagctccagggcccctgacccccttctcttgtatcagggggtctgatgacatatggtgtgcaagcaacataacatgatctgtggtattgtggaggaagcatggatttaccaagaggcactcaggctgtgaatcttctctccactactctcctacaaagagatgcagacacatgcatgctgcagtgtaaatttaaaaccaggttggaggttgaagggcttaaagcagaggaagagcaggacacacaggattccctgagttgttagggaagtgttcctgggtcaggcatagtggggctgcatgcacccaggagaggtccaggagggagactgacctcacagtgcctgatatggtttggctgtgtccccatccaaatctcatcttgaattttagctcccacaaatcctatgtgttgtgggagggacctggtgggaggtaattgaatcatgggggcaggtctttctcatgctactctcatgatagtgaataagtctcaggtgatctgatgggtttataaaggggagtttccctgcacaagttctcttctcttgcctgctgccatatgagatgtgcctttcaccttccactacaattgtgaggcttccccagccccttagaactgtgtgagtccatgaaacctcttcttttgtaaattgcccattctcaggaatgtctttgtcagcagtatgaaaatggattaatacagtaaattgctaccagtagagtggggtgctgctgaaaaaatacccaaaaatgtggaagtaaatttcgaactaggtaacaggcagatgtggaaacattttggagggctcagaagacaggaaaatgtgggacagtttgaaaccttctagagacttgttgaatggctttgaccaaagtgctgataatgatatggacaatgaattccaggctgaggtggtctcagatggagatgaggaacttgtttggaactggagaaaaggtgactcttgttatgttttagcaacgagactggcagcattttgcccctgccatagagattcgtggaactttgaacttgagagagatgatttaggatatctggcggaagaaatttctaagcagcaaagcattcaagatgtaacttgagtgctgttacaggcattcagttttataagggaagcagagcataaaagtttggaaaatttccagtctgacaatgtgacagaaatgaaaatcccattttctgaggagaaattcaattgactgcagaaatttgcataagtaacaaggagctgacaatggggaaaatgtctctagggactgtcagaggtcttcacagcagtccctcccatcacaggcctggaggcataggaagaaaagatggtttcctgggctgggcccagggtacctctgctatgtgcagcctagggacttggtgccctgaattccagctgctccagccatgactgaaaggggtcaaggtacagctcaggccatggcttcagagggtgcaagccccaaatcttcacagcttccacatggagttgagcctgtgggtgcacagaagtcaagaactgaggtttgggaacctctgcctagatttcacaggatgtatggaaatacctggatgcccaggcagaagtttgctgcaaaagtggagtgctcatggagaacctctgccagggcagtgtggaagagcaatgtggggttgaagcccccacagagaatctccactggggcactggctagtggatctgtgagaagagggccactgtcctccagaccccagaatggtagatccactgacagcttgcaccgtgtgcctggaaaagctgcaggcactcaatgccaacctgtgaaagcagccaagaaggaagctattccctgcaaagccacaggggtggagctgcccaagaccatgggaacccacctcttgcattagtatgacctggatgtaagacatggagtcaagggagatcattttgtagctttaagatttgactgctctgctggactttggactggcgtggggcttatagccactttgttttggccaatttctcccatttggaacatcggtatttactccgtgcctgtacctgcattgtacctaggaagtaactaacttgcttttcattttacaggctcataggcagaagggacttgccttgtcttaaatgagactttggactgtggacttttgagttaatgctgaaatgagttaagactttgaaggactgttgggaaggcatgattggttttgaaatgtgaggatgtgagattttggaggggctggggcagaatgatatggtttggctgtgtccccacccaaatctcatcttgaatagtagctcccacaatttctacgtgttgtgggagcggccgagtgtgagacaattgaattatgggggtgggtctttcctgtgctattcttttgatagtgagttctcacaagatctgattatttcataaaggggagtttccctgcacaagctctcttctcttgtctgccgccatgtgagatgtgcctttcgccttctgccatgattgtgagacctccccagccacttggaactgtgagtccattaaacttctttctttttgtaaattgcacattcctaggaatgtctttatcagcagcatgaaaatggactaatacagtgccctacatatttatagacaggaggcagggctgactaggtgactaagtagcaaggacagcttcctgggtgaagaagcggctttgttagaatggggaaactttggacacccctagtgtcaagctgtacatcccttgagctcaatcaagcctgctgagccaagttttttctaagccatcaaaaggaaagagatagggtattaggtatgagtgtgcagggttatcctgatttgtcactccacagccccttactgtgactttgagcaagatatttaaaccttcaagcctccaatttcttcctctaaaacagtacctcactacgtggtaataagggtaaatatgaaaacatgaaattttgtctgtgtaacagaatgaagaggaataaggctcattagagtgcaagacaaaagtggctttatttctaccccaccctgccaccacagtctgtaaactatgtctgttttgcctctgaatcaaatttcaggcaagtctcattacatttctgatatgacaaacgtccatgtcctcacactccttcatgtgtcattttggtccttacaatttgcagtccaataaatatacaatttatataactattgggggaaattcagccagatattgggcgaaattcacccccgatatttcacgtaggttcttttctattttccttaagtgtctgccagtctgagaaataaagggacagagtacaaaagagagaaattttaaagctgggtgtccgggggagacatcacatgtcggcaggttccgtgatgccccacaagccacaaaaccagcaagtttttattagtgatttcaaaaggggagggagtgtacgaatagggtgtgggtcacagagatcacgtgcttcacaaggtaatagaatatcacaaggcaaatggaggcagagcgagatcacaggaccacaggactggggcgaaattaagattgctaaggaagtttcgggcacgcattgtcattgataacatcttatcaggagacagggtttgagagcagagaactggtctgaccaaaaatttattaggcaggaatttccttgtcctaataagcctg

SEQ ID NO: 95034 - DNA, 39402 bp, Homo sapiens
cttataccaataccacacaatcttgattgctgtagctctatagtgagttttgaaatcaagtagagaaagtcctctgatattgtacttccttttcagaattaactattctagagttgctttgcatttccaagtaaatttagagtcaacttgtcaatttattttttttaaattcatctgtgagacttgccttttcactttttatgtttcgctttgttttgaagttcctacttgcaatatggtcaaatttattagtctttttatttatggggttttttgtttgttttttgttttgttttttgagacaaggtctcactgtcacccaggctggagtgcagctgtacaatgttggctcactgcagcctcaaccacctgggttcaaatgacccttctgcttgaacttaaaaaaaaaaagactgaagtggaacaaagtcaaaactgtatctttcatgtaactttttttgttataaaaatatgtctgtctcgcctctgggaatgagaaaattttgattatgcagatgatctctttctaatactttctggtctttctccagcaattgttaaaattttagccaaattaaaatactatccagcaaatcttcacagacagtttgaagtctggtttctttcaacaactggtggtcccctgactcggagttactatgtttaatagatgaatagttggatgggatgtccacctctgcagagaaaatccataagccctttgaaatcactgttggagtccttccatggagaacagcctgagagcctagctttggtctaggagtattcattttgttgacagacgtgctagacttattcttaggtaagaaaaacataaaaatggtgtttgtttatttatttattttgtagagatggggtctcgctgtgttgcccaggctgctcttgaactcttgaactcctgagctcaggtgatctgcctgcctcggcctcccaaagtgctgggattacaggagtgagccaccacgcttggtcaaacatggtgtttagacttaaagaaaaatacagcatcgatgagtgggtgtccctgtatgaattgagatacagtatagccacttctgattatgtgaatacttgaggcaataggttcaagactgtggactcaacaaggcaatgtccttgaattctcccagaggtacacttgccaggcagccccagctacactgcttcaaggcatctttagggaagaggatctggatggtttggtctttacgcttaaagtgtcttgagctaagaatagactcagtttgagtgtgctgctaccctgtgtgaactgagaaaataccctgggtaaactaaggctgagtagtctgaacatgtttgtttttgtgagaactaagacatagagggtagttcaaggatatgtccatcaacatatttaatgtttatataaatgttgttgatttataaatgttgaaaaatggtgtatcacaggtaatttgggacaagttgttgctgtcttaaggatgcatttacaactcagacccaagacagctgagtggattagactgttaatggatgaggaaacaagcagtgcttatagaaatctcagctgaggagctttcaggaatctaaaaggccaggtcaaagttcagcaaaacaaggtagtcagcccagcctgctttttatatcccaaccgacaaaaagacaagagagtgatcaagaggtagcagaaattgttgtagaatttataattccagatgaaagcaaaacattttaaaaattatacatatgagtaactttttttttttgagacagtcttgctctgtggcccaggctaaagtgcagtggcatgatcttggctcactgcaacctccaactcctgggctcaagccatcctcctacctcagcctctcgaatagctgggactacaggcgtgtgccaccatgcccagctaattttagttttttgcagagacagggtcccgctatgttgcccaggttggtctcgaactcctgggctcaagcaatccacccacctgggcctcccaaaatgctgggattacaggtgtgtgccactgcgcccagcccatatgagtaacttttaacatgagttaatatgtttttcgtttttaaagacaaagaattgaaagagcatgacctaaaagccatgtaatttgtgcaaatgtttcacaaactaattgagtttttgagaggtatttggatgtctcaagatctcaaaaagtgattggtgagaaggttccttccaagcagccaaataaaatccttatgaagacataaatcttccattgataaaaggtatgaaaccaaattattgtaaaacatctgtttgaaagaataaatactgataatcatgttttacatgcagacctaaatatataacttttattggtattgtgataaatcaataaagcgaagatattattatgagttaaattgttttaactaattatttatccagcatactcagcatactcttacagaagaaaaaaattaacttacctgctccaaaaaaaagtgaaagcatacagacagaaaaattatattacagtgtaataataagatgcttttacatggtcctgtccacacacatacctacatatatgataacacatacacagtttctccatgcctaactcttcagtggggaaaaaaaggtgtgaatttgaatcttgatacccaaagaccagtttctgaattgagcatagggagcgatgccactccttttccttttatgatagaaagagaaaaatcatatataggttctgtttttgtctttgatgcaaattttataattccaagtcttagaatttgtatattgtgtttaaattcaaaggtaataaaatatatggctgagtgcaggggctcacacctgtaatcccactgctttgggagacgaaggtggaggatcatttggggctgggagcttgatatgagcctgggcaacatagcaagaccccatttctacaaaaaaataaataaattagcctggtgttgtggtggacacttgtagtcctagctacttagggggctgaggtggaaggagtgcttcaacttaggagtttgaagttagtgagctataatggtaccactgcactccagcctggatgacagaatgagaccctgtctctaaaaaaaataataataataaagtaaaataaaataaaatatatgctataacaaatgtaggaaaattaacatttcttattgtggagattgttagcattaatgctaataagttaaaaagaaaatatattggtaaaattaagcttttctttcttcttctttttttgagatggagcctctttctgtcgcccaggctggagtgcgggggcataatctcggctcactgcaacctctgcctcccaggttcaggcgatcctcctgcctcagcctccagagtagctgggactacaggcgcgcaccaccatgcctggctaatttttgtatttttagtagagatggggtttcaccatattggccaggccggtctcaaactcctgaccttgtgatccgcccacctcggcctcccaaagtgctgggattacaggtgtgagcctccctgcccggctggtaaaattaagttttaaaaatgaactttaggctgggtgcagtggctcatgcctgtaatcccagcactttgggaagccgaggagggtggatcacgaggtcaggagttcgagactggtctggccaatatggagaaaccctgtctctaataaaaatataaaaattagctgggtgtggtggcacaagcctgtagtcccagctactcgggaggctgaggcaggagaattgcttgaacctgggaggcggaggttgcagtgagccaagatcgtgtcactgcactccagcctgggcgacagagcgagactctgtctcaaaaaaataaaaaaataaaagtgaacgttaatattttaaatgtgattttatggttcacatcatcagggaagatgtagacctacaaaacataaaattgggaatacaaacatggtttattgtattccttgaaaagattcagatatttttcctaaagtagctaaaatatttagtggctaattgaataatgtttaaatgtaaggaattacatgtacacatgggattacatttgaaatgcaattcacataccactctcttataaattggttctgaatcacagatgaaatgttaaaatataaacatacaaggcagctgggtgcggtggctcacgcctgtaatcccagtattttgggaggccgaggcaggcggatcacctgaggtcaggagttcgagaccagcctggccaacacggtggaagcccgtctctactaaagacacaaaaattagctgggcatggtggtgggcgcctgtagtcccagctgctcaggaggctcaggcaggagaatcgcttgaagctgggatgtggaggttgcagtgagccgagattgcaccattgcactccagcctggggaacaagagcgagactctgtctcaaaaaaaatatatagcattttgcttaattttactgggtagtttttaaactgtgattttttttctatgataattcttaattttaatataaattttatcatattttaatagtaaattgctttaaaagtttcttaatttggctttggggctgtaggtgaagtaaatacataaatttattcaaagacttaaaggaaataaattagagtgcaacactgaattgctttggtaaaagataaaaacaacactaggaggtacatatttgtatgcaaaaactatagttaagagaatatttagaccaaatttcataaaattctatataaatagtaggtcactgagctcaggagttcaagaccagcttaagtaacatggtgaaaccccatttctgcaaaaaatagaaaaattagttgggcgtggtggcataggccggttgtctcagctacacgggaggctgaggcagaaggattgcttgagcctgggaggtagaggttgcagtgagccgaaattgcgccaccgcactccagggtgggctacagagcaaaatcctgtctcacaaaaaaaataaaaaagacaatgtaggaagactggggtgaactataacattaaggacaccatatatatgcccttgtgaaatcccctcccacatggactttaggcctggctatgagatttgctttggacaatgacgcaataatactgaaatataggcagaggcttcgcatgtgcttgtacatggactttcccccttggaatgctgctgccatcaccacgtggaaaagccagatccggccctcctgaggcggagtaatcacagggagagagaggcccagctggcccactagctgaatgtagccaatgagggagcccaagcaagatcagcagaactatgcggccaaagcggagaaacgtgaggaataattgttactttaagtcaccaagttttggggtgattccataccaagacctatacaaaacctaattccaaggtatttaggctgaaagaaggaaaaatacatcataaccatcacacaatccacatattagagcttatatacttctgtatactgtacactgtatattgtatatttctttaattgaaaaatacacgggctgttttcaaagtccaaaatgagggccagatgctgtaatcgccacacgtgttcttcctgcccactgcacagataaaaccaattcactgagaccacagtattacagtacagagtttaatgattgcaaggcagccaagcaggactggagttatcactcaaaacagtccccctgaaggctcagaggttaggtttttcaaggatagtttggtgggcagggaacaagggaatggatgctgttgattggttggggatgcaatcataggggtgtggaaaacaatcctcgtgcactgtgtacccctcttgtgggggcgcaggactggctgagtcatgagtcacagtatgggtggggtcaatcatttgccaaaagtctgacaaacatctaagaagaacaatcttgggttctataatagtgatgttatctataggagcaactggggaagtaaaatcttgtgacctctaggcttgacagaaagagattggggaaactgatgcaaggcaggtgagccccaaagtggagtttagcccacgagagttcttggctttgtccaggaaagaattcaagggcaagccagaggtaggagaaaacagcttttttacattttttaaaattttattttaaggactttagaagaaaacagctttactgaagaggcggtgttacatgcagagcagggttacctctaggcagagagtaacagctcagggcagttttgcagtcatatttatacccatttttaactgcatgtagattaaggggcgatttatgcagaaatttctagggaaggggtagtcacttttggatcattgggtcattgccatggaaaggagcagtaacacccgggtgttgccatggcaacggtaaattgacatggcacactggtggacatrtctgattgaaagctgtttttgccctggccttgttttagctagacctcaatctggtcccatgtctgagtcccgcctctgagtcctgccttctaccttaaaactatgcctacattctagcagaattcaggcccctctcataatcctaatcttttggccttttattagtttgacaaaggcagtttcagttcccaaactcaggtttagggaaggactattatcattcttgctttaaaaaattccccccatggttagcttggcctaccctgaggagtgagcaaagacagctagcctagagcccgtgaggctagaagcaagatagagaccagtctgggcaacacagcaagactctgtccttaaaaaaaaaaaatttagctgggtayggtggggtgtgcctgtagtaccagctactcaggaggctggggcagggaggatcacctgagcccagtagttcaaacctgcagctatgatcataccactgcactccagcatgggtgacagagcaagactgtctcaaaaaataataataataaaagaaacaaagtccaacataaaatggcaaagtaatataaaatgaatagtatattatgacatgcttaaataagatttattttttaaaactaaggtttataaacctttaataatattgtgatttaaacatataatatggtaaaaaaagtatgttatatgacatactcaagttagttagaaaatatttttaaagatggacctggaatttgccagaaggtaaggatgctttcaaaacgtaagaggacccagaagctagtgaaaaggagttcccacatattaaattgtgaccatttattttttgcttcaaaaaggaaataaaaattattcttaaagcaagttaagattgtaaaaagccatgggtctttaagccatgatactcaaaagaaaataataatttattttctcttcaaatacctagtrttttattatagcaaattttattcagagaaggaaaaaatattgttgaagtttaagtgtaggtctcttttcaggatggtttaaacatataaagaataagagaatgttaatggcatgagaaagacagactcttcctgtaaaatataaataggctcatgagacttcctgcatccccctcagcacccgcccacttaccggacattcatccactaaattgttaccaaacattaaggaaggtgcggcaaggcattcctttcataggcatgagaggtcctcccacctgaccctggggctagaaactgaaaaagaattgaaaattctgaagccaagtrgattttagctttttatttttatgttctcctttttcctctaaagcagccagaaaagctgaatttttaccttttaaacagattttagtttgtggattaatcttttgtttaaatttaattactgaatagtgatttcaccagttgtttcgaggttggttacctttactaaaaatgctggatgaaggccaatgggtcacacactgagcctttctttaacttacaactacgatgtcagaagaatcgtcactctaatccaaaatattctcctcctcctattgtgcccatttgctctgacctttcccaaaggatgaaataagaaaacaattcatttacagtgctttttttaaaaaaaggtttttgccttcttccaagttatatataggccaagtgtggtggctcatgcytataatcctagcactttaggaggctgaggcaggaggatcccttgaggccaggagttcaagaccaaactgggcagcatagcaagaccctgtctctaaaaaaaaagaaaattcaaagttatacatgtacatgagttaaaggtttcaacatatcttcctatcctccaaggcaaccattttcaacttttgactgattctttggtatttaccttcacatgtctaaataacatgtttaggccaggcatggtggctcacacccataatcccagcactttgggtggctggggtgggtggatcacttaagctcaggagttcgagaacagcctgggcaacacagtgaaacactgtctttacaaaaacgacaccaaaaaattagccgggtatagtggagtgggcctgtagttccagctatgcagaaggctgtggtgggaggatcatttgagcatcggaggttgaggctgcagtaagccgtgattgtaccactgcactmcaggatgggcgacagagaccctgtcttaaacaaaacaaaacaaaacaaaacaaaacaaaacaaaacaactatgtttatatttcttcttcttgattttttagttaccattttgtcgatttcccaatacagaagatgaggatttagctttcttttgtacactcctttgcatctccaccaatcatgtacactttcagttctttaattctcctgaaacttataatttgctcatcctgcacaatcaagaggacgtaattgatgtagtagatcaatgtgatgcaggatgtccagaaggtccagatcttttcaggctattttatgatagagggcaggaatactgttaatatagccctggaaccaaaccgtaaatgtgtacttttttttaataaaaaagaaatagactttgggcagcctagacgggcagatcacaaggtcaggagatcgagaccatcctggctaacatggtgaaacctcatctctactaaaaatacaaaaaattagccaggtgtggtggcaggcacctgtagtcccagctacttgggaggctgaggcagaagaatggtgtgaacccgggaggcggagcttgcagtgagccgagattgcgccactgcactccagcctgggcgacagagtgagactccgtctcaaaaaaataaataaataaaaagaaatagggtctagctttgtcacccaggctggagtgcagtggtacaattgtagctgactgtagcctcaaattcctggactcaagcgatcctaccacttcagcctcctgagtagctgggagaygctcaccactacgtccagctaattaattttttttttaacgtaaagataggatctcactctgttgcccacactggtcttgaactcctggcttcaagcaattctcctgccttggcctcccaaaatgctgggattacaggcatgagcaaccacatccagccaatgtgcacttttgtctgtttcatggaatgccactgtttctgatcctttcttacgattggaatagaaaagaatgcattcactaaaatcagtggtgcataccaaatatctgaggatgtattaatcaactctagcaaatacaccacatctgtcatgacagctgcgatcaggcctactaatgggttgtacttgcagtaatctactgtcatccttcagagtccatctatttttgccgggccatatggtgaattaaacagagatatgatgggaatcagcacctctgtttcctttaaaatcttaagagtgacacgaattcctgccatcttctcttgagatataatattgtttgatttcctgtatgtgtttcctatgtgtccccccaaaattcatatgttgaagccctaacccgcagtatgatagtatttggaggtagggtctctgggagataactaggtttagattatatcttagtccatttgggctgctataacagaataccatagactgtgtggcttataaacaacagaaatttatttctaatagttctagaggctaggaagtctaagattgaggcactgacagattctgtatgtggtgaagtcttcctggttcaaagataggtgtcttcttgttgcatctcagcctggggaaagtgtgagggcactctctggggtctctttaactgatatcattccttaatcatctcccaaacacctcacctccaaataccatcatgccgggcattaggtttcaacatgaattttagggaacacagaaggtcatgagggtaaagcccccaccatgggattagtatccttatagtaagaggaagaattcagaattcagaattccctctctacacactcacactgagaaagggccatgtgaggacacagcaaaaaggtggttgtctgcaggctagaaagagctctcaccagaaactgaatctgctgggactttgatcttggactctccagcctccaatactatgagaagtaaatgtctgttgtctaaatttcccagtatatagtattttgttatagcagactgagctgactaagagactgtgccatgtttctctggagctgggaagcagtttcaaaggctttcacttggccttccccaccattatagcttttaccccataggcaaaagtcctaatgcatttgcatcaattgccaaaaatgacaactccattatacatttgaagagtggggaaatgayaattagttgtggtcacagatccagtagtaaactcactctgagccggaccttgccatgactccatttattaactggcttctttatgcccccattataacagaaggccacgatgatgcttgtggtctgtggataacaagttaaattcataccctctgtctcacaatccttggcatgtttgggtatgtccatttccccagggtacaattacccaagtaaatgactaaagatccctttggggaaggactgaggaaaccattaccatttatacttgttgaggtatagcaaagtccttcctcctggcctcttcagtcaatgggttccaggtctaaaaatgctctggtctggaaactaaggaattgactattgggtgactatccttagcatcctggtcatctatccttaacttttttttccccactggtacaaaataatagagcttagttggttgtctatctattttgcccctaaagacgccaccatctagtaaccatttctataactytctgagggtcaagtccccttggtaggtcattataattgcgacctcctggcttctagtaattaagcactgccagttggccagtattgttttggggtctatcatctccattgctatcagtgagtcaaagtctgggaggcctctgctaccatcagtcctggcttgcagagagccaccactgaggtttttagtgatgtttatgtcctttgcaccagtgcattccctaatggccttggtaaatggtgtgtcctctgggccttccctcagaacataatgatcataaccttccaggcgtacgtaatatatccactccagcagacccatttctgtcaaccttttaatccctttttgagccacctgcctgccctagcactcctagcatttcgttttcttttcccatgcttttaggagccattgtagtagttagtgaatgttcacgtcaattcttgggggtccttggcagaatattaaatcctgtatttgggagaatactccaaattcaatataactttcccattcaattttatgttctagctccccttgcttaagcatcatctgaatccagccccatgtactcttctgaagctcctgttggtacgtgcttgtctaggtcttacatcttctttggggaacagtcmtttacctctacccatcaggtacagcaccttcccaactaggttwtgctatgatttaaccctaattatagatctactggctagaaggctagatgacaggtgtgagtgctggcggaagggagaacatgcctttcaagtagaagcctctgcaatgtcttctagtacaggaaagtgatagctctgagtagggaggaggggccacactgcaggcttcagaggagcctggggaatcaaaattttcatgatcactacccagatggaccctccatgtgtcagggtgctagattttctcaaccatgaccctgactttgacacaacagacctattttaggcatttaaccatcttttaagtttgaccactctaaagtagtcttgatgctcagctttctccacccttcccctgcagatgagagctgttttttatgcaacgaacaggtgctctggctttcacaccagaccttcaattgcttattacctacccttagctgttttttatttttctgtaaccaatggagtttagcaatagccatccaattctattattcttatagctacaacttccaccatatatgttaactgccagatatatcacacctgcaagtgcattctcttccacctggtacatcatcctgattggaccattaccttgtgccaggagctgactatgcttcacctaccacctgctaggtagtctataattcagctcccaaacctcatctggttgtctactttctccaaccaatcctcgtactaattcttgcaggcagccttcttgaggagcaggtgcagagagagacaaagctggagcataagatgtgaaaggaagggagaggaagtaggactggkaagagaatgaagtcaaattccagtacaggtccaataaagctttggccagcctcgctaagagctctggagtgaatactgcccatcagaggtgtccagtggtggccataatggctgagcctttatagtccagccttgcttaatcacccagtttaggctgcagagagcatgactgtgggcaaggccattgtctgcgattgaagcagagtctgatggaactgacaactggaggtagtctttgcagcttgggagcaagtccctccttgaagggggatctgggcagctcatctccatatctaccacaagggcaaacagatacccagcatattctcttttcaaggaaccaaaagctgtacagtacttttccatttttcatcttttggggatatcttcaccagctggggatttttttttaacctggtaagggaggcatagcagagaatgctatttgtcctctaatatccattctatccttcttccttaatattataacccctgatttttagttgggtatatrgccacccagaataatgttgtcaaatgactaagttctggccaatgggctataagtaggaatggtgtgtacagcttccaggaagtatccttaaagagaggggaccatggtcatctctgtccttttttctttcctgcataggactgtagacatgatggctggaatttaaacagctataaaggaccgaaaggtagaagccacatgttgagaatggaagaaattaattaggtccctgatggtcacagaaccaccatactaatctagactgcctacttctgcattatgtatacatgataaagacatgaatattaattttagctaaggacacttaaaaatattctgttacttataaacaaacctattcctatcggatgcagagtttggttcctataaatttgtgctacacataaccttaaaagaaatgtggtttttagtggaagcatttgggcagtgggtggtaaagactcagatactgcaagatggaaaactggtgacctttgttctccagttgccagacatttggtaaacctgttgccagctttagaagacagatcacaygccaatcaaaattgtggcacgaagggaaatggctggaaatatctataaacttggtatttgctggctttttcttgacactttaaaccaagttctatgagatatgaattcaggccagaagtaaccaatttgcatgtagaaatggaaaagaatacagttttgctaaaggagaaattctgctgtaatccaagtggattaaaagtctcataatttgggcgggacgtggtggttcatgcctgtaatctcagcactttgggaggccgaggcggatcacgaggtcaggagttcgagactagcctggccaacactgtgaaaccccgtctctattaaaaatacaaaaattagctgggcgtcgtggcaggcaccagtaatcccagctacttgggaggctgaggcaggagaattgcttgaacccaggaggtggaggttgcagtgagccaagatcatgccattgcactccagcctgggggacagagcaagactccatctcaaaaaaataaaaataaaagtttcataatttgaagatttaaagggcggaaaaaaaccacacttcttctatacctttagactgaagtacagttggccctccacattcatgggttccatatacatggattcaaccaaccacagatcaaaaaatcttatgaaaaaggtacacaaagttccaaaaagcaaaacttgaatttgccacgtgccaagtgttaaatactatgttaaatccatgtgaatgatgtgtaggcattgtattaggtaattaagtaatctagagatgatttaaagtataggtgggatgtgcataagttgtatgcaaatactatgccattttatatatgggacttgagcatcctcggattttgatatccataacggtcctggaaccaatcccccatggataccaagggatgactgtacacagaaacagtgcctgtgaaactttggaaggaaatatgcctggcatttacccacacaagactgacaaatataggattgagaatgctgtgaacctattaaatcccattgtttccaaagggattagctgtcattaagagtggggtaactggggagcacacagaaactrggaaaaaagtttcggggcttaaaaactcatctaggcaagaactgtggctagaatttctcccacaaacaactgactgaaagcaaaagaatgagaagcatattaaatttttacattaatcatattgccagagacacaccaaacttctgctattgctgttgacaagcacagttgtggaggtgtttgatttttctgaagcagcattagcagaaacctcagtgtctagccacttgtcctgtgggccttgacagacgggacgtaggatatgcatggcactggtgcagatcatagtgggtatagtgtggttctagggtcagcggtgcacgcagctttctgatggtggtttcctaggcatggcagcagcagtgtgattcagagacgtcatttcctgatcatagaagagtcattgcttccttggtggcctggttctgggaagactttgggactcattcctgaaaaactaatctagagcctatttaatcaaccctcccaagtattcaatayctttgtgtttatactagctaaaatggattctattttccgcaaatgaatcttaactgataccacacattgtgtacaggaagaatagtggctgcagacaataggatctcaggaatatgggaaagtagaattgcttatctgttctcgtagagtttgaaagtagcaataattatgctagtactagaaaatgagacactgccactctgtggtgcacaatggctaagactgacctatatacattttctaatcttgtccttgtgtatttcgtgatctgctggttcaacatctgtttgtacgttaaacacctcaatcttaatattctaagaacgatgatccttcccattgagcctactaagacccccattttagcaaggaccaacactgagttgctcaggttaaaaaaaaaatcgttactctttgtttttttttcttttttcgggtgggagggtggagggcagggcctcacactgttgcccagrctggagtgcagtggtgcatctcggctcactgcagccaggggatcctcctccctcatcctcccgagtggctgggactacaggcacgtgccaccacgcacggccaatttttggagttttttgtagcgatgggtcttgccatgttgcccaggctgatcttgaactcctgggttcaagcggtccaccggccctggctacccgacctgttttttcttacattatcatacagccaatccatcagtagagctcgttggctgtgctcaaaatatatcttgaaccctaccagttttcaacatcccaccatcttattccagactaccataatttattccttggcttattgaaccagcatcttggctgacctttccgctggtacttttctttttttgagacagagttttgctctggttgcccaggctggagtgcagtgrsgcgatctcggctcaccgcaacctccgcctcctgggttcaagcgattctcctgcctcagcctcyggagtagctgggattacaggcctgcgccaccacgcccggctaattttgtatttttagtagggacggggtttctccatgttggtcaggctggtctcgaattcccgacctcaagagatcagcccgccttggcctcccaacgtgctgggattacaagcgtgagccaccacgcccgaccctgcttgtactcttgaaggtcaacgtgtaatcccgccactccccagctcagaatcatctaacgactcccatctccttactcggcttacccagggtcctgcctttctcactcatctcatctcctcccatcttatttcccaaattgactgcgctctaagcgccctggcctccttgcttcttttcaaaacaccaascacattaagcttcaggacgtttgtaacttgctgttctctctgcccgcaccattcttccctcagattcctccaagctttttcattcagctctgctcaaatgtcaactcaaagaggtctttccaggctatcgtatctatcacttatcttagcgtcacttgtatctccctctccagaatgtaatgctcctttatgacagggaatgcctttacatccctcgcgccttgaaaaatgcctggcacatagtaggcaccttaaaaatacttgattaaatggatttgggctgaacgtatcctgcttaactgcagcacttgagctgaggtcacctcaccaaagcaggcacacaaacacaaaaggaagcacacaaccagatgaggcctgcctgccgctcctgaaccctttgggagggctcgcgcgggaaccctgggaagctcccgcggccggagctgggcctgaaactgttctttcgtttcctcctgcggccgagaaagggaagaggtaaacaggcgaaaatgaggcgagcaggggctgaggaccgggcctcagctctacagcattcgcctgagmatgtattgttatccgtggcagcgccttgtctcattggatggccctaggcctagtgtggccgcgactccgaactgaaagcccaagcgcggcggcgtccagccgggcagccattttccgaagctgctctcttggtaaccccgcccgggcgcgtacgcacgaacggaggcggggcttaccgcgagggcctcgctccggaagccgcacyctccgcggcgtcccaccgtcgaggattaacaaaacgccaaacaagattttaacagtcggcagcgaaagcgcgcactcgagcgccaatgagagcggaaggaggggcaccgcgcctgaggaacactccgtatgtcgaacaatgattggctggagcccacctttcttcttttttgctattagatgggcttgctgctcccgcccatctaattggctttggtctaggtacttctgattggcttcccccgggcggtgggaggcgcggttttggggattgttcatcatggattggtgaatttgggctccttctcgaggtggtggcccatcccgtctgctctctgtcccgtctcccgacccgtacgcttttccctcaactcgcgcgcacgaatggttaaaaaaagggtgtgaggctcragcccgccagccaggccgctagcacctcgcgcgcgccctcagcgaggacccgcacgagctgcccggctctgtgcctgcgttgtttgaaactgtggaacccgttaggcttttggggaactacagtcccagctggctccggagcccgtgcgtgccaggggcgagtggccgtcgcgagacggctcctgcctttcgtgtctctgcagcgtggagactggaaccggcaatttcaaaggacgccacgttcaatcgcagcgctggcgcgggcggaggctaaaacacgggggtcctgagactgaggaaaacgcgccaagttcccctcggtggcggagtgctaaagaccctagcggttcaggcgttcggcgagcggggccgctgcttgttgcgctcytggctctcccggggcgggcgcagatgggcgccgctcccgggatgtagttggtgttggtgcaagrcgggagcgagcggcggtcggggttcccgctcttgggagcggatggtcactcccccgcggggagggcgagccgaccagattttcctggggccggggacccggcgggctcggggcagggactcacctgtcgcacccacactcattcgggttggacttgccggcgtcaccgccgcggacttcgctttgggccatgaccaggtaaggagggcctgggaggaggggccggctcccgggcgcgggggcaagttcggccggcgcgggagaggagctgccggggagaccccgggaccgtgttggcctcgcaccctggtcgacctgccagggggagccgtgtgtgcctcgggcgtggcgcctgtcttgccgccgccgggacgcgagaaggcaggtgcgggctgggcgtaaataggccaactccgcggcgagggcgcccggcgcgggggtgtgggccgaggacgccgccgccagcctcccccgaccgggcagccyggtsgctgctcgtccttccagctttctttccgttcccgagagcggtgaaggatggggagaaagaaacgtttccacgcaggttgccctgtgtcggtaattgcgaaattttaccgcgcattttctttcacttacactttttcaagaagtgtttagaacgccgcgtgtcttaaaccttggcgaagatgtctttgtagatttttgttgaaaaatcggaatcgagtcgtgtcatcttataaagaatttaaaactattgggactgagtgttcacgctgtcaacagataatggtcgattcgtcgtgctttctgcgaaagttgatttagttacaggagaaatattttggatgtaacagccccccagttacaaggaaagccaggagcaagaaatagcaaggaagatactgcacctggcaaaatgttacattctcggtgtgagctttgctttgaggggctaggaggtttggttttttgattaagctgacgatccgctatttcacctgcctaatcattcttcccttctgtgtagtctggttactctgtcggtttgagatccagtttctgtcatccattaaattggctctcgagaaaaaccttttatcagaatcattaatgcttggcgatccctgagaacttagcgcaggttggtttatcattcagaagacagcgcttcctcagaagcattaggtagacaggagagtaagtgaagttggagacagaatggagagatggatcagctttccagtgcttcctgatttgggtctcagaaatggtttcagtgtgctgagttcagtatgaattcctagatcagtgtcagccatgtgaaatgcttattaaggatgaaatttgagtgagtcttgtgtagttcattttattactctgcattttaaatttgaaactcgttgctgaagttttgggctttaagtaattttatggtaatactctagtcagataatttttcctcccatgtcctgaaaaataggcctgatgtagaaaatattaactcctacactcctacaaatgttgccattttttttcacgtgcaagttttactttaaaacagggtgggaaagttgcaaatggcaaaccaaatcatctttttttcctactcaaagcactatttttaaaatccaaagttttttaaaaagtttggaaaacgagtattrtggtttctagtgcattaagaattggatttacacaaagtgcatcgaacagttttttttatcacggtctcaactttgcttgtgttttatctttcacttacggttttaggtataacttaacaccatctctatgccttgaatgcaaattattctttaataagctttttaggtactttattttcatatatccatgttaataactagaaaaggcattggaagagaggactcatcgtccagcactactttgattttccattcatcctttcctaccttgtacttgagaattagaggtggtagtgctcaktcaatattttctgaatgaatcattataatgaaatattaagttgttttttttttgagactaagtcttgctctatggcccaggctggagtgcaatggcacgatctcggctcactgcarcctccgcctcccggattcaagggattctcctgtctcagcctcctgagtagctgggattacaggcgcccgccagcacgcccggctaatttttgtatttttagtagagatggggtttcaccatgttggtcaggctggtctcgaactcctgacctcgtgatccactcgcttcggcctcccaaagtgctgggattacaggcgtgagctatcgcttccggcccttgaaataataagtttttactacttatactattttactgtaggtctactaaataggatattttgtaatgcgacccttaatccatagcaggctgattttaaaaattcagtagcttctgttttttgttctttaagaacagtgtggtatgcttcttcatttaagcaataaatattgagtgcttattggcaggcattaggttttcaaatgttaatttctaatttgtaccattcccttggtaaatttgttttcaaaattgatgattttgttgccaraactgataaccaaaaactaatgaaactttctctgtgattaacagatataattggtgattacaactttcctctataaattaactcttgacactccttgggatttgaagaaaaaaatgcctggtgtcatacctagtgaaagtaatggactttcaagaggtagcccttcaaagaaaaacagactttccttaaagttttttcagaaaaaggaaactaagagagctttggatttcacagattctcaagaaaatgaagaaaaagcttctgaatatagagcatctgaaatgtatgtatcttacatttctgtactttaaaaattctacagtaaagcagcagtgaacttggttgacaactccagtctgacttgatagtctgtagcggcacaaaaaagtacgcttcagtgtacttcttagtcaaatctagcagtttatagtaggaacagcaaaactggtggttccccgtaggaatcacatcgataatgtttaactcatgttaacactgtgctcagccatttagactaacttggagaaatatttgttgactaaaattgtctttctgagtttaaatttgattatttgtagtgcaaaacatctgtgtaggggtaaaaggttttatatatatatatatatatatttgtttggttcagaagacttgacagttataagacattttaaactctagtcatgtaactagtcatacctgttggaggcatatgattgcaaattataaaaataaactttaagtaatgcttttgatgcaaataaattatttagctacagaaaataaatcagaacaaagtggaatactttattccaccaccagcagctctagctggagtctgtactactccctgtttaacatataggcactctgctgggtgactaaggtggatttggtcccatgtgttaatttcctaatagctatcaataaccagttgaggagatttgtgagagtgaagcttttgtttatcagcattcatacttctgaatactttgaggtgctagagtaataatagctagcaatcgtaaaataaatgaaaatattggaaggacctagtggtttttttkttgttgttgttaaaraagtaaaagaatagtaaacttaaagcatttgtkttttgagatggggtctccttgtgttgcccaggctggtcttgaattcctgggctcgagcagtcctcccaagtagctggaattacatgtcaatgcccccacacccacattctgaacattttatttttaagtgagggatagctacatattttttttttttttaccagcaggaagtcatatataattctcttcayagactttctttcctctgaattcttattaatagaatcttacttagtgcagcctctcccaaatattgtcatggttagtttattcccaggtttctgttcagttaaactatttgattaaaatgtcaaagtagatgaaacaaatcatagtctctcagttcctcaattttctactctgtaaaataggattaacatccttttaagggaattgttctgtggcttgttatgtgtaataatgtttttaaatgcttttaaaacttttattctgggcatatagcaatttttgagcctgtatttcttaaaatgtcatctgaacaagattcacatacttttcagatyatacaacttttgggaaaagactaaatctacagaagtaatattttcaccttgtttctttaagataactacttatcgttctcccttctatatttcatagtgatcaagttgttcctgcagcacagtcttcacctataaactgtgagaagagagaaaacttgttaccatttgtgggactgaataatctcggcaatacttgctatcttaatagtatacttcaggtaaattgacaattttgctatatcataaagctttagtaggcaaagattgatgtagcatttaatgtttttgagttattggaggactttaatgtccatactgtctttgcctttgattgttaataaaccagaataggctaaaataataagttacatgttattaaacttcctttggggtaagagaaaatgatagactaaataaaggtgggatagcaaaattgagtagaccttaagtggaaggtcaaacctttaatttctttctctgattcctggtgctacagtgtgatatatgtcttatcccttggaagtaacgttggcrttgtgttgtgtgtccgttggcgctgtgttgtgtgtccttgtaaccttaaagtcttagcaatatctgcccaggtgcagtgctttgtgctaatgagggaagacactgggctactactgatgaagtggagaacaaattttgacacaaaacttaatctcagaattttagggtaatacatgttaaaagtgctctatagaaagcatgatgttgttttaatgattttacgtgtattgtttgttcagtaaacacttaagacaatctcactttttataggtattatatttttgtccsggttttaaatctggagtaaagcacttatttaatattatttcaaggaagaaagaagctctaaaggatgaagccaatcaaaaagacaaggtaagaaaaataaagaacagaaaataatgtaaaaagcaaaagtaaattaatggaaatttacttgcctggaaatgaagaggactgggggggtggatgacaaagattatttctctgttagcgagctattgtcaggcaattatttttcattctttcaaggtggctaactagataattcccttttacaatgtttgctcctgtaatctgtgtatcaaacttttgttacttgtatactatatattactgtatactataatcacaatatgtyatacccatgtacaacttatttacccattgtgttttcaaattgagttaaaatttaaawacagtgtatttaaagaaatctttaacttccataattaaaaaaccattgtaattcacataaatagtaattcataattcctcttaaaattacaaaaaagaccagacgtggtggctcatgcctgtaatcccagcagtttgggaggtcaaggtgggtggtggattgcttgagcgcaagagtttgagaccagcctgggtaacatggcaagaccctgtctttactaaaaatacaaaaactagtagggcgtcrtggtgtgagcctgtagttccagctaattgggaggctgaggtggaggattgcttgagcccaggaggttgaggctccagtgagccgcgatcaagccactgcactccagcctgggcgacagagaccctgtctcaaaataaaaaaataaaaaataaggcttatttgtacatcccttaaaattagtgctattatgcaacttagaaaatctagtattcttaagtgagacaaagacaaagggggaaggtacttaatttgttcataaaattattggtttgtgtgtttctttcttgacagggaaattgcaaagaagattctttggcaagttatgaattgatatgcagtttacagtccttaatcatttcggttgaacagctccaggctagttttctcttaaatccagagaaatatactgatgaacttgccactcagccaaggcgactgcttaacacactgaggtatagcctataatataattttagggtttcaatttagctacttgtttatatccttggaggagaatgacatgcgaagaaacaggaataaagggcaaggaaagtagaaactctaggtccacagtcctttatatcccagagactctgaatactggaaatttttttcataaatttggtgctaaattcgttagatctgaacatattatatgaggctttttatagtcattcatatttatctctaacgtgaatattcatacatgcttctatagaagtagtaatgtgtttagttatagagtactcccatatcaagtcggtgataaatattttacttatatgccatataatcattgaatctgaaaatgtctgaatttctaaatgcgtggtcctaaggatttcacattaagaattataggactatattcaaaatatgtgtaagaactgtaaattccaaatattctatttttatatgtgattagaggagaactgttggctaactggattagattgctttttggtattttcttaaaaatgaaactttacatataaaatagccttattcaaatacaattatagggcaagtctttaaaacaatcacttaagcatttagtttaaaaatagaactaggtgcaatatattgctataccttagttaagaggtattgtaggccggtcacagctcacacttgtaatcccagcactttgggaggtgaaggtaggtgggkcatttgaggtcaggagttcaagaccagtgtggccaacatggtgaaaccctgcccctactaaaaatacaaaaattagctgggtgtggtggtttgcacctgtagtcccacctactcgggagactgaggcaggagaatcgcttgaacccgggaggcggcggttgcagtgagccaagattgcgccattgcagtccagtctgggcaacagatcaagacccttgtctccaaaaaaaaaaaaaaaaaaaaggccattgtagcgtggtggccargagcgggtttgaatactggcttttmatcctaagtagttctgtgaccttgggcaagttatttaacctgtctgtgccttagtgcttgtatctgtcagtaatggtgataatagtacctcatagggttattgtgaagataatgtatacataggagataaaaaacattttgactaaaacctggtgtatggtaagcattatctaagtattagttattaatatatttagaagaggatcaaagtattataatgaaaatagggtacaatttactcttacttttagttacagataagaaattccaaattagtgctgaataaatgtcttgacatttaaaaaatgaaataatttatgattttccttacatgaattaatttctatataggctttatgtactgtatcttcaaaactagaatagatgaaatggaaatttttatttatagggaactcaaccctatgtatgaaggatatctacagcatgatgcacaggaagtattacaatgtattttgggaaacattcaagaaacatgccaactcctaaaaaaagaagaagtaaaaaatgtggcagaattacctactaaggtagaagaaatacctcatccgaaagaggaaatgaatggtattaacagcatagagatggacagtatgaggcattctgaagactttaaagagaaactcccaaaaggaaatgggaaaagaaaaagtgacactgaatttggtaacatgaagaaaaaagttaaattatccaaggaacaccagtcattggaagagaaccagagacaaactagatcaaaaagaaaagctacaagtgatacattagagagtcctcctaaaataattcccaagtatatttctgaaaatgagagtccaagaccctcacaaaagaaatcaagagttaaaataaattggttaaagtctgcaactaagcaacccagcattctttctaaattttgtagtctgggaaaaataacaacaaaccaaggagtcaaaggacaatctaaagaaaatgaatgtgatcctgaagaggacttggggaagtgtgaaagtgataacacaactaatggttgtggacttgaatctccaggaaatactgttacacctgtaaatgttaatgaagttaaacccataaacaaaggttagtataattcttagactttgataggtagaagcattagcagctacagaattagaattttctcttcctagatacatgtacaatataatctctggctaaaattgtttcaagagaaggaaatttaacactgaatgtgaactatggtgttttaagtgctatgcttagattagtgtgtgtgtatatattgtatgcatatatatgtgtgtrtgtgtgtgtgtaatgtcattaaagtaattttaayttatagcttataaagtagggaagttcggccaggtatgttagctcgcacctgcaatcccagtactttgggaggcctaggcgggcagatcacctgcggtcaggagttcaagagcagcctggtcaacatggtgaaaccccgtctctactaaaaatgcaaaaattagccaggcatggtggcgcamgcctgtagtcccagctacttgagaggctgaggcaggagaatcgcctgaacccgggaggtggaggktgcagtgagccaatattatgccactgcactccagcctggggcgacagagcaagactccgtctcaaaaaaaaacaaataataataaagtagggaagttcagtatattttaatgtacatttaagagtacatttccctttatgcagtgtttgacataaactgatgaaggacattgcatttagtgaaattttaaaagtaaagactaagtacagtcatgtgttgcttaacaacagggatatgttctgagaaatgtgctgtttcattgtgtgaatttcacggtgtacttacacaactagatgctagagcgtactacacaactagcctatatggtatagaccagggtatctaatcttttggcttccttgggccacactggaagaagtgtcttgggccacaccacacagaatacactaatgatagctgatgagccaaaaaaaaaaaaatcaaaaaagtctcataatgttttaagaaagtttatgaatttgttacgggctacaggcaagctttgcatggcctattgctcctaggcaacaaasctgtatagcatataactactgaatactgtaggcaactgtagcacaatggtatttgtgtatctaagacgtatctaagcatagatatgtaaacataggtacagtaaaaataatcatagactactgtcayatgcggtccattgttaaataattgaaacgttggtaggtggtgcataactgtaagttacacgatacttgaactagatttttacctagttttgtccagatctacagatatcagggaaaatgtgtaatattgatatagtgaatagttttaccaaaaatgtcatccttattctgggtttattctatggggaggtgtctgtaggaagggagttacaatacaactgacttttttttattttttattttttttatttttttggagacagagttttgctcttgttgcccaggctagagtgcaatggcatgatcttggctcactgcaacctccacctcccgggttcaagcgatcctcctgcctcagcctcccgagtagctgtgattacaggcatgcaccaccacacccggctaattttgtatttttactggagacagggtttctccatgttggtcaggctggtcttgaactccgacctcaggtgatctgcccgcctcagcctcccaaagtcttgggattacaggcttaagccactgtgcccggcctacaactgacttcttttaaagacagtaatttcatagtcagttttatctttacagggaccttaaatttcattaatagggtacctctaataagctaataatgctaataagctgatctatgaaaatggaactgttattyatgatatactttatttaaatggaaaattggttatttggactataatgagaaactaatctgtatagacttacattttcctattttcattttaggtgaagaacaaattggttttgagctagtggagaaattatttcaaggtcagctggtattaaggacgcgttgcttggaatgtgaaagtttaacagaaagaagagaagattttcaagacatcagtgtgccagtacaagaagatgagctttccaaagtagaggagagttctgaaagtaagcaaaattggagtcttgtgtggaccatgatggaatatttataattctttaacaacacaaagtttaatagtagctggtgtaattagggaggggaaaaaagctagcttttagtgtctaatgtaacctttctgcttatctggcttcacttataaatggttagcatttgggaaattgtgacatcttgattttgatgtagagtgtgttagaatggaaaactgaaatgctttaataagtgtacttttgggaacctgagtctttcagagctactgagggttttttttaatttttttgagatggagtcttgctcggttgcccaggctggagtgcagtggcgtgatctcggctcactgcaagctccgccttctgggttcatgccattctcytgcctcagcctcctgagtagctgggactgcaggtgcccaccaccacgcccggctaattttttgtatttttagtagagacggggtttcaccatgttagccaggatggtctcaatctcctgacctcrtgatccgcccgccttggcctcccaaagtgctgggattacaggcgtgagccaccgcgcctggcctactgaggttgtttttaacacaataattgagccactgttgtgtctagagcataccacaaaatatggaaataccataggaaataatcatgagacaggtttacctatcacatattgaaagttggcaattaaatgtaaacagactaggcttattttgtttttgctgtctatcatattttttggccgatcaaatatatttaaaaggtatgtatactgttgaggatgcacttatgaaagtagtttctgaaagtaaaaatctctttagttatttaggaatgggtcggtcaattgaaattaaatgctaattttgaacctgaaactttgtggtttattttttgaatgcctgagagaagtatttgagtgaaaggattctcttttttagtttctccagagccaaaaacagaaatgaagaccctgagatgggcaatttcacaatttgcttcagtagaaaggattgtaggagaagataaatatttctgtgaaaactgccatcattatactgaagctgaacgaagtcttttgtttgacaaaatgcctgaagttataactattcatttgaagtgctttgctgctagtggtttggagtaagtattgtaaataagaactatatgaagaaaatgagctgctgtagaagataagtcttgttcaaaatgctgtaatagtaggaatataaagtactgaaatgaagtagattgtaaagattgcttcagtaaagttttgttcttattaacagtttccctgtaaaaatgaaacaacttaaatccttttgatatgaatacatattctattaagtatgatttcttctccttttttttttgaaacagggtctcattccagttgtccaggctggagtgtagtggcacagcctcagctcactgcagtcttgacctcccaggctcaggtggttctcccacctcagccttctgagtagctgggactacaggtgcatgccaccatgcccagctaattttttgtatttttagtagagacaggatttcaccatgttgcccagtctgatcttgaacttctggactcaagcaatccacctgccttagcctcacaaagtgctgggattacaggcgtgagccaccatgcccggccagtttctttattcatcttttcatattcattccctcttagatgttagtagcagaattcagtagaactgactaaagcagggaacaaattttgtatacatcaagatttttttgaaggggcgggaaargctaaattcttcctagttttaaggtaagccaggaaatcaaactagtctttcaacagtttgaaaaaaaatgctgattgttttggatagtctgtttttttctgacatgtgtaatgtcattgtatgtgtgactcctttgtacattagttgcttgtttgaaattaccacgagggcttcacagtagctctctcacacttgattatgtcaaaagataacatatagccccttattcagtggaccttccctttgctaatagtataaaatactattttatttactttcccaaattttggtagagaaaaacttcacactaaaaatgactaaaatgggctgggcgtgggtggctcacacctgtaatcctagcactttgggaggctgagatggatggcttgcacccaggagttcaagaccagcctgggcaacatgacaaaaccctatctctacaaaaaatacacaaactagtttggcgtggtggygggcacttgtggtcccaactactcaggaggctgaggaggaggagcctgaggtgggaggatcacttgagtccagaaggagccatgattgcaccactgcagtcagcctgggtgacagaccctgccttaaaaaaaaaaaaacccaaaacgtaacatttttggttccggttcagtctatttaaaataccatttattttcttaactgcacaaaattaggaaaataaaggaaaaaatacaattatttcttccacagaaatgcctgaatattagcagttatttatttttttgtttctgcatatattataaatattattcaaagttgggktcttgttttgattctgcttttctgatatatgaacactggatattaagggttcattcagatttttacttggtttcagattggggtataacattttgaatttaaaatagaactgcaggaaaccttttctttttttcctcccaaaggtttgattgttatggtggtggactttccaagatcaacactcctttattgacacctcttaaattgtcactagaagaatggagcacaaagccaactaacgacagctatggattatttgcggttgtgatgcatagtggcattacaattagtagtgggcattacactgcttctgttaaagtcactgaccttaacagtttagaactagataaaggaaattttgtggttgaccaaatgtgtgaaataggtaagccagaaccattgaatgaggaggaagcaaggggtgtggttgagaattataatgatgaagaagtgtcaattagagttggtggaaatacacagccaagtaaagttttgaacaaaaaaaatgtagaagctattggacttcttggaggacaaaagagcaaagcagattatgagctatacaacaaagcctctaatcctgataaggttgctagtacagcgtttgctgaaaatagaaattctgagactagtgatactactgggacccatgaatctgatagaaacaaggaatccagtgaccaaacaggcattaatattagtggatttgagaacaaaatttcatacgtagtgcaaagcttaaaggagtatgaggggaagtggttgctttttgatgattctgaagtcaaagttactgaagagaaggactttctgaattctctttccccttctacatctcctacttctactccttacttgctattttataagaaattatagagtgagtgtattttccttgtgtatatattaaacacacccatacaaacattgktaaagttgattacatcaaagaatctttagcttatcttttgaagctmctggatattattggtctctctaggtttttayataaatagtgaaatytgaattactgaaaaccatgttaatttttagaactcattttcctcagtagagactagtgatgcattagcttctgggaacaaacttgtatcggttcttaattaaattatccaaaacggaggcatttaaacacttggatttacaccagtcttttgtgtttgctttttaaaataaagtgctcgtatttgtattctccatattttggagtaattatctacatgatgtttatagttcctgtggtttttcacccaagaagcagaatctcattcagtacatttagttttataagagtcatgaagctaaatccttgggctatgtcagaggcacaaagtctagaatgtgtgtattcacaatggtgtatgtacattttgtgccttgattcacttagaagtgtctcagaaaacctggacagttcgcttctacacaagaattttatatgtatttatgaagatgattctgtaccctagtatatctttttgggcatggactaatttgtatctgtttaactcatattctgcacgatctgtatatagtacatcaaacttagaggtgtgaccttaaatttaactttttttaaaaactgggaggtcaataaaatttaaactgcttaactatgtatatgaatatttgaattttttacttgtatatttttataaatacagctgagttttcttaaagcgaataagtgtgtgtatatatatatgtatatatatgagagaataagcatgcataattacctttattactgaatactttctgacagtgcaggagtttttcaaagaggagaaattgtgcttagtccagccaagctgtcatacttaaaagaggtttataatgaaatctgttgcatctaattgtcctttaaagtagacatgatttaatggaatccaaaactggaaaagttaagatgatgctttgggcacacataaaaacttggttaaaatttcattttaaactagtatactgaagtggtaagtgatgaatgatttcatgacttgttaakggacattcttggtactaagtttttcctagaaatgattctaaatatgtaaatgctattgggrtaacactwtaataccccatttcaacaaggagtaccttctcaattaaaaaaaaatcgcagtaggctgggcgcggtggctcacgcctgtaatcccagcacattgggaggctgaggctggtggatcacgaggtcaggagatcgagatcatcctggctaacacatgaaatcccgtctctactaaaaatacaaaaaattagccgggcgtggtggcaggcatctgtagtcccagctactcaggaggcggaggcaggagaatggcatgaacccaggaggcggagcttgcagtgagccgagattgcgccactgcactccagcctgggcaacagagtgagactccgtctcaaaaaaaaaaaaacacagttacataatgtcttatattctttcataggatgatgagatggtaataaagtcatggttctccccacctttcagaatcactaatggaaatccttaaacagtcctgagcgctacctgtaagttttgaatggaatgggtctaagatagacactgggcctcttaatactcgagagacagccagttctaagaactaacacaaattcctgatgtgagaaagttccattttaagaaaaatgaagtttgtaagaggtttgtatcatacgaatgtttaagaggaagcctctgttctgaaggatgtcagaaaataattggttttgcataattatataaatcataaagtccttgatattactgagatttctgagatttttgtccaaactgttatataaatgtaacctaatgagaagtgacccttcagtggttccttattctctcccttatgtttatacccaccactgacccccaaagaagaagggaaaatgtcactttttttggaggggagggatttccattcttgactccttacctttccttattgttcatttggctcctcaaatagagttttgaggttatgcccttctgactcagatttggtctaacaatgtagactcatctgaaaaatgtttttgtgattcagtctttgaattgatrtagataagaggaatttgagatgatactgcccattaaagtacatggagtgtgggatatcaaccatcacttaggctctcagaagtagatattttttagtatattttgaatatttactacattgactatagaatgaaggcaatacgttaaatctgaccagtttttgttttttttttttgaaacggagtctagctctgtcacccaggctggagtgcagtggcgtgatctcagctcactgcaagctccgcctcccgggttcacgccattctcctgcctcagcctcccgagtagctgggactacaggctcctgccccctcgcctggctaattttttgtatttttagtagagacggggtttgactgttagccaggatggtctcaatctcctgacctcgtgatctgtctgcctcggcctcccaaagtgctggtttttgtttttgacttaagagtcttgctctgtcgcccaggctgaagtgcagtggcgccattttggctcgctgcaacctccactttccaggttccagtgattctcatgcctcagccacccaagtagttcggattacaggcacgggctactacacctggctgatttttgtgtttttggtagagatggggtttcaccatattgaccaggctgttcttgaactcctggcctcatgatccgcctgcccctgcctcccagagtgctgggattataggcctgagccactgcacccagccaatctgatcagttcttttatatatatgtgtgtgtatgtatgtatgtgtgtgtgcgtgtgtgtacagatgatagttttttttttttttttttttttgagacggagtctctgtcgcccaggctagagttgcagtggctccatctctgctcactccaacctctgctgcccgggttcaagcgattctcctgcttcagtctcccaagtagctgggattacaggctcctgccactgtgcctggctaattaatttctgtatttttagtagagacgggttttcaccatcttggccaggctggtcttgaactcctgacttcgtgatccacccgcctcggcctcccaaagtgttgggattacagatgtgagccaccgcacccagatctggttagttcttaagtgattcatgtaactggtcagtagaagaaaaggattrtaaatgatgccattctgtaaactgcactactacccaaaaaccattgttctaaactgttctggaaatcattactatgcatcgttttggaaaaacttgccaagaattaaaatgttacttctcaaattttttttctgtatgacttgcatataattttagatgaattaaagcacctaattttactttttatatgcttctaaactttacaagtgtcagaaaataggtaatttctcaaactccagctgtgttaccttcatggtgctacaagatagctttaagtagattctaatttactggtttacatcgtcaaaaactgatggctggttttaatttgaaacagagaaatcattcattttagttgctaagaatcatgaagttcttactactatcattggtgtaataagatttaatcaagttaaggtgttgtcactggtattagttatccccgtatttaaattattttacacaaaggttttactaagtaaagttctgcaattctaaattcctgttttgggtatgtaaatggaaaataactttgaaacagttaccaaactcattaatttggggctatctatgatttttattctgctaggtttggaactagttcttgagtcaaccctttaattgttctctgccattgtcaataataaaaattttgaagtcccactcggtaaaattagtgtaaacattcacatatttaatagtacctttaaaataagcattactacatttaaaatggttccaaaatgaatctataaatggtaatataaattaaaaaatacgaacttaaagtgaataaatttttaaccttagctatggtataaataatggtaaatgtatagtgtacctttgagtcattaaaatgtcttaaaagataacagcttgttaccagaacattagaaaccatagccatgattctcaagcgttaacaatctacatttgatattttcttggccactgcattcttcaatgaataataatttccagaattccattccatgttgttttccaatagatcttttcacactcgatgttgaatacatggctctttgcagatgaataaaacaagtgcattcagtttagagatccattttgcgaaggctcattcgactgaaggaatctctgggaaaaaaatgagaggacatagttagttaaagagaacaatttttgcatatacctttaaatgtcttacatggttttttctgccagttaccttaaagttttgccaccatttcttactaacttccaagttggatgctcatcctacctactctgccttatattttggcttatagatttagctatagaagtgtattacagtcaccacttactggtcttttgtattcgtttgtctgactgatgctgcagatattgtaataaacaagacaaggacttaagggataatgggagagattttaggaaaagatttggggttttttacacggcaaaaggcaggtgtttattaaattttaagtcttaaaccagttctcaaactttgtctcaggtcccttttacactcttaaaaattattgagaaccccaggaatcttttatgtgggctatatatggatgtttatcatatcagaaattaaaactaagaacatcttaagttactataaaataacccattacatgttactataaatagcattgcttattaaaaatgatctgcaagaagctttaggagagtggtactcatgtaggagtgtggcttaatgcctatgttctcacatgtgcttctatagtcaatcttttccaatgtcacatctcaacctgtagaaatctccactgtaccctcacaagaaaataagtgagaaaaggccaatatttggcattaatatgaaattagttttgacttagggaaattcctgaaagggtcttagggactcccctctcatgggtccaggatccctactgcaaatattcctgatttcataaaccagcaaaattaaaaattcaaatgctaaagaagaattttaaacttaaattctaaaaaagagtgaagggaacgatactcctggaatactcttaacatattttctattatcagttggtttcttttacttatccttcgtgccattaaggttaagccatgaggcttaatatctccaggaaaggaaaaggccaagtacaaagagatcacattggcttcaaatctcaaagcttgctttgaagggaaacagcagtcttgaaaactagatactgttcatcaagaaaaagtttttcaaaactgcctacatatgttaaaaactaaagcttggaggattggccaaaaagtagatcatagaggacggcaaaaactcggatgttgtaaggcaaaattttggtcaggaagaatacagcctttccatggaaaggagtttccatggagatctgaaggaactgagatgaggattaggcctatctcagggacccagcaccctggctctctgggatctctgacctggtgggtataagactgggagagggggagtggaagcagcaagaaggaaaaactttcaaaaagattgaaggggaaaccaaaagtggaggggactagtatgtttcccattgggaattttgagaggaaaccatcttcaatacttgtatgtaaattcgatttcaaaatgcaagaaagtttactttctgcagttattgtgtcctttccagaattccggtactataaagtgaaatgtcaggcactgtcctaagaacttcacatctgtaatgtcatttaatctccacaaaaacctctttaagttctatctcattatacagaggagaaatctaaaaaaattatctgcttaaataatagaactaggatttcgttgtagaaaattccaagttaatgacaagactttgtgtggtgtcccggttaatgagtaccaactttttgattctcaagttatttaccttgtagaatgattatagatgatacaggttgaacatccctaatccaaaattctgaaatgttccaatatcagagactttttaagcgctgacatgatgctcaaaggaaatgctcactggaccatttcagatttttggattagggatactcaaccagtaagtgtaacacgaatattccaaaatctgaaaccccaaacacttctggtcctaagcttttcggatgacagatgctcgagctgtaaaaagacttctactagtttaacatgttaggtttcagaggaaagaatatctaaaaccacttaaaaataagcatacctgtggcaggtgacaggcaatactgccttgtataactgagggatctttctgttgatcagtggctgtagggcctctttaaggcgatgatagtttctctccagttccctttgatactccttttgatcyggcccaattaagctcttattttttcttaaggcatcttcacacctaggaaaaacaggatgttatcaagatattacttctggcatagtttgtgggtttaatgccatacacacgcaaaatacatatacatatatatgtgggcttaatgacacacaacacagactatatatgtgggcctaatcacacacacatacacacaaaaatataggccaggcatggtggctcatggctgtaatcccagcactttgggaggtcaaggcaggtggaccacttgagcccaggagttctgagaccagtctggacaacatggcaaaacctcgtctctacaaaaaaatgcaaaaattagccaggcatggtggtgcactcctgtagccccagctattcatgaggctgaagtgggaggatgcttcagcccaggaagtggagaatgcagtgagctgagattgtaccactgcaatccagccagggcaacagagtgggactgtctcaaacgtgggtgtgtgtgtgtgtgtgtgtgtgtgtacgcgcgcgctgagattgcatcactgcactccagcctgggcaaccgagtgggactatc

SEQ ID NO: 95035 - DNA, 363669 bp, Homo sapiens
  misc_feature (1)...(363669): n = A,T,C or G
ccacttaggatggacttatggggatgctgcctgcgggaagtggaggagccgcacatgaaactttttgccttgggtctcccccaccagctcctcagacgctcctcacttcatgtttgcttggtgaccgtggtagctacccagccgatgcctctgagccttccagggtccgtagcacctcctggaacagcaggagacctggcctctggcctcgcctcagcaccccttctagcagctggagctccctctcatctcagccacgcttccatggccagtgctccctgggccccgcagatgcgccctggtgtctcctccccttggcctgtggtgcctctcttgtctcatttcccagagattctctgatgctcagagtggggtgtttggggggctctctcagaactcctgcttgcccagcctggaagcatggggggccttacttaacccctgtggggcagcacttgaccactggtgtttggaagctgatcgaaaaatgcttcctcctccttctcagagatgaacagtctggccaactgcacatcacagcccaggactggctgtccttcctttcctgtcccatctccagcccccaggtctgtcactcctgcctcctggggcctcctcccaaacccctgctgcacctgtgtccttgtatcaggctctgcttttggacctgagctaaggtagttggcacttaaattcctcagatagcaatcacgtgcaaacttacttccctgaacagcaaaggcctcatccggaggactttttcccagtcccccagcctccagcctctcagctctcggcctcttctctcttctcttcctggactccactgctcctgccatttctagccactccctacctggcctcaccccctgtagtgacttcagctcctccttacatgctaatgaccccaatattttacctcaaaaaacataaactaaagcaaaaatctcaagccaactttggtagcttttgactgggtctgcttggtcaagttcacttccattgaatcagtcacccaaggctgaaagctgggcaaggggacccaggggagcgtccatcaccagctgttttgttggtctcttgctacttatttcaatgagctggttgtgtcatccctatctggagcaggtcttgggttaaagtgttggagggcagagggtccgctgaaagatatggaagagttgaaagtcttagggctgtaattttctgtccttgtgatagtttgctcagaatgatggtttccagcttcatccatgtccctacaaaggcatgaactcatccttttttatggttgcatagtattccatggtgtatcgatgccacgttttcataatccagtctatcattgatggacattcgggttggttccaagtctttgctattgtgaatagtgcgtaccactcatagggtggaattgagcaatgagaacacgtggacacaggctggggaacatcacacatcggggcctgtcgtggggtggggagaggagggagggacagcattacatatctaatgtaaatgacgagttaacgggtgcagcacaccaacatggcacatgtatacgtatgtaacaaacctgcacattgtgcacatgtatccttgaacttaaagtataataataataaaaaaaagaaagttttagggctgtgagaagagccctgaactaccccacccctgctccctccactgcagcccaggctgcacctcccacatctgtcctacagcccccggctcgtgcccgcttgacagagtctctcagaccttgctgtctccttagtgaacttcatgtccttcttgaatttttttaaataattatttttttacaaaagaaaaacatgttcactgaagaattaagaaaacaagtgagcaaaagaaaacaagaatctctcattttccacttagaagaggacacatttttcctcattgtttttgtgtctataaatgctttcatttgtaaaaattacatcacattgtaatgaggtcttcttgtctttcttttcccttgaaactataaagtgaatttctttccctgatataaaaccccttatttttggtgatatatgcatacatattcatcccaaccaaccattgtttctgtggaccttttagctaaatgtttatcagcatccatgtttgtctctttgaatgaggttctaaaattgcaatcactaggtgaaagaaggtgcaaattttgcaggttttatttatgagtgtggttaagtagctgtctgaaagtttctatcagttgacactcagttgctgtataatagcgtttatttccacacatttgcttttatcaaacaaagcattgcacttcttttattagagaacatcctgtcatgtttatgggcgtttcttcttttgtctttgcctctccttgtccctgcctgctttatgtatgggctgctccgctctgaaaaccctcctgcctgtgaagatcagcctctacgaatcccacgcaaacgctttccccactcacttgtcttaattttattgtgttctgaagcaccagaagtccccccttcccctccaaactggggcagccactgccttcaacaatttttttttcttctgaattaaaatcttcctgagaaaggcacagctcttaaattcaacgagttttgatcggtacgtacccctatgcgatctacaccccagacagaaagtgtattatctccattgcccgggaaggttctcgtgtccttcccagtccaccctctgtaggcccccaatctggagagaactgttctgatctctaccccatatttggctgaatttcatattaacagtcatacagtgtaaacccttttgtatctgacatcttttatgatgttcttgacgttcaaccgtctataacagttcattcttttttattgctgagtaatattcccttgtattttgcagttggggtttatccattttcccactgattatacactaaattttaattacaacatagctaaattctcaattatttccctttatgactgttgacaatattctttatattccacaaccctatagagatgtccagagtttttccttagtactttttttaaaactgaagtctttactccatttgatgagtaaagatttcaactttaatatcttctcttcaaatgattagcaggtaccctaccatattgctttctcactgatttgaaaagccactttcattatactttaaatccctacaggggtggtattaaaactagtcaatagttggtgaggcacaggcactgaccagcctgcaaagctgcccattaagaacagctggagcacactgatcatacacatatcggctgggtatcagcctggagtcagtacatttgcttggggccattcctttactttctattattttgcattgatctgggccaatatcacgttgttttcatttcggagcccagataacatgtttttattttctggaagcacagtttctccttcattactcttctttttgactgctctcaaatctttattcttccagatgaactatttaacgattttcacaattcccaggaagttctgttggaacttactgttacatttaggtacttaaaatgtttttgctaattgagaatgtttcatattttctaacacatatgtaagtgcttagcacaaagctcaccacatactgaatatgcaacaattatttaattaccgattgaatgttgtcagttatctgaaagttactgttatttgtatattttataattggccagcttgccgatcgtagccagtctaggagttctaccaatttattggatccaccaaccctagattttaaaatttgagtctttgatgctggtttctttcaactgtgagaacacggagattcctttgagtgtgattcatttgactctgtcaaatacctgtatgtgaagtcccaagcgcgaatgctcccaggcattggggttgtcaccccacctttctccttatacacagctcacaggatagcgtgtttgctttcactgcacactatcgtactgaattgctctgcactggctgtgcaccggtctccttcagacagcccctctgacacataatggcagacacagccacccaggccaagtttctcttttccagacatggcgagtgaggttcttgcaccatccacccaacgtctgcgtggtgcctcactctgctggagtgcctctcaggactcctgtgaggactaaatggcacgcagcaatggggctacccattccttctaatggaaatctactttttaaaaattacctctgcaagcattagatcccagagctcgtttcacgtgactttttgcgcaggcacttctctttgtacgtgaaaaactaactttggtagacttacaggcaggttttaatattttctcgtgattgtatgtttttgagaatcctgtcaaatgatactgaatcttatctagatgttagctagctacagaccctgtttcattctacatgaaaattagatagtgcaccgtttccatcagcagccaagtctccaaaaccccgtaattgctctccttttcttcagctgtatcttgttttaaagttctctaattcaccattcctttccttctaagtttagcctaagcatttcttgcaatgaccaaagttttctaattattaatgagatatttaaggaaatgtaaaattggcatttttattttgctaactgtatttttatccacataactagtttcccccaccaagaatcacaggtcgagaatgctgtaaaaacggatcctttctcagctcctaaaaggaatggcctacaatcgaagcgaacgcgcatctccgccaggtccgcaaccacaggcccacgccgtcgggccccacgaaccggcgcgcgctgtcaaaggcgcttcctccctggaacgcgggattccggggacagtgtgtgcactcaagttgaaaagttgtcatactcctgttggaaagaaacggaaacatcaccaccaggagggtggccactgaagaccctcgccgacacctgctggcaaccaaaggcgcttccggggatctacgggccgacctgtaactcaacacaagcctcccaagccctgcggccttaaaacaacgcccacccgggcggtgcgccgttcccgccacctccacgcctgcctggacccggactcgagaccctggcggcgggccgggctccctccgcctgagcagggacgcggcgagcgcatcccacgaccctcggcagccgttgcaggcctggcggacctacaccccacaccctcacggccgcgttcccgccgcggggcagggcgaggcccacggcgcctgcgcactcagtgaccgggccgccctgcgcctccgtgcgcacgcagcaccacgtgacccactgccagtatccaagatggacgccgcggcgaggcctggccggctccccgcgttagcctgcaccccattgtgtgccctctaagcgcgaattaggctcgcagacatgcggtgctgaccgctaggcagccatgcgggctaccgagtgcgaccggacacggccggggcccgtgtttacggccactactggcccccggtccctgcgcctcctcaaccgcgaagcacccagcggctggcgcctggagcgtcttttggtacgccccaccctctagaattggcagctccagcagccaatgaggtccaggacgcgtgcggggaggcgggcaggggtggagcctctctgccgctcatagggcatccggccccgcggttgagcagccgctgggcgaggggtgggagcagacgggctgtgcgcaggtttcagcgggccaatggaaggccggccaggcgcccggggcgggcgggcgggaggcggggccgagccgtaattgacgagctcttcattagaaaccaggcgggagggcggggcccgcaaggggaggtgacgcaaggctgccgcagccaatggttggcgagccgccggctggctgggcggggccgggccggctgacgggcgtgcggggtggcctatcgccgcctggctcgacgctggagtggggagaagcatcatggttcaacgtgggtcaattttttgtgaatgaggaggggaggttgtggggccgccgccgcggagcaccgtccccgccgccgcccgagcccgagcccgagcccgcgcacccgcccgcgccgccgccgccgccgcccgaacagcctcccagcctgggcccccggcggcgccgtggccgcgtcccggctgtcgccgcccgagcccgagcccgcgcgccggcgggtggcggcgcaggctgaggagatgcggcgcggagcgccggagcagggctagagccggccgccgccgcccgccgcggtaagcgcagccccggcccggcgcccgcgggccattgtccgccgcccgccccgcgccccgcgcagcctgcaggccttggagcccgcggcaggtggacgccgccggtccacacccgccccgcgcgcggccgtgggaggcgggggccagcgctggccgcgcgccgtgggacccgccggtccccagggccgcccggccccttctggacctttccacccgcgccgcgaggcggcttcgcccgccggggcgggggcgcgggggtgggcacggcaggcagcggcgccgtctcccggtgcggggcccgcgccccccgagcaggtgggctccgggccgccgggagtgagggcgggggcgggcgggcgccggggccggccgggcgccgtttatgtaactttgtcaaatgctgtgagtttgcagaaaaacgtccctgccgggggtccgcggccccgcgcttgtcgtcgccgctgcgagcgcccggggggtcgcgggagggcggggggctgcccgggacccgctcggctcagcccgcagggcgccagcaggccgagacggggccsggtcccgctcgggggtgggatccgcgtttgccggcgttgcgaaaacacaccacggaatcataagcaaattatctcgtatttacattgagcgttgaattatttgacactgttataggaggagaccgtgcgtatcagttggaaaggccgggggtggaacccagtgtactcatttaatgcacatcaaaaatttgtaataacttgaggcagctgatatgagtgttttctttattgcatgttgtaaattgacctgctgtgacacagttttcaaataaagcgttgcagaaattaaacttaagttattttaaaactaatgactttcttcactaaatcctaattgcatgactgtagagacctacctaattgcttgctgagagcagttctgcttgctctccgtgagggaggaaagggcctgtgcagtcactttgccgccccgtttttctctgttcaggcttttctgtttattcccacaaatcaccgaagcagttaaggcctgggagtaagcctgtaaacagtcctggcccagcgccagcccagcaggactggggggatactggcaggtttgcaccttgacctggtttcactttttcttttgtaatatgatcgtggttgcctggagttttaattgcttctgataattctgtgcattattttcgggactgtccaaagaaggctggtgtggtggtttcaggacctagccaggaaaggtggtggtggtggctggggagagggagggtggaagggagggagatcgaattaagaaaactcagctgcttgtacacaaatatacactacagcagttacaaagcaacaaaagttattgcagaattttgcagtaactatggcaacacaattactctattataattggaaatgcaaaatgccaccgagttagaagtttcatcagaatggagttttggatatcaaaaatatgtgaaatttaattttttttcaggtagctcttgtgaattctaaaatctgtgttcaattacctatttttaagactgatcgggctttcccagatattctactctctgggatctgtggcatctttccccagaagaactcacatttgtgtgggagggaagtattttcatgccttaaaaacacacaccccaacacattgtaagacttctatagctttctgtgttctgggcttttattttagagatcaaatcccatcctaaagagagcagtaatcaattagaaaagaagccggctgtactcagcaggcagatgtaacgctgccctctttagggttctttctcctgcaaggggagctggcagcaggcatgcccccgggggagccctgggctaaggggacggggtggagggaagatgactggactgcatatgggcctggaaggcctagggacgaaggacagatgtggcctcggagccctgcaccagagagaatgttctgtgttcagcagcttcctagccatgcaaaataaaaatccccaaatgccatattctcggaggccttgggggctgttgctgtagcaagatggacaggacaacctggcacgctggccacgtgcggctcaggcagcccatctggactctgtggccagagacctcgttgagaagaatgccctatggatgtttaccaggaggactctagtgctggaagtttccacacattgtggggttgctgcagtttaattttgttataactctttccttttaactactgcatatttatgcccagtaatcgacttccattctccagcttcattgtgaggtttcaatgcagcatgaatggctttgaattccaatcctttaatgttgggggtggcaccaaaggaaaggcgactttatgctgtcttaattgccggagcagaagaaacatttcatcactcctgtagaattcatccataccattctctattgaaaacggctgggctttcatagctcagaagctgccatgagtaatatattaatacctgatgtagggcgcgaaggagccgcagaggccgagagaactgccgttgctgagaggcagcggggcgacaggctgtggccgggctttcctccgaggctcagaattgatgactgtagctgggratgggggaactgaagggcgaaggggcccagtctccacctaagcttggggctgtggaaccgagactgagcccctgccctgttgttggcagcccccagtctgtcctggggtaaggagtcggaaaggatggatttggagggagtgtttgttttgatttcaggtggtcagcatatgccctgccgtgtggtgggctctgggtttttggccttgacgttagaggcgggtactgcaccttctggttcaggtcagatgaggggtgccatgtcaaaagtgatgctacctttgaacagaccttaactcattcataagcgtttctgtgggaacaagtgtcactaaggtcagtaagttctcttcatacggtcagttttcttctcttgggcttctgtgcgtgggaagagtgggacctgttttggggtggcatgagggccatggtgcctgcagcattaaatggccatgtccccttgctgcagcctcactgacaaacctcctactcacttcctagaaggagggtcagggtcctacatgtccccttgctgtggccttgctgacacacctcctactcacttcctggaaggaaggtcggggtcctgcatagattgcccccaccgtgacttcctgtatcactgtcgggggatgaggatgtatcctggagcaaggagatgatgccacgagcagctgtcacrtgctcccgtagctgacgccagatgagcacctgcttggggctcgtgctgtttcatgcactcaccatgtaggtgtcagcacagtcctgcaggtgggctctacctctggaggaactgggggtagaatgaaatggaccatgtgccaccccctgcatctccagtcccaaaggccagttcctctccgtgcctctgcttctaggctggtggtgaccttgaagctgaagttcagcttgtcgaggtgcttgggcgaacacagcctcttagagaagaggacgatttggaatacctttctagttcagtgtcgttagactttctagtgctgtgttgactgttcttgrcgctgttacaggcgcgtttcataggtctgggcagtacttctggctttctcatgctgtcttatgtcacgtgtgggactgcagaactagaagacatcatgttcttctcctgcaaagtccccaggacgcctggaggcaggtgggggtgacggaagggagctaatgctccaagtccacttcagccggagcagcttttagtgtttgttgttcggtctgttgattaccttggaagattttattggaagaaagcatttgaggaccaagttaatctactctttcaataccaacccagaaaccttaaagaaaatcttgacagatttaataggataagagttttttaaaaaatctctttggcaaaagactccgtcagccgggctaagagacgagagagaaaatacataccacattatgcctgtgtaagcttaayagtcaatatataaagagcttttacagaccaataaggagagcatgagatcaccattgcaagatgagcagaacgtatgaacattgaatcattgtgccagtgatgaaaggttagcattactaatcaattcagtgtgaaggagattccctttatgcctatcatattggcgagtttgatgatacctgttgctggtcataataataatttctattttgtaaggtttttgcaaagtttaagttaatgtatggaaatttccttgaatagggcctggcatgtagtaagcatgatataaatgttggctgttatttattatcatttgctctctggagagacccatatgtattattatataaaatataatagggctgggcgaggtaccttatgcctgtaatcccagaactttgggaggccaaggtgagaggatcacttgagcccaggagttcaagaccagcctgrgcaacatagtgagaccctcatctctacaaaaaaaaaaaaaaaatcaggcatgacgtcgtgtgcctgtagtccccattacttgggaggctgtggcaggagaatcacgtgagcctggaaagtcaaggttgcagtgaggtgtgattttgccactgcacttcagcctgagtgacacagcgagaccctgggctgtcccccccaaaaaagtttatatatgtaatgtataaacataaaatagtgattaccgaattgctctctagaaaagtcttaagtgtcaaaatcttaaatgccattctccttgtccccacagttctacattttgaaatctattctaaggaaagaagataagtgtgtagatatccagacgtgtgtggaggtcggggctgcattatttataaaaggagtacttgttaaacctgctggcatttctgcactgtggcatcctccatgtgtagacaggcagaagtgtgcagtgtaagagggaaaggcggggtctggagcagtccccgggccactcctggttttaagtacatgggtctctaaggtaaccatcagaggtgaggagacggggtacacttttcttttatacatggtggtattgtagagattcttttggtaagcgtgtattacttttttacagtagtaatttgaaaacatttagatatcttcattggaaagaaaagtactctttaagtccttggcaagttgataaatatgctttgcaatagaagaatttaggggcatttgtttttctaactcacatgtaagctcttcaaggtggggactgaccctcggggtctgagcgggctctgctacagcccatcctacaaacagtctcccaggtttccaccagaagcaggtttgtacctctcattcccttgcttgaaaccctggcatgactttcctgtattcttaggatcctaaggtctcagggccctggaaggcctgcctgatcctggcctctgttttaccagcctcatctgatagcacttgctgtgtttgtggagtttcagctgccacctgctttactttctagctctctctaagtcccctttgacctcggggcctttgcacacactgttccccttccttggaatggcctccctttaccttcctcttctccagcccctcagttcatgctcatcctctcatcctttgatcccctgttaaacttagcctaatagcttttttcctcctttctaacagcatcccattgtgcaatttcaggaaggagctcattgtgaccttagttgtttaatgccaccttttctactagctggggctctgtaggattgaggggccctgagggcctcatgcctgctctgtaccctgtgcttggcagtgtaggtgctcgaagaatgaaagaaaatgaatgagtgaatgaatgaatggatgagtaggtagcccagtgaatggcacaatgcgggccttgggtgggagagctggggtgaggccccacctctggcctggcccctctgcggggttcttgccagtgctctggaattgcctgtttcctgacaccccctgcccccatctgggaacttcttggtcctgattttggagattacatgctcctaaggagatgtcataaatgcaagtggagggaattctgtgatgcagaaaggaatgggagggagaagggccttcaacacagctgtcgagtggcaaatgcgactgttgtgccaaggccaaggcaggtgtgtgcagcttgttctccagccgcttcgcccagggccccggcgtgtgaggaggcgagtggtgcttttatgaagaagtttttctctgcttgttttaaattagaattaatgacattatttaatcacttcttatttagcgtcataattttaatatgatacattaatatgtttgtgtacrtaaacattttggagtctgctctgtttaaaaatgtgagtgttgggctttgtgagtttactgttgtttatgaagtactccgtctgtgtgagtcaagtgcttttgctggattgatgtttaagcttgaaacaataaatcagttcttaggacctgaaagtctgaaccagcattccaagtgggagtattgttcaagcggtgatggaattgcattttcccttgggaatggcccatcatctggtttatgtgttgctatttgctggagcggttcttttttaaactgaggaagagaagtttctgtggtatctccactggcctccctggtggtggggttgggggtggagggggggtggtccttgggggccatgttccctgaatatttctaattgattagttattattttgcaaatactcattttacaccccagcccaagtactaggttttacatgagatgagactcagttgaacacattctctgtgccagacgcagtggccagccccatgaccccaggcttgatcaggaaaactggcctctgcccacaagaggctttggtgttggtagggacagaggagaaaaaggagctaaacaggcaggtgcacacgggtcaccatcctgagaaccagggctgtggctggagggcttgcttggtagggagagccgtggtgcaggagccaggcccagatgaggaggaggaaggggaggctgggtgggtgggaatggggtgtggtcctttttagccagagccagagtttcggggctgcattgtgaaaagggcattgtggccagatggtggcctggtgactgaggtctctgaggccagagtgcgtgagccagtgatgagccgggccaactggcaggctgcctgggtggggtggaggtgtggtctgcacaaaggacttccttgcgttttcatgtatgtgtagtcttcttgcatttaatggagagtttgcttctgttctttctattttgtgcactggtgcctggctccagctgggtgatggacctgatctctcttgttctaactttgtggaggcaggcccattcagatgcatcccaaggaggcctccaggtggtccatggcgcggctaggccctccttggggcacatgcttggtggtgctgttgtggggacttctgcatgaaaagcaagggcagcttccaaaacaagggcaaggtgaagaaggtggctcacacgccgggggtcccagtcctgtggctctgagacgggccgcatccagaagggagggggttccttccttctagcagtgctggcgagagcttcctctgtgcctaggtccaggattctgtagagtagctgtcaggactgaagcctgccaggagtctgtgtagaaaccgtgctggaggggacccgctgggggacccgagctggcacccccagtgccaccggtttacacaccagaattccgggtctgaggctgagcccagcctggcccatctgcaggggccttgctggctggcaccgtgccatgtaagtcaagtggcagaaagtgggcccccagcaggtcagcagagcgtggccaagggcccctgagcctcagtcctccctgtggcctggggctaatcccagctggctattgaggacttacccacccccaggactcatgtccgagccccgtaagctcaggggttagagtgttctaaggaggctgacccccattccacctctgggggctgtggacaaggaggggaagatggcctgtgggtccacacaagcggggtgtatcttaattagtgatgccaactgtgcctccttgcttgcaggatgtgggtggccctctgaccttttggacctttaaagtgagccataaagaaaaccattgggaggttctggcatattaaaaccccctctactataaaatttacatcagattttgcactgaaaaaatcctcataggtggtcacagtccccattctttggagaacacttgtttgccagctcaagggctctgtgttggaatccgccccttggctctccaggtcagaaggatgcatcaaaggagatgtcactggggtgcctgtgtcttctcgcctttcgagtgcctgccctgaagcagcttgctttcctttgcccctgagtgtgcagcacagcccagcgtagctcggttgctggctggggcagcagctgacctgcagagccgttacgtgcatgcccgctgccatccgagggtagcagccgggctgggccatcccacccctgcccggcatggtggcccgggcaggatggggcctggtgtgggagcatccaactcacctcccaagctggtggggatgttgaccttttgggcttcggagttcacaaccaaccatgtgcagtgcttcccgcggtccctccctgaagaagagtgtctttccatgtcagcgtgccagcttcagcacwsrcgrrstkckktctgacgaagttctgttttcagaattcttctggttaagcggaggccagagctgaggcacgtgkgrgctgcggagggcctcttctcttgtttcacgtatccttctcctggttcctcggtgctctcgtgggtgtggggtgaagggtctgattggtggatgtgctctctcctgctcgtcacactgccaatgtgcctgcagtggacaagagtgatttgcagtgatgtcctgtgttccatggctctggggtgttgagtgagcatcggttgagatcccagcttcactgtcatgaccccatcacctcagtgagtcctttgtcatctgctgagtgagtgtctctcccgcagagactcagctttcctcttcctcctcccccgctggctctgaggacacacagccctctctgctggcaggtcttgggaggaatgaggagtagggtatgtcccctgcccggggcctgctgctgaccgggccttggatgcacctgcaggactttctgargctcctgcacctgctcagggtgtctctgcagcaggtcgtggtgtggtggacgtctccccgaaggaccttagtacagtttgagaacaagctctcgtctgcctttgtccttgcagggactgtgtcatagtttacagagattagactcttgaaagctcagaagcaccgtgatgcttcccacggacactgtcagcccccagggcatgctgcgcttgttagggacctgaagggccagcgtccctacccggtatgcagagcccggctcgtgatggtggctcagctgctatggcatgtccagattgcgccttggccacagtgtgattcgtatcgaggccgagccgaggcccctggccctgaggatgacycgagcggtctgatggacactgtgccacggctttgccgtctgtcatgcttcccagtgtgctgggagagggagctgccctgagactgtggctgtgcgtaaatccaggctgccccgctttccctccccttggttctttctgtcccgtcttcactgcttctgatttgcatgagcagggaccctgaaggactgtgtgcattttgcccactgccttggtcagagggctaccgggtgtggctgcagtgtctcaagggaggctgcgtggctgggtgctcaggtccaggctcggggctccaggcatgtggcggctcctggtagcaaagtgaggggtagtgccgctctggagggcagtgaaggacagggagatgggagaggtcagggctggggctgcggccgcatggtgcccctgtgggcacagctcctccacaggtggagggtgggaaaggcactctaaggggatttttgggggtggcttccaatatatatatatatcttttgagacagagtcctgctttgttgcccaggctggagtgtactggtacaatcaccactcactacagtacaatcaccactcactgcaaccttgatctcccagcttaagcagttctcttgcctcagctgcctgattagctggaaccaaagacgcatgccaccatggctggctaattttttgtatattttgtagagatgaggtttcgccatgttgtccatggctggtctcaaactcctgggctcaaacagtctgcccacctcggcttaccaaagtgctgggattacaagcgtgaggtactgtacctggctggcttcgagggaggtattgagcagggaggtatttctggtagctccccatcagataggatctygctaggtactgtggcctcagggaattgtttggcttgttttcctagaaagtgccggaggaggaagtattcaggcactgtttgatccagctcctccacagtgtcatctggggcttgtttctttgccctacctggggagagtcagcttcatgggatacacaggccctgcccgctgctcccagggttatatacactggctggttcacacccatcaggaaggacagcatctttgtcttagcaagtcttggattcactctccttcggtctggctccagccacgtattgaactctgaaccagtcactgtgaccggggtgcagagcgcaccgagtggctcagcctgggtgctggacatgcctcttccagaagccggctggggaactggcctccctggtatggaattcactgatgtcaggaaggaagggggaaggggacagatgctgaggaggaaagccgccagtagcgtcctcagtgaatttagctcctcgtgcctcatgaatcccagcagcagttccagaatagtcttggtgtgggctcagtgtgcatgggtgccacactgaacgctctgcggacctcgcctcagaatcccttagcgggcctctaggagggcagggtgggccccatcctgtgtccggagttggttccttccagtgggttcttggtcccactgacttcaagaatgaagctgcagacctttgcggtgagtgttatagctcttaaagatggtgtgtccggagtttgttccttcagatgtgtccggggtttcttctgtccagcaggttcgtggtcttgctgacttcaagaatgaagctgcggaccttcgcggcaagtgttacaactcttaaaggtagtgcggacccaaagagtgaacagcagcaagatttattgtggagatcgaaagaacaaagcttccacagcatggaaggggacccaaatgggttgccgctgctggctggggtggccagctattattccgttatttgtccccacccgcgtcctactgattggtccattttacagagtgctgattggtgcatttacaatcctttagctagacrcagagtgctgattggtgcatttttacagagtgctgattggtgcatttacaatcctctagctagacagaaaaattctccaagtccccacccgacccagaagtccagctggcttcacctctcaatcccagaggcagaatgcgggctcccagggcctgtgggagaagccctcggcagggttctctggcagtggagactaacacacagtggcctccctgtgtctctgctgcttcctgggaaaacccggggccctggaagtcagagcccaagtgtgccaaaatggccagtgggaaaggtggatagaagtaatggcagctcagcagggagatccctccacacactccctccgctgatgactggctggatgcagagaagcctggggcccttagagtggggagtgggggccaggaagggaggagcctgtgtggcagagtccctgcggctgcagcccagtgaccccaaggggcggggtgggggctccaacccacaggatggtggaggacggatcagggccatggctgccaaaggggggcccagagggtggtccttccagccgtgcggtccagctgccctctggggccaggcacccaggtcacccagaggaccaaggctctgctggtcatctgaggatgctccagagaagggttgagccatgttggctcatctgtcccatgcagaggtgggcaggtgcctgagaaggccgatgcaaacgtggcccgggcccagatagtcctggaagccgcactgaccgcatctgcctccctgcgggcaagtggtgtgttagaaggaatgtgctttgggattaggtggatgagcttcaaagtccaggcttgcggccctccagcgagcggagagccacagtggtcagtttgccacctccctcatccgggtccacccatctgcaaagcagacttcagggtttcctccttgaagaactgttgtcaggataagtaacacaggaggtcaatggcccagcctttccccaaccccaggtgctatgaggtgaatgaactcgctgcctccctcggcttcagggaggacctgcccagcygcgtcctgccatgtttctgcagtgggtgtcttctgtgtgctgggccccatgttatgacgtgtggtccgttagtccctgcacacctgtggcgtggatacccgtcctcccgtctgatacctgtggccactgcggccccaagcgagagcggtggggtgggggtgtggatctgagctggctgctgctcctgagcccacgccttccactccccttagtgcccattgcaatgcgtggtggaaccatgagccccaggcaggaggcgcggctcctccaggggcgcactcttgttggaaagtagagtgaggaggagctcggctttttaggctttttagggcccaggtgcatcttggtggagccacrttccagctgctctggtgccattgacccaaccgctctaagcctcggttttcttctccacacgatcagaattgcagtatccctgccctggctgaattgttttgggtataaagcgtattgtccctgtcagctggggcacaaggctggcacagatgctgcctgaagacaggctggagctttctctggtcacagagtgctgtgcctcgtcctgtctctaggctggagggagaggcagagaacctcaaacctgcacacctctaagaggaggtttcttccaggcgaaggtggggggttttgtaaagtaaggggtgggaggctctcctgggcattgcgttggtggyggccggccctgtggtcctggccaggcacgcagcggcgggactgaggctggaagtggcctcctggcctgggtgcaccgggggatcttctggccactctccagcccctgctgcagccattctggtgcttgtgggcccgcggctgcttcagtgggtgaccccatccaggccacttgtgagcagtcccctcttctctgtctttagctcccactgaagttctaggactgcagccctagtgagtgttcttcctcctcaacacacatgtacgtgcgtgtgcacgtgccacacacagcaagcattcccacccacacactcgtgctccccggacacgcacacaccctcatacagatagacgcacggacagacatctgcacacacgtgctcacgcactggagtcgtgtgcagtctggctcctctggcgtgattcctggtgaacccagaacagccactcacctctgatcgctgccacctaatgaggaagggtggagtttctctaaaatgggtacatctgatggtggtgagggtggcgaaatcctctctcatgcacagttctcacccagcttctcttctctccagggagaccactgtgttttcactgttagaactgggctgtctctggacaagggccagccttgttacgagcagaagttctcggtactgtgtctgggatgtggctcttgctcctctaggtcgtgactacgttgtttatgaaagtcaagctcttacacctaaagccggtgctcatgggatttccttacagtgcattacattgttaaatttcaggcccagacgtggtctggcggcttgtctggaacacacagtggtgctccaagcatgcctctgcatggacgccttacccaccaacatccgtgggctccagaggcctcgcaccctcccctggccggccaccccgggatgcccccaggacctgcaccctcagctgacgctcctcttgggaaggtggttttgaacctctgtcatgtggttcctcccgtggttgggacacactcatctgcctctggtgtgacccatctctctttggtctttcctcgtccctccagtgccacccattttcgtacagaaactgaggatgcctctaattccgtttgagcatttgagtctcagtgtctgtgaccttgactccccctgtgcggccgccccagccccagcagcacagtcaggactgggacctgacagtggctctgaacctccgagacacaggccccagcctctcttccctgtgctccgactctcagccttccttctctgccctggtcctggcatcctgyggctcatcattgtctagagtaaaacgcaggcccctctgccktgcctgccgggtcttccagggtttggcccagcctccccgacccagattccttctccctcatccttgggtctggccacattgtttagcccttgtttagggcacacctgagctttcctgtccctgggcctctgtttaccttgcctccggggcttgtttggggctcccagagcagagctgtaggagactgtcttggaccgctttccggggcccagtggcctctttttgattctgtaccggcaggaagggtcatcacagcctccgtggcttcctcggcactcaccgtggcttgcctggcctcctgtcccctttgtgagttgtagtgagtaatggacgaggctgcagtcaggctccctgtgtcctgttgtatcacatggtccttctggggctcctggggtggcgtctgtagaatcagggacaggcgtgtgcgtgttccttatcacaggccggctttgcccactggtaggctgtgctgtgcacgtgaagctgcaagggctcctggcacaggcaggcagggggcttgaggctgagacttcagagggaacaggggcccctgtggccactcatttccatgctctagctctgccttcccgctctggccaccaacagggagccgggtggaggcagagcttccccgctgctgagctgggcagagtcgtgggccaggagcctccttttcttcagtcctcggaggtgacccggaggcccccggaacctcctgacactgccagccagtgcttcctcctgctgagagcagccagcccgctgtgtgcccccatgtactgagctccaagagtgtcgcctctggctaagggaagctgagggcaaggcttcttcctgaggcttggaggagacctttcagctgaggtgctggggatgctggggagagggcctccacgcaaagcagtcaggggctatgggcctccgattgtgccagtcctgtggaggcggccgggaagcaaggtgcccttctcaggagagagagccaagatggaagggaagggatgggaagggctcttccatggaagccttgtccctgtccctgtgcacaaaatgtcygcagttctgttctcctgtatcctggctcgctggagcccttgggtgtgcacctccccatcagtttctgggcccggtggggtgcagagaggagccctgagcccctcctcaggtcctgcctgtgtctcatcttcctggtgcttggtccgagggctgatgtatttggaagttttatttaagctgttgtattgttaaagtgtcatctttgtatgtgtttgaatacaaatcggcattttagggatcagaagcaggggacagagccgtggggtatatggtgctggggccatgtccactgaaacaaagcagactcattgttgccgcctaggacccattccttcggatgcagggcagttttcccttctctttcttttcttccgtttcctttgcctttttctgagatagagccttgatctgttgtgcaggccggagtgyagtgggacaatcatggctcactgccgccttgacctcttgggctctctccatctgcctgcctcagcctcctgagtagctgggactacaggcgtgcaccaccacatctggctttttttttttttttttttgtagagacaggggtctcactatgttgtccaggctggtcttgagctcctggtctcaagggatcctcccacctaggccacctaaagttctgggattacaggtgtaagccaccatgcctagcctcagttttctttttcattaaacatttccatatgatagagagaggtactaaaatatgtcatttcgaatgtggctttagggagatcatggatcttttcagcccacgcaggtatcccagattacgaacagctgatacagaggacctgggatctgggcatcccctaatattagcctgggtgtctttcccatcgatgtggtgtgcagccaggtccccctgggttttctgcctttgcagagcacgatggagggttgcccacgagctgcttctctgtctgtgtccgggctgttcgtggcttcccattagaggcgagagtggactgcgcctcgttactcacgtcagtaggcctctcgcacggtgcccaggtgccagcgatggcagctcttccagccgccctgccctccagtggctctcacgtctgtccttgtctggccttgttggcggggctgatgctgtctgggggactctgtgggactgtgtggatgagcttcatcctgtctgcatcctgtttccactttgtatcatttttctcactttccagtctctgttgtccattcctgccccggccatcgttgagggaggggccatcagctggcccgaggcagtgctctaccctgccccccaccccacgcccttgagtgagagctgctgaggcggtgtcgttgccgcgctttctcccaccaggtacagagagggaataaatggtaatggattgatcgggcgctctttgagcgtattgggtttgcaaaactaactgcttccttgttgcttcattgtggcccagactgcgcttgccgtgggtttctctgtggcgctcagaggagccagttgaggaggcacctgttccggctgagtgcttaagaagccgacctctgccacccctgcccctgcctgcccacatgtcatcagatctgtttccaagccctgctccatctcccgagaggcagctttatccttctttcagattctgaactcacagacactgacgtttgtccagcctccaagcgaggatctgctcagtggttatgcactttacgggaaggtgcagggctcagagcagtgccagggcctcctgcttgtgaggggcatcatggtggaggattccccctgtgggctggagccagggtcaggggtggccacgggaaacaagcacatcttcctcgacaasgggagcctttgggtgagcggggtgagatccgtgaactggactgtgagaccgtgttggagaacactgggtattaagccaaccatgcctgtaacgtgggcagttacacagtgaaatgaacacttcacttgagttgttagaaagtgtaagctgttgctcacgcctgtaatcccagtactttgggaggccgaggtgggtggatcacctgaggtcaggagttcacgaccagcctggtcaacatggtgaaaccccatctctactaaaaaaaatacaaaaaagttagccagtcgtggtggctcatgcctgtaactccagctactcaggaggctgaggcaagagaattgcttgaacctggatggctgaggttgcagtgagccgggaccgcaacattgcactccagcctgggcaacaagaaccaaactgcgtctaaaaaaaaaaaaagaaaaagaaagtgtaagctgttaaagaaagctcccatcacggtgggctggcttttcctggcctggccccacccacaggacccctgggctgtttctcccctttgtggggaggagtcagggaagccctgtttgggggcccatgtagagggcagagcactgtggctccggggttcagtctctgagacgtggcccatctgggtcactctgggtggtcctacccattacatgatcagaaaggcacaaagtagaaaatgtgtatcttgtattgcctgagagttttattaaagcatttccagtatcattaatattagaggaactaaattggtagaatagatcagcaatacaaataagcagttgctgtaattgggaaaaatactaatgatttaatttgcatatgtggcagaagcgacgttttatgattgctttgataataaaagacaggctgagtatcaccaatgcacgcaaataaagaatccattaattctattcatttaaaaaaatggtattcccagcttctgcagcgacagtttaacaattagcgtgcctaattttaatctgttacgtgggtgcaggtcctgactaacttgggaaggcagctcctgctggtgtgagtctgtgctgtcgctgattgtgctgaggaatatggagatcccagcccttggggaagcagagcccttggccctagggagccgtatgtgatctgtatcactgttggctttgggggcctgagcaactgggactgtgttgccctggcttccaaagcccagtgagcagtctcagctgatggagtgtgtgtgtgtgacgtggaactggggggcggtgacttcagtcactctggcttgagtctattttaggggatctctcgcctaggaggttttgcaccctcctcccccaggggacatttgtcagtgtctggagacagttttggttgtcacatctgggggcgtggtactggcctgtagtagtttgaagccagggttgccactgaacattctacagcacatgggacaatgaattgtccgtcgcaaatgtcattggtacctagggtgagaagctctcttgtcattaagtccagaacatgagcatttatttagcattagaagtaaatggcacygcatttgcccagtatggattttgttccactgtacagtcatagaacttaaatagtaattttgaaaactcttgggacaagttacatacatcatttaccagcttgggggtgaggaaatgaaaccagctttcatttacatttttttgcatgtgaataaaatgtacctttctcctctccttttcgtttcttttcatttctccatctctttcagatttgaaaaatgggtttcgattccccagaacttacattttcccagccagagcgtgttttgcatgcagatgtagttcgagataacaaagaggcatgtttgtgttgtagtgactacataaaaagaaaggatattgctgaattgtaaattgcatttttagaatatgctaaaacgaagcactgagagtcatttgtcttcactgcagctcagctcactgcgtgttttcattgtagtgattgaggaaggcggtcgcgggaggcagctccgtgactcttggttcctagacggtttccttcctcagagcatcgcgtgtacgtcacgtgttcaggtgacagctcagtcaccataaatatactttaaacatcctgatgtgtgtgttgtgtgtgggatgctgttgtttcagtcactgccagtcattttctcagctatcaggacgtgaacccgtgtttgctccttgcatccgggaggcgctgctgaggggtgacctcgatccacaggaagtgtgcgctgtgtacgggaacgtttaaaccgggcatccctcgttttctgagatgggacgtgaaggccgagtggagatcggtaggcagcagcaatgcctctgaagttggggacaaagcgggaaagaatccatgtgaacaagcagtttgggcaatttatttgattgtgtgtgtgtttccggcttttaaatataaaaaaaattttcaattgtggtaagaaacacctaacaaaattaaccattgtaaccatttgttagtgtacagttcagcagtgttaattatattcacgtggttgtgcacccaatttctagaattttttcatcttgcaaaactgaagctattaacatacacccattaaatagctattcaattagagtttttaaaggcaggtggttcttctgaaacacaaggttactgtcaggcccgtggtgaactcaaatgtttgctaactatagagagaaagatgggaaaaaacaaatgtttatacatacaataactatagctacacatagataaaatatgtctatattatcaatatagaatacatagtaaatgtgtatttataacatatgtataatttaatgtaaatgtacattaaatacatgaattatataagaagttaaatgtgtgcacggacgtgtgtgtgcatatgcccatcctcgatttacccaaagacgcgggccattgcagagctcgcgcattccgcagtgggatttcttcttattcctctggtccagatctccagaactgattgtgctgttttctttctctgaatgaatcgagcctcatgagggccctcttggctctggcacccatgggcccacgccgcgcccccgaccccaggtctcatcccctttttcgtgcacgccctcccagcccagtggagtcttggcgcccccggctggatggcaggctggccacactccaccacgggccagatggagcctgcagtctgcatccgcttccccccgagtcaccccgcagccaggtccggagcattccactgtctccctatcccactgtcagtgtctgcgtgcaggtgctgagcctggcttggtgttcttctgtcctttgtttcctgtgaccctgtggtgagtgtgaccccgtggtggggcaggggctgctctctggccttcccagtggagaggatgagcaaggggccccggcagccgatggggggcttggagaaagggcgcttaccccaccctggggctccttggggctgccaggggratggtgcccaggctggctctgaagatagggtaagatgactgggccaccaaggtgggggctgtggggagcgctagggaggccctgccaggagccggtgccctgagagcagggcgggcactgggccagctcaggccgaggggacctgccagacccctcctgggagcttggacctccttgggtaagaaggagcagaccttgatggggctgggctggggctgtgcttgagggactggagggtgacaggcagaagagggcagtggctccacaacgggtagacggggtgagtcttggtgtctgtcagtgactgccagcatgcccagcatcatcacacgctctgctttctcctggcaccggcctggtgcgtctccccggggctcgcccacctgcgcgggagccagcacttgcagggacccaccttcctgkgttggtcacctggcttccttcctctccacccccagcgcccactccccctggctggactctccctctgtcctccgaggaacagcttttcttggcggcctccacccccagctcctgccttcctggagtgacttgcccctgggctccctgtcacttctgaattacttagcctgaggagcgtttcttccctttgtgtctccttccctagggcacttcctctttaccttcccgtcccacccctgcggctgacactgaagattctgctgtgtgccagtgagtgagcgggcccagcatgggacacttttccttggaaatgaggggaaagagggctgcttcctggggaactagacagagcttggcagtcttcgaggaggcctggtgtgtcctctttgttcgaaagactgttttgcctcaggccaaattgtccgactctgccaaggcaggaaggagagtaggagatgcatggatccctcaagtgaacaagagaagagcccaggacatgccggggtcattggttgctggggtcattggttcctggggttattggttcccggggttattggttcccgggttcattggttcccggggtcattggttcccggggtcattggttcccggggttcttggttcccggggttcttggttcccggggcygtttcaggccacctctggctcctgagagcgaggggagcccatggaggcctgcagaggagagtgggaggtgaggacagggacctctggatatggccctcaacagtacgatggtccttgtgatgctgccatctgggtggtgcacgttcagtgtgggtgccagccctggcgcagtgtcagaacagccgtggtcacgttgagcatgtgactcagctcttcgttccccggggccaacgccttccctcttccaggccatcatcgtgtggaccccagctgccaactccgtctccatcctggactctgctttagtgccctccccaccctggtcaccgctggactttatgtgcctgggtgctcgtctcccccaggaaggaaggaagtccccaagctgtcacggatgcccactgggctgctcttcgacagacgcctcagggtccaagaggtgtctcccgggccagatctatgtgcacagggcatgtccccaggctgagaggggcacccacctgccgctggcattccccggatgttggctgagtggaggggcaccgcgtttgctggacagaggggatgcctcaggacgcgacgtctcccctggaggacaatggccataattctttttgaaaaccaggcattttgatrtccatagaactcctatttcagggaaaattagaggtccttgaggtggktgtaaaaccaagcaggtggggcgctccccctgtggcatatggagacagtcccagcagaaggtggcggcagctgagctcagcgcggtgatcagtcttgggcctgggcttgtctgcctggccgtgcccagttgtgtctgagatgtccgtcttgcatcctggcaggtgctctagggtcctgggggtcttttcaccacgttgggtctctgcacataatactggtcccagccagatgagctgtcagccctgccccttgtgagaagccagtggtgagactgtggccctggggcctcctgcccgcacctcggctgctccaggttggtggtctgggcgaagtgaggcaggatacatcataggtccctttggggaaggagaatctcgtgctccctccattgtggtgatgcacygagaggtgtggagatctgcatagaagacagggcctccagsagggtccagagaggcccattggtggcagagaggatgcaggcgtcggggcagccctcgtgacaggtgctgtgttgcagcctggagcaggcctctcatgctggcaacacagagagtcacggagtcagaggccctggacattttggggcctccagaggcacacgtggcctgtgagccagcacctgtgtggacagcgccctggcagtggcttcggttagtggacggcctcgtaacctgtggtggcgacgcctcctgagctggggcagctgacgcctggggaactgcttttggtttcaagttcagagtcagagtgagcagaggtagcctttgggctgccatagaggagcgcagcccaccccggctttgggaggacagcatctgggcaccgaaggcagaggccccgcaggctggggatgtctctgaagcacgctcacgggtaaggtgttggttccaagtgaccgtgtctggcagggcagtggtgtgagtaaggaagtggtctatgtccaggagggacgggcgtggaatagctccccttccaataaggacctgcactcagagccacttattattgaaacttgctatcatcgtgcaaccccagtttgtgctgtagttgtcatcagtgtgtcagaaacattttgtgctgtgcttactcagggagtctggttccaccgagaccctgccwcccagccgtatgcctgcattatgaggatttgtgtcatagcagtggcgtgttctgttgagcactgtggctttttaatcgttactcaagtgtggccactcaggctgtattcaggaacacacggtctgaactaacaaaaaactaggcgtcccgggcaatctgtggctggatggcgttcatcacctccccctggggcgggtgttgtgctcccggcaggtggtgtgtgtggtgtggccaggaggccatgttactgatggtagtagacacgtgccttcgggccagggcggtcgacagagtctgtgtcccacctctgatggcgcggtggtgacatctggggcaccatcaggagggttgtgagcacacagcaccttcctcacatctgggcaccatcaggagggttgtgagcacacagcaccttcctcacatctgggcaccatcaggagggttgtgagcacacagcaccttccttggtgtttggatggtggagggttgtgagcacacagcaccttccttggtgtttggatggtggagggttgtgagcacacagcacctgccttggtgtttggatggtggagggttgtgagcacacagcacctgccttgtttggatggtggagggttgtgagcacacagcacctgccttggtgtttggatggtggagggttgtgagcacacagcacctgccttggtgtttggatggtggagggttgtgagcacacagcacctgccttgctgtttggatggtggaacatcattgcccagaacctgccagccctgctttagggaccatcaaaggacacattgaagcagagtcagacgaggctggccccagggcgtccagcaggctgtggacaggacatgacgtggtccaggtgacactcgcagtcgggtggggtgactgccaggcacccccctcttctccagcaccctcccccataagggccggcaagaggcctgggctgggcaagattgcctgcagtcgggggcactcactggttgagggagcccagactccccaggccccctggggggccatggaggaaacgcccgtccagagcacctggcagtgggtgctccatggcaagcagcgtccccatgcgatcttccaccccagactgcscttctgctgcgccactggagcctgtgcgtgactgagttggcaggaccctctcctgcagtcatactggaaggctgtgatggcctgtagcgtccgtggtgtccgtgtgccaggtaggcgtgagtgccatcctgtggaygctgtgaggcgtcaccactcrctgaggtcagtggtgttgccctggtggggctgaatctgcatggaggacgctcaggcctgaggcaggggcttcgcttcacacatcctcacggtggggttgggctggccgtgggccaccaggcatcctcgctggcccggtgaggacaagtgagtggacggtccgtggcctggcaggtgttcagggaacatttagggacatgcgtggatgggagggtgggtgggcggagtccgcaggcctgcaggacagcagagagaccaagcaggctctggcacctcccggggcaccctctgctcctctgattcccaggcccctggctctgctgacttcttcctacgtggctgccctgccccaggcacatctgggcgttcctgctgcctggttcccaatgtcagtgttcttcacagctctgtggaccctgcctggctctgcgtgttctcccagctgacccatcagacccctgcggctgcccttcctgcccgcagcaggcaactcctgagtctgtctagctcacacccacccgtccaggtgccctggcagcgtcacccctcacctgggtcttcaggccgtgagccttagggaccgtccctctctttagatcgggtctctgacttacacagggtgcccgatttgcacgctgcccttcacgtaccgccagggtgggcctgtgcagctgacaggacctgtggccagcttggctctcgtccaggtttaggtgtcttattttcattttatctgaaatttgagatcttctgattatctttgatattctgaaatttaaaatttatcccatttagcacacatgagttaacttaatttttaaagccttgttggccgggcgcggtggctcacgcctgtaatcccagcactttgggaggccgaggcgggcggatcacgaggtcaggagatcgagaccatcctggctaaaacggtgaaaccccgtctctactaaaaatacaaaaaattagccgggcgtagtggcgggcgcctgtagtcccagctacttgggaggctgaggcaggagaatggcgtgaacccgggaggcggagcttgcagtgagccgagatcccgccactgcactccagcctgggcgacagagcgagactccgtctcaaaaaaaaaaaaaaaaaaaaaaaaaaaaaaaaaaaaagccttgttttctattcatctggggtggtttcctcctctcctggtcaccctcgtcatcattgtcggcatcattgtcatttccctgcagcgcctctgacctgtgttttcctttggtgggattcctgtgaatgccattttggctactggtttatttctctgatatttactcaatgtgatctcccaggtcctctgtgcagttttgttctgctgttcaccggctgaagttccaggccctgctgcctgatcgcctctgctttgcatccgttggtgcctgttctgcggacgccatagcatcactgttctcagtgtccctccttagaggggcttgaattacctctgtgtcttccgggctcagtttttctgtgtaccttggtcattctttttcttgcttcaactttttcagtggctggtcaattgttcatatctaagtatgaggggaagatacatttcagatggattcaaggcttaaytgtaaaaagtaaagcaagagaaatctccaaagacaattggggcatcarggacccgtcctcattgaccccggatctctagaagcggacaaagatgcaattgacagaataaaaatgacaacttttgagtggataaagatattagcaacaaagtcaatgaagaaatgagagttttggaaaaatatgtgtaacatttgacaaagctgaggcaggcggatcacctgaggtcgggagttcaagatcagcctgacctgcatggtgaaaccccatctctaccaaaaatacaaaaattagctgggcgtggtggtgcacgcctgtaatcccagctacttgggaggctgaggtgagagaatcgcttgaacctgggaggtggaggttgagccgagatcacaccaccgcactccagcmtgggcgacagagtgagactctgtctcaaaacaaacaaacaacaacaacaacaaaaagtttactatggagaggtmtcttccaaactggagagaaagaccaacattagaaaatgaacgctcagtgtgaccaggcagcccagggaagaggggtcgttgcagacatgcccaaactccccagcccccagggagatgcccagaaaagtcagcagagatcgtgctttttacctagcttggcagaakatggcaagagagatggtgtccattacaagggaggatgtagaggccgcagcagtgtcgggcatggctggaggaggtacgcgcggctgcagcctctttagaggtcgttctgctcacatgtcctgatgtgagaaataagcagatacttcactcagcccccactcccagggctgtgctccacagggscacagaccccaggacgtgaggctctttgcacccggcagtctcttgcagtgttgtggtaagagtcaaacgcttggaggaaagtctgtgcccatgagtgggagaatgcttggctaaatgttggcacagccacgtgacggactcccccgagacatggtattgaatgagaaacggaagatgctgagaagtctgtaggatacaatttcatttttggaggcagtgaccacctggtgtgtgcatgtgtacatatgtgcacatgtgtgcattgtgagcatgtgtgtgcgtgtgtgtgtatgtgtatggaatggagggaagtgtggacagcaaccacgcaaaggtttcctgttgggtgtttgatggtggagagagcaggaaagagagaaagaagctattgctctgaacatgaagcagtgtgtctgttctgtcgctgtgtataaactgcttgcttgtgcgtgttgccgcgtacactctgtagagagaggggaccagagctcctggtgtaccgggaggccgggatgtaggagtgggagctgcagagcagcgtgtggagtgcgagtctttgggcactcacagaagcgaagcctgtctgtgtgtgtgcgcgcgtgtgtgcgcgggagcccagcccaaggaaggaccctggtggccttgcaagggagccagggacagagatcacctgtgtgtgtctttgtgtggtggtgttactcttgtggtaacaacgacttttgtaaatgggagtgcatggctgaggtgttgcttcttaaaggcaggagtaaggaggagggcccggggatggggagcggtcggatgagtagctgggcccttccagtgccggcttgagggccttttctctggatcacaaactccccacctgctgcctcgggcagtgggttctgttctggttctgcagaggagagtcctggggcccactgtccaggagttcctgagacagagaccctcagggaggctccccatcaggttcctatgggttcctgcttcaccctactgccctcgttggagagacccccagcagtctggggccttgaggatgcctctggccgagcagccacccacgcgccctgccctggtstgctttgcagctctgcgggtgcagctgctcccgtccgccagctgctggatgtttgtggggcattgttgaaatctctgatggatgctgccccctgcccctccacgggctcttcactgttttgggtccatgcctgtgctatcacttgattccgatttaacaatacaggtgaatgaggcagggccggatgcgcaggcccagatcctcatctttgtgcaaaagctttgagggaccacaggtaaaggcccgggccacgccgacagaggctccagtctccatcctgcttgtgcggccatgcctgagccaggtcccctgtgctgttgccacacacgtgtgtgtgtgagtgagtccgtgcgtatgtgtktttgaggttatatgagtgtatttgtgagtgtgaatgtgtgagcatgagtgtttgtgaatgtctgtgggtgtgttacactgtgagcatgagtgcatgtttgcatgaatgtgatcgggtgtgtttaaggttatgtgtgtgagcatgcatgtttgtgtgtttgtgttagtgtgtgtgagtgcctgggtgtgagtgtgcaagtgtgattgaatgtgtgagtttgaggttgtgtaagtgcatgcttgtgtttgtattagtgtataagtgttagtatatgagcgcatgggtttgagtgtgcgtgtttgagtgtgttcatgattgtgagtttgtggttatgtgagagtgtgtgtgagtgtataaggatgtgtgtatgtgattgagtgtgtgagtttgaggtcatgtgtgagtgacacacgtgtttatatgttggactccttgttggagcctggcctgagtggacggggccgtggtgcaggccagaacaggtgtctgcacagacaaggtggcctgaggcgcagggttcctgcctggacaaaggtggactctgtcctgggtgattccctgtcccagctggggcctgccctgtggctgccaggagctgaggagtgactgactctgggggcgacaggctgtgggaagccctgtggtgtggacagcagctgcacatcagtggctccaaagggcagagggttagagcaattgccctagatggcagctgtcatcgactatccaactaggagatgaggggcatgttggtccttcacctttatgactcatttagctgtctgtaattcatcccaggaacgttcttaaagtaatcatcatcattttgaaaagacccagcatgatgcggggatgagctgtgaagacaggttttcaagcccaagtccagtgggtgctcaaccagctcctctgctcggctcctccaggcgccgcarggctgcaggtgcaccagcctttccaccaggtgcctggccagcacaagagtcctgctctcccggaggccgctgtgcaggatcagctctgcactatctgttgccgttaaccatacagtgcatgacctcctgaaaaacaccagacatgcttcacaggccccagggctggcaaggcagggagcagggaggcctggattcaggggggcgctgcagggagtccagagtgcccgtgctgactgggtttggtctgtctctgggcaaatccagttttacaagtctgctaagtagcagtctttaaaactgcatcttgattggtgtggcacctgtctcctgcctgcgagaaccatacctgcttttactctaccctttaacaggagagccccgagccatgtctttcagtgggatcgagggagttggaacatttcagagctgtggggtgcctccctcagcgcagcattttggacctctagcaccactctctgacggttgttggtggcccatggctaarggttgcatggttgtctttgcatttttaaactctgttttgaccccgcagagccccttgggaaaagtcgggatgctaccctcactgacctgccagtcccggggacacagggcagacggcctgccgtcctgtacagggccccgtgcatctgggcgtgcttttctctgcctcatgaagtgtgtcgccagccacgctgcaatcatctgttctttaagagaaagaaaagtggagatgacaggatgtggcggtcctatgattctctccgcccaccagggaggaatgggaagttcccatcagggcatgacgccactttcagtacaagccttcaggcatctgtgccacttcctttcatgcaccctgcactgtcctcagctcctttaagctcttcatttccgttgttttctatgaaaggtggctacgattctgtgtgttctgcttgagagaaggtggcccaggcctgctgagacgtcatgggccgtgtcatccagcaacctggcttccgaggcgctgtgttgaacacttcttgacttcatgagtttataagtacttcatgcccagctacaccgtgtacgcggaaatgagagcagggcttgacccgtctcttgattatctgcagcagttttaatttattttaaaatagaaatagctttgctttttacattaaaataaaaatgctttttgtaaacaattgcaacaataaataaacttagaaagtaggagtttaacgaacctctgagtttcgctcacatgcttgggaaaccaaccgggttagcgggactgtagcttggagacattgcagcccaagcggctgtctctggggagccctgtggctcccgggctgcccaccccccgccgggcagtcggcttgctgccaccagcaggtgtgagctccaaccgtagacatgctcttggtccagacgtccatttattgggacccaaaactcagaactgtgggcagttcagacctggaaagatgaaaggggaccgtcggggaatgggccgtgctgctgtcttccttcccgcttgttggcatctgtccaagccttccctcctttcttggagactgtcaccagagagggcctgtctgtgtcttgtcaaacagagaggattcctccctgccggcgagcctgtccactgcctgtgtgtgcaggtcctttgtcaccttcctgcagcttccctggggtcaccaggggagtggtgtgtcacccgtggggttggcattcacctccccccaggtgagggctctctgacggctgtgaataatcacagcagcaggtaccaggattgtctgcgggttcccatctgcagggcagcctcagctgtcgatgccgacatcgatagttttgagtagagttggggaggaacttgggctatcacctggaatcaaagcacctttatttactgctttgrtccgaaagaacgcaacacttaggagggtccactccagcagtgataagcacctcacctgcagaacagggagggctgcctgcccaggtctcccacctcacctgggcaggagaggcacctgcagcttgagacaggcatggagaggacggtcctgaccactgaggagtgtctgtgtctggaggaaacagcctgtgcccctctcctcaggacggaggcccttcacttgtacccccctgttatcccccaatggagaaggaagtgggtgggcggctgggacacgtcagtttccagtttttcttgcttggcaccctgtcaatcttgagtttgtttcaagaagctgttctgctgccttgatgagaccccctccacgtgaagaaaggtgaartgcagcagcgccagccacgcaagatggtactgtgctttggacggtgcatttcagggtcttctcatcgccccctttgctagtccctgaattcctcacagccaagttcctgtgtctctgcgggccccacatccctcacatctgacattcagggccctcctgtgtctccgaaggaagagggttggaacacacctgcagagccacggttctcaaactccggagcccttcacactcctgcaaattagcatggactccaaagagctttagcttcaatgattgagatgcacaggctgactgtcgttctgacgtgcttgggaccagaagtgttcaggctctcagagtttttggattttgaagtatttgcgtatacataatgagatatcttggggatgggacctgagtctaaacatgaaatttatttatttatttatttatttattttgagacggagtcttactctgtcgcccaggctggagtgcagtggtgtggtctcggctcactgccacctccgcctcccaggtttaagcgattctactgcctcagcctccctcccgagtagctggaattacagacatacaccactatgactggctagtttttgtatttttagtagagatggggtttcaccatgttggccaggcttacctcaggtgatccaccggcctcagcctcccaaagtgctgagattagtgtgagccaccacacccagcctaaacatgaaatttatttttcatgttcaccttatacatataatgtgaaggtaatttcatatagtatttttaataattttgttcgccaaacagttttgactgtgacccatcacatgaggtcaggtatggaattttccacttgggttttcatgttggtgctcagaaaatttcagattttggagcattttggtttgtggattcttagattagggatgctcaacctgtattggtatttattgtattagaaactaacacacatctaaaaaacgtgcttactcatttgaaactgaataaacccattacatgttaaatagataggtaacatttttaacaaaaaataaccgttcggtaaaacacaaagcgtcgtgagaagagaggcatcattttaccctttgccagtctatggaaggtgtggcttaatggcgacagtatttctgcttctcacaccggctctcgttcagtccatgtccactgtacccctgtgagagaagggcacatgacatttttctattatgaacaaaaatttgacttcacacacctcttgtaaaggtctcggggaccctctgggaccccagatcgcattatgaggaccgctgttttagaaacgggtttctgtgtggctgggggcctgggggctgatcacttatttggccgatagggtcttttgtcaaagggttgttttccatccgcaagtgcctgtcagtgacggaggctttcaggcatgttgttggtgaagctcaattcaggcccgttgttggtgaagctacgcgtgcttgggtgcatggtggttatggtggaagagatctttycttacttagtctggtactgacataaggttctggggctgtttgtcacctgccctgggggtgccctgcgtagggcagggataagtcagggataagtcatgttttccttcgtggggttgcagccatctgcctgggaccccactggccttttgctctctcggggtgttcatggcagttgatgttaaatgatccattgagcccagcgtttcacaccgtaagtcaaatccttgggccttctgtgtgtctgtctgaatctttttctctgaaattcttttatttcacagcaaacggaaacaagtcttgttttatctggatgccttctccatttggactcttcctctccagagtttattttaccaataagtttgtacatgctagagatcataggccagaatgtggatctttatccactcttatgcttacgcagactggcaataaacacacctaggcatctgcaaaagggcctcagtgctgacatctcttttcctccatggagaaagttcagtgctgacgtctgttttcctccatggagaaagctgatgctctgttgctgctaacggacagttattcttgtgcgttcatctgtgtgtctgtgtccgccagtgccacacgcgtgaccctgacgaccctgctctgtgcatgcatgtttgtgtgtgtccgccagtgccacacgcgtgaccctgacaaccctgctgtgtgcatgcatgtctgtatgtgtcacatagtgccacacgcatgaccctgacgaccctgctctgtgcatgcgtgtttgtgtccgccagtgccacacgcgtgaccctgacgaccctgctctgtgcatgcgtgtttgtgtgtgtccgccagtgccacacgcgtgaccctgacgaccctgctctgtgcatgcgtgtttgtgtgtgtccaccagtgccacatgcatgaccctgacaaccctgctgtgtgcatgcatgtctgtgtatgtcacatagtgccacacgygtgaccctgacgaccctggtctgtgcctgcatgtctctgtgtgtcccccagtgccacgcgtgtgaccctgatgaccctgatctgtgcatgcgtgtctgcgtgtgtcccccagtgccacacgtgtgaccctgackaccctggtctgtgcatgcgtgtctgtgtgtgtcccccagtgccacgtgcgtgaccctgacgaccctggtctgtgcatgcatgtctgtgtgtgtcccctggtgccacacgcatgaccctgacaaccctggcttgtgtgtgcatgtctgtccatgtccctcggtgccacatgcatgaccctgatgaccctggcctgtgcaagtgtgygtgtgtgtcccctggtgcctcatgcatggctctgaagacctagccttgctggctcccatggcccttcctctttatcctcttggtatctgatcttccgaacgttccagaatcagagggtgggggaatcagagcctcagatggaatggtggcctcagctcagcagagcctgttttggccttgttcagcataagcctgtggattgtgtgaaatccttcctattttattcccgttacagcacagtgaaatggaattttattactttcaagtgtagagtccattatgaaactaaagtataaatctgtcccaacaaattatggaggaaaaatatctgaagtcttgcgccatgtggccacgtatcataaaatgacactcttataaaacacaatagccagaccttacactccacatttcactaaggaaaacagtgcttattaaactcactgtatagacaggagtcagaaatgtcatatagcaacagtttgctttctaaagcttaaaatttatttcaattttaattaccctaaattcaaattaaattaatcatttaattacacaaattaaaaatgatttcatatatattttgtctgacaaacctgacttagtacctctttgggaattccctgttttttctccatttaaaatctgcaccctgtgtttgcaccctcgtgggttctgaaagaattcttttccgtttctgcgaggtttcttttaagaggagtagtatggtgactatttctcctacatgtactggttgtaaraaatggtggcaagaattataaaatacttcctcactgtctggaaagtccaggtaagatcgtgcaagctgcatggaccagtcagatcagtattatttggatctttcttggtgcaagatggctttgagtcattggtctgcaccagttttttattgaattataaaatacatgagaaaagtacacaagccaggagggatatgcgggtgctgactttctgcaagtgaaggctctgccttctcttccacagatcaaggagcaggtgttccccccgccaccgctcccttgttcttccttcagtggccgtcccccacccctcccaggggaacctgtctggatgtctcccacctcggattagtgttgcctgttttcacattttatgcacacggagccctacagtaggcgctgctgtgtgtgtctgctttttctcagcatgatgtttctgtgatttatctgtgtcactgcatataggtgtagtttgtttatttttactgctgtatggtgttctgtggtatgatgacatcacaaggtatttattcgtgcagcttttggcacgtttgggaggtttctggtttttgactgttacagataatgctgccgtgtcttcgtagatgtctttctgttgggtagatgcctcgggctggcattgctggggcatggcacttgtgtggctgtagtacctgccaccgaggggtttcccacagggtgtgtgccgttgactgttttgtaacctcgtgtgtgagtgccggccaaccacatccttaccaacacatggtatcctttcgtttatagattttagccattttggtgggtatggagtgttccgttgtggctttatcgcgtttccctgcagtcacacatgcgcaggaccttgtgtgtgttgattgaccacttggaatcctgtcttgtaaagtacctgttgatgtgttttgcttatttttcattcaggttgtctgcctttttcttagtgatttgtaagaattatttatacattttgaatatccgtcccttgctgggtgtatgtgtggcagggtctcttctattttgtggcttgccttttccctcttctgcatcttttgataaatgagtgttcttaattgagtgcagcacaatttatcattttctttccttcatggtcagtacctttttaacatctgtctatctttgcccacctgaagatattttttgttgttgtcttttagaccaggcctcattgcttacctttaacatttaggtctgtgatccagctcatactaatttccatcatggcgggctgtatgggctgtggttcatttagcatcaaagagcagctgacgcaagcactgcatattgaaaagaccctgttttccctatggatttggggtggaatcctcacaataatcagatgactctgtgttggtctcattctagcatattctccttggtttactttaattacacaagtttagaagaagtcttgatatttggtagtgtgagtcccccaagcttgtttctcttccagattgctatttcaggttctttgtgcttccatttaaaatgtaaaattgtcagttttcaaaaaaattctgctgggattttgattgcgattgcattgactgccgattactttgcaaaacattgacatcggaatctcattggggtttccggtccatgcacatggtatattcctccttgtattgagatctctaatttcacttacgttttatagttttctatgtagaattcttctacgtctcttgatagatttagtactggatatttgctaatattgtatgctattataaatgttatcttgttttcaaagcttattttgtatttgtttattgccactgtatagaaatacaatagcttttgattttggtacattattgaccttttactcagcaatcctgtaaaattcacttagttattttaatagttattggtagattgttttgagttttctgtgtatacactatatcatctgtgaatagtgacattttcctttgtaatctttttgctttcttttcttttcttgccttactgccctggctaggatctctgccagggtgttgaatggaaatgatgagagtgggcatcctggcctcactccctgtttggtgaaggctctctgttgcccaggagatgatgtgtatttggcgttctggactgggttctgcaggctgctctcctttgtgtgactctgggttctccttttggttcactagcactggccgttccgtcaccagcatggcaggctgaggccatggtgggcactttgagctatagtcactgcccgtgaaatggggtggggagggtgtgtggtaagggacaaaactggccctccccacactgtcacatttctttgtggtagcttggtaagatgttttagaagaatgttctctgatggatttatagcttctaagacttttgctctttggaaggtttatggcttattccatgaaattaagtcaaccaaaatttcaaaatttccaagctgcgggaggaggaaccataggtaaccttagattccaagtgtttggtgaaggaaatacacccacacgtaagcgttagtgatgcatttgctttcattgattctgtgtggagcagaaatgaaaagagagagatgtctttatgtaaacagatgcccagtgtcagaaactgcccacttggcagagtgaccatggctgtcttgctaaaggtgcttgtaaattaaaatcacaggctctgtggctcagtgtggacttctagtgcatctggtaagttaggggaaaatacatcctaaaaggcattgtgtttgaaagttgtaatatgtccacattcgtctattatttattagaatgtattttagttagggatgtacagatacacatttcaaacgtccttcagaaacaaatggatccttgagatcttagtagcatgtgctttccatgtgttttcttagaaaagtgatcatcgtagttctctaatctggttagtgaagtatcattagacacatacatcaagataaaaagaactagatcatgcttaagtcttattaaaccatttaatttctagtaggtttttatgttgtgagtgttgcgttgggttgttcaaagacacaccacctaaggagaaggtgacggaatgggcagaaagaagagaggtgtatcaggcagacagctgactgatgggttttcatcccatatccartagaaaagactgctttcctcgtgggctycagatagcgctgctttctttatgaggggttccatttagttttcagctgtagaatcgtttgttcttaactccataatttttctcttctctgcctgtgatcttcatgagggaatgtgaagtttttcttttaacccagatattctgagggccaacagcagttccctgcattgtatgtgactctggctttctcatggcagccctctgcaggctctctgaggcattgggagtcctgaggcttaaagtaccacaaacttgtgaatttctggaatctttgatatcagatccttaaaacttaactctagcccccaaaaggcagaaaacggtttcttttgcaatttgctttcaacttcagccccctgtgaggtagtttctgaggggaatccaggaagaccttaaaaacgttcattcagttcacagttttgttgtgtgcctactgtgtgccttgggccaggggtgcagcaggaggtcacattccagccaggggcaggcagaggggccgacagataatgagaaaacaaacaactacttaatgtcaacatagaatgaaatatcagaaaaaggaaagaacttggaagggcaagaaagtagggtgacaggaatgagcgtctggggtggggcgatcaggagcagtttctgggaggtgggacgtgggtgtggaggtggagagagaggtgcctttcctgtccttacctgcagcctctaagccgtctggagaacttacatttcccagacagcgttggccccagagcctttttcctacagcacaccagggatgccgatgaactccaacccagtacttctatggggagaaaagaatcaggctcaggggtgataaggaactggtccagggtgagagaacacactgggctagtgctggggccaggtggagctcgggtgtccccgctccctgtctagtactctttcccaagggaccaggtagagctcgggcgtccccgctccctgtctagtactctttcctaagggaccaggtggagctcgggtgcccccgcttcctatctagtacttttttccaagccagagtccgggggtgtgaagagatacatgttcccgtttgctctcagtggaacttgcagccaggcacggggcaggtgctcatcagataagcgagcacatgagtcacaacagacccagccagagccagaacagcttggggtcctgctgcaggaaggcagggtgcctgggcagaccctgaaggtcctgtctgtggctgttggagctacttttttagcccaactgagcatcatggctgctgactcagtctccccagctgtgacacgggggctggggtctcygggtccccttgcggctgtctgtggcgtctgtctgccttgtcctatttccccctctggtaatgattcttcagttttccttcgaggaatgaccctcattcccattggtcccacattggcggcgctgcctgtcagggtgtcctggcytccctggtcaagggctgtggctcagcgcaggccatcaggtgtggttggacagtgttctggagggactctccgttaattcctgcctctgggtccctccacctgctttgccagctaccccgttcactcgctggagcttcctctgtttgcctagattatccaaagtcaattttctattgcttgcaaccatgaactcctaacaggtgtaccttgggtctagcatgcctgctctgtaaaacctgaattctcacttcctttggctcaagtactctgtgttctcgccggtttccagaaagaagggttcatagactgtgggcattgatattctgtccagcaggttctggagctggcttcttagcctcctcatgtcagatccactcgtctacagattcccgagtcttctgcttcctctctaaatcgcagctcccactggcttcctcccaggaggctgtgggtggttcctggtgacctggctctcagtgagccttcaccagaggcaccagggaatgaccatttctggctgaaaaggtgacccgaaggctgagtatgtgaccgagtggaggggcatgttctccatgcactccccagtagctggagcccccaccccccagctctgggaaggggtccccacccaagctgcttctgtcatctcggcctatcctagacccgaccccaggtcctctgtcctgctcagaagccttcagtggcttctgcttccctcagcgcagaggacacaagattctgagaagccctcttgttcatgacacagccggattctggccacatcatgtgaaacatgtttcccattagcttggctgtgcgtgtaaaagtgaggaggaactcacatggtaatagagttacatgggtatatgcattttcaaaatagtgccgttaactttcggacgtttcagtgtaggtggaaggaggtaccgacgcagcgtgaatgccagggtgttggctggcgttgaagctagatgccgtgggctgtcacacagttctctttactctgtatatgtttgaagttttcataatataaaagctttgtttttaaagagaaattcatgttaaaacctgtgaaatcttaaattgcaaatatcaatatgaaaacactttttttttacttaaaatatttgtactttttacatatccaaaaaataaacaaatgactaaaaccaaccagtatgtggggaactcaacatgaaatacatatgctaaccaaggaatttaactctcttacaaatgcactcacctgataactttggaaaccagtgtcttacctggatacggtaaggctgagaacraggagaatcgtgtataaatggtggtcttgtgaatgtgtttctcatgtgtagaggttagcgattctgaaatgactttgtgtgtgtaccggaattaaacaaatgagaaaagatactgtagataataggaaccaggtttcccactgttagaaagatatttaataaaaacaaggaaagaggaagactaaaatacaccttgtgatgttgggatctgaggtctcagtatagactcatgattattcaagtgtaaactcatacagagatactgaggtgtgagtgagtccctacgcgcgctgcctgctgagagggccctgcgtgctctgtcgcccagcagcagttagcacacctagcactagattgggtccgaacacagttctcccaaacatggatccagggttccctggagaagccattgattccgggactgtgacagggacatcttgtaaaatcagaaagtaagcaaatgctcaaaaacaaacaaacaaaagactggattggaggcttgccagaaaaacctaggagctggtttgcaggagctcccgacggccggcgctttagcaccaacaccaatggtggcagtatgggactaataacacagcggataacgtaactatctgtgagtccacacgaacggaagyagattactgagtcactgggaagatggagcagtgaaagctcatccttgccttggaattctaagtaataagtgcagcaaaaaggaggtgatttggatgtcaccactaggcaaacatcatgacagtgagtgtcacagcccggctgctctgatggattcaggcccacgaagacgtgtgttgatatgtgtctctctccagtgagcttcggtagcttgggcttttcaaggcacttgtttatttcatctaagttgtcaaatttattggcataaagtttttcataatattccccattgtccttttaatatttgtgcaatctgtagttaattcccactctctttttttttttttttttttttttttttttggaacagaggcttgctctgtcacccaggctggggtacagtggcgtgattttggctcactgcagccttgacctcccgggttcaagtgatcctcccacctcagcctcccgagtagctgggactacaggcatgcaccaccatgcccagcttatttttttttattattttttgtcgagacagggtttcacaatgttgcccaggctgctctcgaactcctgagctcaagcaatccccccacctcggcctcccaaagtgctacaattacaggtgtgagccaccacacctggccccctctctcattctcgatattgttaatctttgtcttttctctttatcagctctgctagaagtttatcaattttatagtctcaaagaatcagcttttagtttcattgatttttctctgttctgttgtcttctgttactgttttttttttcttattttgagtttaatttgttctttttctaattttttaaggtgaaacctaaggtcattgaattgaggccttcttttctaatacaggcatttggtacttatgtttcctcctaagcactgcagatttttatgttgtattttcattcgtttcaaaatgttttctaacttcttttaaattttttctttgattcatgatgtgtttgcaaatacttaggattttcaaatatctttgttattgacttctaatttaatttcagttttgtcagtgaacatactttgtatgacttgacttgtccttttgaattcgagactggttttatggcccagaaggtgttctatcttggtaaatgttctgtgtgtgtttttaaaaaagaacgtgaataacgtgtattcagccgttgtttatggagtgttccatgaatgtcattttggtcaagttgggtggtagtggtcaggtcttctctgttcttattttctgtctacttgttctaacagctactaagagcagggtgtgaaaattcccagttataattgtagatttgtccatttcttcttatgcttttattattttatattattattttattttataccttgtgatgttgggatctgaggtctcggtatagactcatgattgttgaaatgtaaactcatatggaaatatcgtggtgtgagtgaatacctatgcacactgcttgcatcaagtatgaagccctgccaacaggtgcataaatgtttaggactgtgtgcccacttgatgaaccaacccctttatcattatgaagtggtcttctgtattgctggtagtattctttctttaaattttactttgatatacatataaccattacagctttcttttgattagttatgtgatatacatttgtccatcttttaatctatttctatattttaaatataacaagatagatttcttgtaggcagcacatagctgggtgtatagtgcttggggaagattgactgtacgttataaaacacagagcctcctctctccaaaagctttttagtccctcctcacacgattcctctttatactctgggaaagtagggtctcgcttttttatccagtctgacaacccctgccctttaaatggggtgttgagacagtttgatatgctcactgatatagttgggcttggctgtctccagttctgcaacttagatgctttaattcttccttttactgttccrtcaaactgttttcacctttttaaaaggtaaatttctatgtttactggacttttcattgatcaggactattatatatatatttttaaaactatgtgatgtttttcttaatgtaatgttctctgtgtaatgtttttgtaatgccttggtgatgaaatagcatagttttgaatagtctactgcaacttttcttttttctaagataagcccttgtgtttttagtatacagttttgcaagagcgtgaggttcttccagaacatttctattatagtgaaaatgcctgtgctctattgaatctgcagttgggagaagaatccgtttctagctgtcagcactatgttaggtgaaaccttgctagacactggacatttggctaggaaccgtgcatgtcagcttgccagaattatagctttgagaagcataattgaccagtattaaagtgaacacagaacagggtaggagtgagcacacatagcctcttggcagtcctcaggtctggactagagcttattcctatttgaagataaataaacagaaacaaacctcacctttggacctgtcaaaaaaagggtatcccagaatgtatggaagagggaaataccctgaagtgcagaagaatatgcctctgaaaatgaaattaaatcaggaaaaaatattttcaaaaggctttggctagaagaatacctggctcaacaaagagaagcagaaggtgatgtatgaggagggactaggccgagtgagaagatgatgagatgagtttaaagggaagtggttgagaacaaagagttcatggcttagttaaaatctgtatttgaagccataaggaataaaatggatattgtggaaaatagcagcagtgaagtgaagaacatacttgagaggctgcctgggaatgcagaataaacaacagatgtgtcaccggtgaaagaggccagatctgatggggagacttcagccaaatagcataggaactctgaagaagccagaacaagtttaacaaaaataataatcagtgacataattgaagaacattttcctgagcagaaagaagacctatatttgttgaaagagtcatgttttgaacaaaataaaagactcttacttatgtatcttctgacaacgtttttgaattttaagattcaagaaaaaaatgccagtagattccaggcagaagaaaatggtaacaaccacaacatcaagactcggcccccaaagttttacctggaaagaagctgtaattgagctggacttaaacttccctacaatgttgaggggggaatgacatccaaaaattttgaggggggcatatttgtgatctaagatttttatacccagctgagatgtgtttttttgtgtgaaggatactgtcatctgagatttgtgagggtttgaaaaatatgccatctacattcccttcaagaaaatgtctctttctgaccaagagatgaataaacattctgaccctgaagacaaataagtcattgtcattcctaaggagataaccagatacagaacaacagtcatgaagatattaatcagagttgtagatacaatgaacataaagttggaaagcatctagatagccagccttgggggcgggggtgattctttacatgatgaactggttagagttctttggttataagcaattggcaaaaaaaaaaaaaaaaaaaaaaaaaaaatttctagactaattaaatcaagaaaaggaattggtcacacttttaaagaaagatgaacacagaagcctctgaaagcacttgagctgggatcagccagggactctcagtggtaggagtgctgagacttgtctcttttgggttcatctagtgactgatctattgaagaggcaggccttggaaagagaacttgatgagctcagctggtgccacatgccactctttggcccgacacttccctgggagcagcaggctcatccgaagctcctgaagtggggcggggcagctgtctatccacacatggaataggaaacagcccttcaaaacgaagcttaccaggtattgttaatgccattggaaaatgcctggctgtaatatcagcacagagaacgtgatagacagctgtatcactagaggttcgtatgggcaaaaggcaaagaaaaacaacggcaaggaagcatgtcagaatgttaccaagggcttgtctgtgtgtgatggcatcatggatgactttttaaatacttaacctgtgatgcgcatgtattgcttttataagcagaaaatgaaaacctgagaaaatggtcattatgaagacagaaacatgagggaactattttaggttatcatgttacgtgaggaatgcggactttagaattaaattctgtgattacacagacattgtgactacgartgtctatggatccaggctgatgcaagcgtgcagtaatgacattttgtggtgggaatgtgctgaaagtgatttttcttttaaaacattttatttcatatttatttcataagctaatatgacagaataaatttatattagttggaagatactctgcttcctttcaaaagcctaatgttggagaaacttctggaaggggtaaggaaggtgtctctagatcagatattttgaaccaggggatgatattatcccccagaggacctttggcactccctggagacattcttggttgtcatgacctggaagatgctgctggcatctggtgtgtggaggcccaggatcctgctaaatatcttataatgtgtatggcagccctacaccccaacacctaaatacgcaaaccaaaatcccagtggtactgaggctgagaaaccctgctctctggagacatttttacatgtctgtgatttactaacaaaaatcccactgctcgtatttgtagaaatgattccgtcgaactgttctatcagtccttggtcagaacaaggataaagaaggaagttggtggggcgtggtggctcaagcctgtaatcccagcactttgggaggctgaggtgggtggatcacttgaggtcaggagtttgagaccagcctgggccaacatggcaaaaccccgtttctactaaaaatacaaaaattagctgtgcctggtggcatgcacctgtgttcccagckactcgggaggctgaggcaggagaattgctcgaacccagggttgcaggggtggtggaggttgcagtgagcccagatcrtgccaccacactccagcctgggcgatagagcaagattctgtctccaaaaaaaaagaggaagtcatcatttccctagttggatgttgttttccagatcggaacttccatgttgtaactccagtctcttttctccttytgaccttgcaggttcatctgcagaagccagcggacgcctctgttcaacttgtgggttacctggctcatgagaccttgccggcgaggctcggcgcttgaacgtctgtgacccagccctcaccgtcccggtacttgtatgtgttggtgggagtttggagctcgttggagctatcgtttccgtggaaattttgagccatttcgaatcacttaaaggagtggacattgctagcaatgagctcccaaagccatccaggtaaggcygggtcatttcttctctgggcacacagcggggctttctttgcccaaagtagaagttcttgtgactgcagcttgctttctggatttgagacttttgtttttcttgatagtggtcactgttggtttttgacagcacaaagtgcaaaatggatggtttattcttcctcttggtgaaagaagaatgataaaacctgggaggatgtggagtcaagtctgcgaccccggtttgcaggctgacttgagaggcacacaggtttcctcgatgctttttgacaagggtgatgttgaaaggtcaggttgtgatgtggagagctggtttcttgcccagtgtctttgttgtttcatgaggggttgtgtgaggggtgggagtgctcctccaactgggcgtctgggctgtctgggaagaagctcatgttcccactgaggtcgtggccacagttgctcctggtgtttgagggcctctgtgaggggctgcactaagcattttacaagcatttagtacagccccagatcatctcaggcctggagggaagaagtaatttgcctgaggtcacagagctggtaggtgggggacccacatgattgggaagcaagcttgtcctgctctgagcttcagaagcatgtcatgggcccatccatttacgacttcacactttctgtccttggaaagtcaccgagagcgtgcaccataatgaaacctcgaggcctgccgccgacctgcctgagtgtggggctcctgcagagccagtcctgtgctgcccagcttcctgccacttccagcgcaccgtggccttcaagggcacttagccatcgacttctgtcttgcgtccacatgagagagaagacggtggccactggacagacgcttggacaggcacctgaggctctgttagccttggctctgggtcctgctccttagagcagaggcagagaggctcagggtctgtctgggtcactctctttgagattgccggaacgcttacacacatctttccctgggtggaatcgtctttgtctgaaaattccagagggcaagattccaggtttttttagatatgaaagttttattgagttaaattgtttatgtattgactgatgtaaagaaatggtttatgatcattccaagacaaaattaagcgctatggctcaaagtgtctaaatagacattgaatggagctggctctctccctcctacactgggctgctgttgggtgagagtgtatcttttttctgtgtctaaacatagtgtgatgtgtgtgagcattttcatagagtataattctataggcagggccctgtgttttacattctgtccattttaatgtgttataagcatcttttggtatcagtatgtgtgcaaatataacttgctcttttgataccttgcgaatggatatttatgtggttgtagcagtgtttataccaattccaaattggcatcaaacaattattatacatatattttgtaaacttctaagtatcactactagacaaattccaggaagtggaagctgggtcagtgagcccgtgcacttaaaacatcattaggttgactgtcaaattgctccagaagcctcgttccaactgatcttcctaattccagtgtaagaggatgcatatttttcatttgtgctgtaccagcactgggtaggttcagtctctctcatttttgtcagtgtgctatgggaaaattattgtttgagtwcacttgattattttaatgggggtgcatatttttgtatgacttggtgtacacataatcataatttgtacatgctctgcaggcatttgaagagaaagtatgctcttaggattttgtttcagtctaaagacgtctgtatgtatgtatcaatattgtatttaaagttctcggccgggcgcagaggcccacagctgtaatcccagcacttcggaaggtcagggtgggcagatcacaaggtcaagagattgagaccattctgaccaacatagtgaaaccccatctctactaaaaatacaaaaattagctgggcgtggtggcgtgtgcctgtagtcccagctacccaggaggctcaggcaggataatcgcttgaacctgggaggcagaggttgcagtgagctgagattgcgccactgtacttcagcctggcgacagagcaagactccgtctcaaaaaaaaaagttctctcatttatatatattttatttatatataggaggatatgtatcctttctttatatgttgttttaattatatattaactcagttgagttatttaaatcagtatagctttacttatttttttctgtctgctcgatttcttggaaaagtgtatttttctactgtgattatagtcttataatattctttttacattaataaccattttttgctttatatagttcagtgtttttttttaaagcttaaaaattaatgactgttcttttggtagatcaggtctcttatcaaaatataatatatttctctttgtttaatgtttctttgaccgagagcttatagtgtttcatgaggtatttctacccttggtttcttttggctaacaaatatttctccatccgcttgtctctaaccttttcaggccgggttctttgaggctcagctctggaaaccgcggggtgctgggtttgtttggccttttctgtgggaatttcagccgctgcggttcagtttgatcaccggcctgcccgggcctgtcctgcccatgtgagttgggttgtgtgcgccttattgccacccacgacctctccattctctctctcagtgggttggaggctgaagacaggccgcactggtgagggcagggctgccccttggcccagcccattctctgctctccatctgtgcagggggtacagctgaggtggtttgcctggggcctgaagtctgctggctgcctcctctgccctgtccgctgtcatctttccctgccgtgtctgcccttccgcccggaggtcccttgggaggcaggaccccttgtgcccaacacgtgcataccaccacctgcacacactggctggtggcccagcggcctctgcccacgtctcaggcgggggatggggcttgcccagaaccgtgccctccctcctgggcgaggcccactcgcttgtgtgccttcccaagcagctccatccccagagatctctagtttcgggaagttcctctgtgtttcttgtcagctgatgcacctgtccgtccgctcccaggcattgctggaagtgctttccaatcctgcttttcatcattttagtgggttttgggaggaagagaaatcattaatactaaaggattcagtttgctctcttgagcgggaaatttctaggtgtgtcagagcacagccacggaaccgctgtcccttttccttgagccgaggagccgagtcctggcaacgtggtgttcggggcctacctggctgcacctcccctccctccgtgtgtctctcgtgccgtcctctgctagctggccctgtccttcgccctgcccacccggctcactcttgcctgcctggctcacccttgcctgcccatctggcatgggggccctgctcctgtgtggcctggtgtgggtgcccgtgccgccctcactccctgggcaggccgggctgggggagtccagccgcccatgggccccctctcacatttgtcatgtgacttggctttgccctgctgatgaagtgcccttctagtgcagtgtgtgtggctttcctctcctgtgttctgtgaaagtcctctgctgctgggtgagttttgtgttacggttttattgctgttcccgctgaactttgccagagccaggccctggttctctgacgtcaaagctgcttaactgttgggattttattgctctaaagaacgatttctaatgatgtgagcggcctgagggaagaacctggattgacttagcctggaagggctctcctttgaaaggaggccctggagccttacgccccttgcccggccagccctccacaccctccctgaggggatgcgctgtggcagggcaggatgcgtttgtcaggacacagagcctctgccttgaagccagagtccctggcatgaaaccrggagtgtggacggaaagcccacgggggcctgctggcaggacaagctacgcctccttttttttctcccattcccttgttttcctccaaggacagttctccaagtaactgtccttgtctttccttgtggttaagggcttaggatactggtgacttgactggccagcaggaaaggcagacgttgttacttggccacccacttaacactaccccgtccctccagtgtcatttactttcccttccggaatgttcgtgcctagagaaagtcttgcccagaaaagttctcagtgtcaaggagccccgcagtggatttgctgggacgtggatttgctgggacgtgtctgtggtcagcgggatggtgctctcgataggaagcagtgcatttgctgggacgtggatttgctgggacgtgtctgtggtcagcgggatggtgctctcgataggaagcagtgcatttgctgggacgtggatttgctgggacgtgtctgtggtcaccgggatgatgctctcgataggaagcagtggatttgctgggacgtgtctgtggtcaccgggatgatgctctcgataggaagcagtggatttgctgggacgtgtctgtggtcaccgggatgatgctctcgataggaagcagtgcatttgctgggacgtggatttgctgggacgtgtctatggtcaccgggatgatgctctcgataggaagctggttgagcaggcagtggtcggtaacttgagcatcctctcgctcctggaatcttggtgcgaggtacggataatgtttagttcaaaacaaaataagtggccgggtgcggtggctcaaacctgtaatcctcgtgctttgagaggccraggtgggcagatcatttgaggtcaggagttcgcgatcagcctggtcagcatggtcaaaccccgtctctactaaaaacacaaaaattagccaggcgtggtggcacgcgcctgtagtcccagctactcgggaggctgaggcaggagaatcgcttgaatccgggaggtgaggttgcagtgagccgagatggtgccactgcactgtagcctggccgacagagcaagactgttgtctcaaaacaaaaaaaaaggattttgtgggaaacgtgtgtaacttaagatcagtgtgttcatttgggccattctatgatttcttaatattctgttcagtctgagctacccccatccacataaaagcagctaaaaagtctctgtccacaatgacttggtgatgagtgagttcatggtaatacagttgcttcagaccactgttgagtgttaaccctgtgagtccagggagaaggctctcctctgggattgcttccagtcctcatgttctgctctaactttatttgatcttgaatctgtttattttaactattgtggccgccaagattattatattttaatatagaaatgatccataaagatgcatttttatggcatttaaataatgctctgcagtggttgaatgtctcaggaataccacaaagtgtctgtgtgtatgtgtgtgttagagtgtgtgttagggtgtgtgttttagacaggttgtatgtgtgtgaatcagggtgtatgtgtgttagggtgtgtgcgtgtgatggggtgtgtgttttagacagggtgtgtgtgttagggtgcgtgtgtgtgttttagacacaatgtgtatgtgttagggtgtgtgtgtgttttagacagggtgtgtgtgtgagagacagggtgtgtgtgttagggtgtgtgtgttttagatagggtgtgtgtgagacagggtgtgtgtgttaggtggtgtgtgtgtgttttagacagggtgtgtgtgtgtgagacggtgtatgtgttagggtgtgtgtttagacagggtgtgtgtgtcagggtgtgttttagagcgtgtgtgttagggtatgtgtgtgttagggtgtgtgttttagacagtgtgtgtgttttagactgtattaagatatgggtgtgtgttttagacagagtgtgtgtgtgttaaggtgtgtatgtgtgttttagacaggtgtgtgtgttatggtctgtgtgtgtgtgtgtgtgtgtgaaggtgtgtttgtgtgttttagggtgtggtatgtgttagggtgtgtgtgtcttagactgtgtgttaaagtatgggtgtgtgttttggacaggatgtgtgttaaggtatgtatgtgtgttttaaacagggtgtgtgtgtcctagactatgtgttaaaagtatgggtgtgtgttctagacaggatgtgtgttaagatgtgtgtatgtgtgttttagacgggtgtgtatggtctgtatgcgtgtgtgttagggtgtgtttgtgttttagggtgtggtatgtgtgttagggtgtgggtgtctgtgtattaaagtatgggtgtgtgttttagacaggatatgtgtgtgttaaggtatgtatgtgtgttttagacagggtgtgtgtgttttagacagtgtgtgttgggtgagtgcatgtgtgagatgggggtgtgtgtgtttcagacggtgtgtatgtgtgttagggtgtgtgtgtgttgggtgagtgcatgtgtgagatgggggtgtgtgtgtttcagacggtgtgtatgtgtgttaggatgtgtgtgtgagagtgagtgcaagtgtgtgagacggtggtatatgtgtttcagacggtgtgtatgtgtgttaggatgtgtgtgtttgttagagtgagtgcacgtgtgtgagatgggggtgtgtgtgtgttttagacggtgtgtatgtgtgttagggtgtgtgtgtttgagtgcatgtgtgtgagacgggggtgtgtattttagacgatgtgtatgtgtgttagggtgtgtatgtgtgtttgagtgcatgtgtgtgagacgggggtgtgtgtgttttagacggtgtgtatgtgtgttagggtgtgtgtgttagggtgagtgcatgtgtgtgagatgggtgtgtgtgttttagggagtgtgtgttttttagacagggttgagagtgttgttttacacagggtgtgtgttagggtgtgtgtatgtgtgtgttagggtgtccgtgtgtgtgtgttgggtgtgtgtgtgtgtgttagacagggtcttgctgtcgcccaggctggagtgtggtggtatgcacctcagcctcagcttcctgggcttcagcgatcctcccacctcaggctcccgagtagctgggaccacctctggcatgcacctctgcatgccaccacgcccagctaatttttaaaattttttgtggagaccgaatctcaccatgttgtccaggctggtctccaactcctggactcaagcaatcctgccccctcggcctcccaaagtcctggattacaggtatgagccattgtatccggccaggagtactacaaagttttaaggggcagaaaaggaattttgaagacctgcaattaacccaagaccttgattctgagcttctggtgacaggtgggttgcagattctgagcatggcccttgctcagaaacaaggtggcgggaggtaatgagaaagcctgggagctgagagtggctttgcaggaggcccaagagggctcccaggaggagggggtgtgtaggcagcaggtgcagccagctggcaggagtccaggggagcttggacaaggtggcagggcctgagagcatgcttggtgccagctggagaagagcttgttcatggcccctgcggtgggcagccctgggggttctggataggagggagtgagattgaaccccgagaacgtgggagagtagaccagccctacatcaactggaggttttagagaaggacaacagaaatgcctggatagttccggctgatgttggggtgggagatgcttttgatccccatgtactgcttgcttccgctttctaaaggcaaggtttcaaaaatacttgtgtacgttttctgacgcacagcaccgcctgtctgaatgtgcatcctcccagccacccggcacggggcgtctgcagctctcagattgtcactagcctggattctccatgccatcattatctgggatcttaatcagtcaaggtttgttctggaaatcatgtagacataaggacttatttttcaacctacttttttttttgatcctcaaattgtgttttgtcttttaaaaatcacgagtactcagtcattatgaagagctcagaaaattcgctgtcaatggagcattgatggtttgttttggcaattctctgaaaattcttacacagtttgtggaacatttgcatttgtgtccctttttcaaagccactattgtagaaatgcaaatttctgagttctgagatgctgaatgttggatgattaatgatattgaaatttaagaatgaactcccggtatgtatttgacatagaaaacgcggtgtgagaatcattagaaaccattgagcacagcttggcggggaacagaaaggctgtgattgaggcacccggcagtgggggcaggtcgcacgtggacaggtgtgcaggtgcgtggctgcctccgggtgccaggctgtgtgaggcgggagctactgccatcaaaggtctggctctacttgaccataggtgttcaaaactcatcataataatacatcagccttgatgacttgcttgctcagtcaaccccactgcgcgtttaagagaacgaaatgaacagcaggtttgttctgagttttgcttgctgctactccatttgtgcttgcatatagcctgtgacgtgagctggacacgttatttctgttttgtagatgaggaaaccagtgttactgctatcgagtgcttaggtaggctgaggctgggcagcgcatcagaggccaatctggcaccgctagaatcggtcaccttccctcaaggagtgtgcgcctctctgcggcagaacactgggcacctgggacctgagaggcattgagcctgtctgcttgtgtgagctccctggccagggcaggcagggcaggcagggcagcaggcactctggtccagtgtggttcatgccacgagagggatgggctgggcatggaagccccctgagggatgtggaggccaagggaggctgtcccctagaaaggacctgaggctgaaacagccttgtgaggagggttggtgggcctcccgcaggtcctgccccgccggctggggccctgtcctgcaacgtaggcttttttgtgtcccagttggtttcaacgagcatgggttttgccatcagggaacttcatctgtccttcctctgtctttttgtgaactttctctgagctctctttgccggtccttagaatgttgggactgaaggagtgactgggtgattggcataaccaagcgaactctgagatttgggctgaaactttcacgttgtggccacttagcatccttctctttgtttatttcatgagaacatggcaaaaaatgggcactttggggaaaattataatgaaaattacagttaattttaagaaattaaaattaagacaaaaatcaactgaggcatatacctaaacttttttgaattatatctggccctgagcttttaaactggtttgctttcagccacctaatcagtaagacactgggagtgctggcccttcaggagtgatacgcattggtggggatggaggccttggggcgttattttcatgtttgcttctctctccttccccctttttaggaaaacaaatacaaatagaaaagataaattctgcctctcagggagctaggcacagctgatttggagaccgaagcccatagccaggcctttgggagcccccttgacagtgtaggcggctgtttccctccaagacgacgctgggcctgcgggctcttggttgtctgtgaggatcctgagcccggctggcttatggtggctttgttctcactggaccccaggctccctcatctccctcagccctcactgtactctcctccatctctgcccagtgtccccttgctgcctttccttcagtgctacaacacggactcaggacccagtgtggttccatgctgacgggcagctgtagagctgttgggatattaccttgaaacacagtgttcaggatgactgtcatttcctagctttcaccaagactctgtactttcaaaaggagtagtaaaacttattgtaacgtatttgtttttttcaaaatacagaaatgacctaaatgtacttatttttgttccatttgaaatagcatttataaagaattaggacaagttggtctgtgtgtcttagtgttcattatttagtgatggtcattaactgggggagttttttcttttctgtatacaactacattctcaaaggttcaaattagctctttgagtttgtattcacttgagatgtcagaatttgttattatgaagccactgtcttcagagcctttccctaaaagaagttttgtgattggagccagttttttttttttaattttaaattttaaaatgcttagaccattttcttagaagattgcttccataatgtggttgtttaggtgatgcctttgttcgttcagcctgctatcataaaataccttagggtggatgatatgtaaataatagaaatttcttgctcacagttctgggggctgggaagtccaagatcaaggtgccagcggacttggtgtctggtgagggctgctctctgcttcacagatggtgccttcttgctgtgtcctcacctgttggaaggggtgaggggtctcacttgaacctctataataagggcactaatcctgttcctgagagtccataacttaatcactccccagaggccccacttcttaatactgtcacattgggtattagattttaacacgtgaattttgggggggacgccaacattcagaccacagcagctgctaaagccaagagaatacctttcattataagagctaatggttttctttcaattagtttgcattcatagccaaaggtattcctttttaaatacctatgagttttcctaggaaatatgtagaaattggatgcttattaacactgtgtttctcagtgacttgttgattcagtagggtttgtgaaatgctgttggagtttcaggcaaggatgtggagtctgttctgagcacactcagggtttccatgtgttgtcctgaaagcctttctcacctcttcacatctagggtaaggccgtattgaggggaagttcctccctccctgttaggtagtgtgatgcagaattcttgacactctttgttttcacatggactgaatccaaatcaggtgggrctgattcttccagccctgtctcctcatcccggtctgacactgcacaacacaaaccttcctgctgcaggctcaccgaggtgctgcctggccctgtctttgcctgaacacctgcagtctcaatgtggctgtgcgggagcaaaggcggccttcgccccacgtctctctcrtgtgcttccatagcactgccttgtttttgtgaaaggatcggggagggaggaaggcaaggttaattttttctttctgatgtactagtggataaaaagagttctagaacatttgaggaggccctaggggaaactggagacatggaaagcagaggttttcgttggtaaaccagagagatgaggagttttagtttttgtagtgcccgatgcattgtacgtgttgaaagccgagtccttgatggtaatggtggctctgatgatggtggagatgggaggttaggatccccttagagatgtttagtgggtgctgcagtgagcccagttttctgagtgacagggactagggtgtgactgctgaagagggggccagatcttcagtgccctttatctctggtgggcttctcatccttggtcttgcagcatcaggatggggccagggtgcctggcctggaggggtggacttgggccgaggactgcagggcacagatgtcctctcagtgtggccctcagcayggggagccctgtggctttgaagcagatgcttcattcaaggcaggtggttcttttctgaacacaaacatacacgtgagcatccccaaaggctgtttttgagagatggtgtgtgtctccatgtccaggctgttgtaacagratgataaggtgcagaggccatctgacagctggaagggtacagaggcatctctaagcagcagcaccgatggagtacccagcctggaagtgctgacaccccaccatggtcctcctctgtcccatgcagcccagcctttaggagatgcaccaacaggcatttgggtggcagactggagctcagtggggctgcccccactggggcccctctgtagcttctgagaacagttgaattgtctatctgccttcacatctatctgtgatttggttcccttttgttcttcgccagtcctcagtaggatttggtaagacgtaatttctcgatggttcaggaagacgggtggggctgtgtccatgcttgcacagcctactgtgaacagctgagctcactgccctgtgactggcttggtgyagctgaggctcagggaagagctggggtgtcctggggtgagggagcagcagcaccagcaggaccccatgccccaactgctgcagggaccatyctggcctgaatgtgttagaaactaggagggtatctggggtggggacacatcccactcttcttgctttgtgttcaggcccccagcctctttctgtcatgatgtcttgatgtctccctactcagctgctagcacttctgctgagggaagcagtcacaaagsccggtggccctggcctgagcatggatgtggctttcttggttcttggctgcggtttccttgaactctctgtggtctgcaggacctgatgcatgagaatcacatgtggggagggtgtttcttgtgtttatcagtgtttccatttctttggaagttacctggatgctgttatgagtggatttggtggactgatttgcatgggtgtggcctcaaggactgcattttctaaggagatggtgtttttaatgccttagccaggagattgcagggggccgcgggccacatgtgtggttctctgggaagattctgctctggagctctgctgagggatgttatttcaaacttcagtactatcttcatgaacaaaagaacaacgtaggtctccgttgagttgctcacatcacccgagagagcatggctttggtgctcctcacccatgtccagatcagagcatttaggcttcacctggggaatggacaggggcaggagctgggagatcactgcccaggggtggctctgtgtccggggtgacctggactgggcccattgcctcctggggctgaggttgcttcctttcatcgggccctgtttctttagaaagatactgggctttgacttttgccttctgtcggcacctggccctgcagctgatggaaactggcagagcaaaggacttcactgggacagtgagcagtggggcagccctgtgtttacaggcaaccccagaccctcttatgacagaaggggagggcagggcagccggccttcacctggataggaacagcaggtggctgatgtatctgagttggtatattcattcagagacattggttaaaattacttgtcaatataacatctttaccattgttttcttcaaagccagattctgtattttctgattttatgtaaactaaatacatagttttcttaaatacagatgacctctgccttcacagtttctttggatacctttcaagtcagtttaacacacatgctctccggaaacaaaactcagccactggggaaccgaacctacgcttttggtagaatctcagccttggggggagcctggaggccctgagccctggatgacacctgctctggaatcctccaccagtggcttttgcaatgtggttggtggctgaatctcacttctgccttggatgcttatggaatcttctggatggactgagctcagaatctcattgaatactgtggtcctctcagtctgaactttgtacctaaaaatccacgggaatctcatagcagctgctgaggatttggagaactcccttagaaaaataaaaggaatttattttttcctattttatgtagtggctatttaaattttgaacatcaaatggtagttttggattttaaaagctcagtgtgaataaactttgagctcagatgcagccgttcttttagtgtgtcaattttaataggtgtcatttgatgtttgcactagggggttggacgaaggtcggtgtgagaatctcagggataactgggctgctgcaggggtcagacaaggcctcctgtaatagggattttggggcactgatggaatgaagggaagcgggaggagagggtaacgagtagaggctgccgctgccccagttgtattagagggtggtgagggacgtggtggatargaagctgcatgggcctccaggaactcactgcactggctttgagtcgcgagagaggtgccacgggaggtctagaaaccgtgcattttgggactgagataaaacacgtccagctggtggcacagaccaagccagctgggagcggagttgtctctctgtgcttgtctggagtacctgcctgtgctctctgagcagcctctgcacctggctggtgggcggggctgagcctcaccttcaaggctgcagattccctggctttcggtgtgctgggggatgccttctgcatggcctggctttcctgggatttcyagaccagatccacctctttctcccctttttctttgtctttctgcccccgaagagatagcagtgtacaaaaacaagccagcatttcttgttctcttgctatttgtaattgtcccgagcctggactgggtccagtccgctcatttattctgccagggcccagtctgcagatctcagccgaagccggttgtcctgcctggctcgctctgttcctggaaagctttgtcacgcacagccaggggccactttgggtgcatcctgtctcccccgtcgccgtatgtttgggagcagaagttggctctggtcagatatgtggatgttaatttatcctcattcttggaagcaagttgggagctcagaggaaaggaagagccacaaaatgtcaaacccagcagcggccatctgactcggttgctcatcgctataatatgtgattaagatggaagtgtttgatttcctcgcttgccggatttaggcctcattttgcttactcccgtgagtcctgatttcttcctgttagagagaggaagtttgcagcgataaccgacttgcagtggggttttctgtgaatggagcttgtattggtgcgatgtgtggcgtgggagtccccaccggttagtggcttatgcagggtgtgagtttctctcaaagtggacgttttctgccttcccggagccaaaacgtttatttcgccggtgagtacagctgagtctcacgtgcatctgacagcagtgtctccgagccttgccatttcctccactccctcccttggagccgtttgtgtgacaacctgctgttcagtaaaaccagtttagtggagtgggtgtgtgttaattctagtccatgtgtttaaaaatcaattcatatgatgagaatggcactttcccccgtggtcttcctctcagtaacccatagccccagtccaaccatgggaaaaacatcagacaaattccagtagacacccttcctacagtctactcttgccaggcccactcgatatgccaaggtcatcagaaacaagcatcctttgagaaactgtcaccaccaggagggatctcaggacatgcgacacytaagtgtgatgtggaattcctggatgggatcctggatggatcttggaatacagtaaaagacattagtgggaaacttcaggaaatcctaaactctagaattttagttaatgacagtaatgtcagtattggttcccaattgtgactaacataccgtagtaaggtaggatgctaataatcgcggggaatgtgcaggtggtattggtagggtatatggcagctctctctactgtctactcaagttttaataaaatatgtcaagaattttgagttcacaaaatgaagtacatttatagatactctcttttgcttaatgtttgttcatgaatggctgtatactgtagttactttagcacctarcttttacagtttttcctttggggactcttttttttatggttgtgcatggatgtggtagagtaacttaacaagtcattgttggtggacagggagtttgttttcagcctttccattgttgttattataaacatgtagccttgaagaccgccaatgtctaagtgaactttttaactgaagtatcacaggcatccaggaaagtgcaagaatcatgactgcttagcttgatgaactctcccaaaaggaagatgcctgtaactgctacccagattgtgaaatgggacatccyaacacccagaagccccgtatatgtcctctctcagttactgtaccctcactctcacaccctctasataccacttctctagcttctaacatgagtttctcctggttttgaacgtcatataaatcacgtaatacttattcttattgtctggattatttcacttgacaatatgttagatttattgatattgtggcttatagtagtagtttcttcatttaatgggtatataatatttcattgtatgaacatatcacaaattatttattggttcaattgctgatgacattttggtggtttccagtttggaattatgtataatgctactgtaacattcttgtatatttcaattggttcatataagtatgcaattcttttgataaggtgtatgtgtgccaaacagttcttcaaattgattgtaccaatttacactctgacctatagaatgttgctctgtccttgccaatacatggtactgtaattctttttcattttaactattgtagtttcatttgtatttcccagattactaaaaatgttgaataccttttcatacgtttattgaccaactagatgtcatctttggtggagaagtttctattcatttaagaaattggtttgtctttatttttcttactgagttgtaggagctatttctgtacactggctatgaatgagctttttgttgtttgttgctattttctatgtgtgtgctgcgttttccctttcttaatggtgttttttttttttttttttttttgctgaacagatgctcttaattttaatagtccaatttaatagttttatctatgcctatttgaagatattctatattatttttgataaacttcattgttctatcactcatttagatctgtgatccactgggaatttttttttttttatgtgtgaggtagggattgagagttacttttccgtttggaaattcagttggcctaacagtatttatttaaaagagtcatcctttcttctctgctatccaatgcaactttgtcataagtgaaataaattatataaatggatctgtttttgcactttattctagttcattggtctgtttgcatatctgtgtaccagtgcaacactgtcttaactaatagatttgcagttaaccatagtatctaataatgtaggtcttccaactttttaaaacttttcaaagcttgttttggttctttttagccctttgcatttccatatggatttttttttttttttttttttgagatggagtcttgytctgtcttccaggctggagtgcagtggcacgatcttggctcactgcaagctccgcctcccaggttcacgccattctcctgccttagcctccccagcagctgggactacaggtgcacgccaccatgcccagctaatttttttgtattttttagtagaggggggtgtttcaccgtgttagccaggatggtcttgatctcctgaccttgtgatccacctgcctcggcctcccaaagtgctgggattacaggcatgagccaccacgcccggcctccatatgaattttaaaatcagcttttcaatttcaacagaatacctgctgtggtctcaattgggatccactgatttgcatatgaaatcagtttattaggagtcttctaatctacgaatatgctacgtctctctatttttttcgagcatctgtaatttctttcgatcatattttgtaattttcagtatagaggtcttagtttttttttatttgtttgtttgttttgagatggagtcttgctctgctgcccaggctggagcgcagtggcacaatctcaactcactgcaacctccgcctcccaggctcaagcagttctcgtgccttagcctcctgagtacctgggattacaggcacatgccaccatgcctggctaattttttctattttttgtagagayggggcrtcaccatgttgatcaggctggtctcgaactcctgacctcaagcaatccgtcctcctcggcctcccaaagtgctgggattacaagcatgagccaccgtgcctggcctagaggtcttttatttcttttgttagatttacttctaggttatgctgttttgttgggggaattttatttttgtaatgtttagaagcacaattcatttttgtatatttgtcgtgtctccagatacctcgcacagtgtttattattatactcattatctatatattcttttgggtttttaatgcatattgtctatggacggtgaatgtttcatttcttctttgctaatttttaaaacttttatgtctttcttgctttgctgcactgcctaggaccttcagtcaaatggtaatagtaggcatctatatcagtcattggtagtagtaggcatctatgtcttattctaatatcaagagaaaaatttttagtatttcatcattatagataaaatttgctataagttctgtgtagtccatgagatgaatgcagtttacttttgttcttagtttgctgagtttttctgataagcagctgttaaaatattagatggagtcatgtgaaattgcagatatttgatctttttccatctacaaaaaatggtattttcatttggttcaacttaatgtattagactttttctgcatctgttaatagtcttatgctttttttctttattttattgtgttgaattttctgattgacttgaatgttaagtcaaccttacacttctgtaataattattataatgtgttattctttttatatactgttgaatttacattgcttatagtcagtttaatttttatcatctaaagatatgagattgacgtgttattttttcttgaaatgctttgtcacattttaatattaaagttatactaatctcttaaaatatgaagttgctttcttcttctattcctaggattgccaaaatttttctgtagagagtcagtaaagacttcatgctttgtggaccacatatggtctctattgcacgtttttttcccttttttcttttctttcttcttttttttaccaaccacttaatgtaaaatcccatcttatttttcaggttatataaaatcaagccacagattgtacttggcccatgggccatagtttgctgacacctgtttgattttcttgaagagtttatgtaggaaagatgctatttctttcttaagttgggatggatttgcttatgaacttatcttggagttttctttgtgggaagatttgtaaattacaccctcaactgatataggactgtttagatttttaagattttcttgtgtcagtttttgtgtgtttagtttttcttggaattttttacattccatctgcatcttcaaatgtattgaaataaagttgtttaaataccttctcattatctttgtaatgactgtaggatttgtagtgtcatccycttttaaattcctgatattgtttrttctctcatttttccttcattggactttgctaggagcttatttattatattaatattttttaagaactgtgtttggttttcttgattttttaaaattgaatttaaaaaaataaatttctgttcttattgctattatttttgtttttgggatttaatttgctggggttgttgtttttactgattaaggtaaatatttagatcactgatttttttttttcagactttcttctgtaatccacgtgcttaaaactataaatttccacctatgtatggctttcgctagattatgtgagctttttaatgtcattttaattataatttggtttagaatattatctagtttctttttttgacttgtgttaattagaaatatatttctaaatttcagtgctttatgaatttgctagtattttgctttcattttgttattgatttctagtttaatttcactgtggtcactcattttatgtaatttcagtttttagaaattctttgaattttgctttattgattatatggtcagttttgtcaacattttatgtatacttgaagagaagaagtcagccgtggagatttgccagttctacatgtccatttaatcaaattaatcattgtgctcagatctcctgttatctttactattttattgtctgcttttctgtcagatagtgggaatggaatattaaaatccccctgatgtaactgtggattggcattgtttctstttttagctctgtcaggtttagcctttgtttattttgaagctattttaagcctaggcagatttagaattttatgcataaaattattccataaaattggaataactgcctttttgttactgtgaaatgtccacctttccctcttgtatcccttcttacgctcaagctgcggattctgtgaggactggtcaggtccgtgttgccctcactcctggcacggggctctcctcacccccacgctcagtctggcgttcgtttcccagggtccgagccgtccggtgctgctccgctcctcagcctctggaggacacgcgggccgagtgtgccctctttccacctcccttctctcccaggcctgggctcctcgtgcatcgccgtgttttagattgcatcctgtcctctgtgttcctggctggagggttagtatggcccgctgtagcccagagtggaagctgaggtttacctggcagtccccgcacggtgggtccagtgcagccctggcgacgtgtcattgcagttcgctcacctggcccgtgtgtgcttcctgaaggcttcccccgtagaactcactatctgggcggcttagttcacgagtcccagcttgctttccaggcttgcattcatctttatgttgcagtaaaataactgttgggcatattttaaagtggactgaaatatatctgcagccttgagcagctcttatagcacttttattcagatattttatgaggtgatttatgtcgcaccttataaatgctctaaaatctccctgaccagaaatgcagtgggcagggccaccccaccccttcctgcttgtcttccctcccccatcctgcctccttctcgtggcttttaccgttttcccctcgaatatgaaggaagaattcattccagatttagctttaggaatcatgtgcaggacgttgagtttcgtgccatcaatgtcacgacagtgctggccgcgctttgctccgatggcccatcagccccgcttcctcctgggcaggctgagagcttcacttggccgctctctcagtatgtcctctgggctgtattcaggcatatctgccttcctccccactccgaatttcgggcagccaaggtcaggcaggttgggaatgcgcacgcacagggcagcaggtctgtgtcagcagcgtggcatgtggggctggggtggcagcacagcctgtcctcttcagtggcctttttgggatggagaaggctgagggtgagatctcttttgccacattaaaccaaagtggttgggttacaaataccacgtttagtatactacgtttaaaagtatattttattcagtataattgctcacttaaaacatttaaagataaatatacttgtattgacacattgaattacagatagtctagtaaggaagccagcgatttttctccctgtagaaggccaggcctcatgaccaggggatgttagcattatggggaagcagccattttgtttgtcagaatcagcatcctcctctgagataagaaaacagagtgtgaaggttggctgacctgtgccacttctgccacgtggctgccttcaaccactgtgygcggtcactggcagcctgttcagtgttggtggagaagagcttcttggagcggaagtccaggccagtgttcggtggggccagagttcaggtgtccttggtgagccacactccttcctgtcgccctcttgcagtcctgattgccaggttgctggctgcaggccccagtggccctcgctcaggcctttggaaccaggcagggttagcagctgccactccctcgcggggtctcctgtgaggcatctcttcctttggcacagggtccccctggggcctggttggacctccccttcccgatgctcctatggaaagctggcagttgggccacttggcaccactcccagtgtccctctggctctcctgtggctctcccatggctctccaggcagctgtacctggcctgcatacggcctccggccatcggctctgtggccgctgatccaggcccctacaagtttgattctgccccgtcatctcagtgagacaggcacagcctctgcagcagcagcttgggcttggagggcaggggccacgtcgggccagcagctcctctccagctttctgcacacccctcctcccaccaggacacccctcctccttgctcccccattcctgctccggctgggggagggaagctggcatcacacagacacccgtggccgcctcccactaggcttctgctcccttctctgagacatggggctcctaagagacttcaccttatagggttgtcgtgaagatccagtgaggcaggcacggagcccagcgcctgttcctgcccagggatgtcagctgctgtcctcctgttgggatccagaaccctttgtagcccagcccaggccctgagtgtctggcaaggtttagtttagtcagccttgtcagactcatgccctttttgataaatataaataacctgtgtccttcagtgtttgaaatttcagaataacttggacatcagatcacaaaacaaatggagcacgggtgtctgtgtgatgccagcttccctcccccagccggagcaggaatgggggagcaaggaggaggggtgtcccggtgggaggaggggtgtgcagaaagctggagaggagctgctggcccgacgtggcccctgccctcccagcccaagctgctgctgcagaggctgtgcctgtctcactgagatgacggggcagaatcaaacttgtatgttttacctttttttctcttttggtgatgagtgatggtaaaccataaaactcaactcctgagaaaggaattttactagcagataatggagggttcctgtcattccaataggaggacccgcctttggggtctgcacagctggtggggtcccygtggaccccttctgagtccttctgggagtgggctagcccaggatcggctggtggggaggtagctgcactgggggggatgtggggggttggcattgcaggaccttccatgccgcctgcctccatctggggccaggagttggccctgggctctgcctgtgggtcctgggtgtgctgctgctgcctggtggcctgggcctggaggaaggagctcagcttacactcccagcctttcaggcaggttcgcagcagccaagtggtttcttaaaaagaattcctcctcccttgattaatttctggcatgctgcttcggggagctcttgcgtcagtaaatcgtcataaacccccagttgtctggatcagacataaacaccaagcccagctccaccgctcctgactcttggccagggctggcctgccctctgagctccgggctgggctgctggagataaagagggccagcgggcgcccgagaggtcaggcgtatggctgcacccgacaaagtccttttctcagaggtgccgagcctggcagttcggatgtgtgctgtgctcgctgggggaggatgccgggcacagatgtgatttatttcctgaaatgtttggtgtttctttttcctcccccaccagctccccactctcatggataggatgttttcctcgttgggagtatttgcctccttccagtgggcattctgtaggggttaagaaagatccctgtgtgtgaggcttgcacagtgttacattcaggtctgggaaactcaggggctggacagcaagtacctcactgtccagatctcaaggacagaatgccttacagaatgcttcctgttgctcacagcaaacctcatcttaaggccttttcagcagcgtttgagatcgtcaggaggtcccggactacattcatcctgcccttgtttttgtagaacatttttcatctggggtacccgtgaagaggccagaagcctgggagctgggttccccacagtcctgggttaccggggagcacacttgggccagcgccagggctcctccagggtggctagaagaaagaacttgggcctccagtcatttcagggctgattcaggcatttggcaagtattgattgagcccctgctataggtggatggtgggaatgtgtggctttcagcgtgtcatccagcttacattgctcagggcggggaccagtcactggcagatgtggagggatgtgcagtgaggggccttgtggacagggccaggcatgggcctgtacagacattcagaagaaatggcagccaccccaggcccctggatggtgtgtatgcggggagagcatgggaaggaagactgtccagagactgtccaggggcctctgctggatgttagcttgcagggagcagtgtgggccaggaaccaggcagggcttggccatgcccatgaatttggccagggtgtctctaggcttgctctgggtttccgagggcctgcagggcacaggcacgctttggggaggctgtcaggccctggttctgagtcccatcctgtgagccaggcagtctctctgggaaagccctgtaggcagaagggcagtcccgggccaagtctgggctggctggctgggggctagcgtctgatttcaagattgcagtttcgacttgttttctgcctatgcacataaactgtggtatgaaccaaatttaagggagtttcatgaatgaaaaaaagtccaggctgtctacgataattaactttgtgtgtaaaattgagaaaagacttccgtattgtagctgaggggcagaacagctgagtttcactcgctggacacctgggctctgcagagcaggttctgagggcaggggacctgggccccagtttctgagctgcatgggggtgcctcccaacccctggggaaggggaggaacgttcatcgggccccggcttgccttattcatgccattggctcagccgagccctgggccaccccgtgggaaaggcacaccctccctcccaggtgggtayggctaggctcccagggcaaagcyaggtgccccaggaaacccagctgccagcagagccaggcgaggctgccgccttctgaccccaggctcttgtggcttccttggggctctgcttctcagattctgaaacatttgttcagcgaaggcagttggtgaatcatcctagtcagggtttttttccagaaacaggtgcaccgccagtgagtgatgtggtctcgttcagactgtgcctctcatgcctgcactcatggcctgggaaggtcgtacccctgggcctgttgtgcacttctctttagcagtatgacaggggtgacctctgtgtgcttgggggtggcatgtgaactgccccacaggctcccatcagcattcagagaggcctcaggtgcggtggatgtgggggtctcggaccagagaagcagccagctgctggctcgctgggatgcccatggccccagaagtatctagcaaatcatagagagtttaaaacatactgccatctgttgttttcttccaactccttgctttgccatttattctgtcttgaagattatttcatatcagttaataaagcaatccctgattcttttaataaataacatatttctttttaattcttgaaataacacttgggtgttgtttctgtctaccaacatgtatattaatttctttgttcatcatgcttttttattgtggtaaaatatacataacataaatttataattctaagcattttgaagcgcacagttcagtggcagtaaatattttcccattgttgggcaaccatcaccaccatccattcccagaacgttttcatcttcccgaacagaaactccatacctagtaaacaatcctgtttccctccctctggctgcggcacccaccattcaccattctgctttctcagcgaatctgactcctctagggcccttctgtgaatggacttgtatttgtccttttgtgcgtggcttctttcacttggcataatgtgtcagggttcaytcgtattgtggcatggtcagaatttggttcctaaaacttttaaggatgagcagtccattgtgtgcatacatcacatcttatttattccatctcttggtggacctttgggccgtcttaactttttggccattgtgactaatgctgctgtgaacatatgtgtacacacgtctctgagtccctgctttcacatcttttgggtatataccttggagcagaattgttgaatcctatgataattttgtgcttaatttattattatttttttttcatcccactctgttgcccagcctggagtacagtggtacaatctcggcttcctgcagcctctgtcccccggggttcaagtgactctcgtgcttcagcctcccgagtagctgggactacagacacccgccaccacgcccggttaatttttgtatttttagtagagatggggttttgccatgttgaccaggctggtctcgaactcctgaccacaggtgatccacccgtctcggcctcccaaagtgctgggattacaggcgtgagccaccacgcccagccctgtgtttaagtttttagaaaccaccaaagtgttttccacaacactgcaccattttatgttcctgcccaccacgtatgagggttccaatttcttcacatccgcaccaatattttttattttccaattttgaaataatagtcatcctagtgagtgtgaatggtatcttattgtggttgtgatttgtatttgcctaataattagtgatgttgaacatcttttcatgtacctattggccgttggcatattttctttggataaatgtctcttcacgtcttttgcccatatttgaattgggttgtttgtttttttgttgttgtgttgtaggggtacttcatatgttatagatatataatctgcaaatatctccttctattctgtaggttgtcatttcactctctggatggtgtcctgtggtgcacagaagtttttcattttgatgaagtgcagttaatctgttttttgttgcttggcctttgatgtcatatctaagaagccactgccaaatccaaggtcatgaagactaaccccctgtgttttcttctatgagttttatggttttagttcttatatttagatcattggtgtattctgccttaagttttgcatatggtatgaggtaggggttcaacttcattcctttgcctgtggcaatttgatggtccagcaccatttgttgaagaggatgttgcttgcctttagctgctgtaagagagcatgtgtcttagaggaaagatcttgctcatttctgaagttgtgctttggaagtgtctgagctgcagttgttcttccttcccaggtcggtgtagactctgctcttcctaagccagggcgctgcagccatattcagtctcttgttctttggctcccgtccctgtcgctgcgtccctacagcagcacctcgcccacgcccccttctgttatggcctctccaagggatggcgagtttaacaacaactgaccagggtttccacaggagacagagaacaggctttctgcagcgtgggttcccagttgtgctgtgagctgtggtgcctcgtgagtggggctcttccgaccatcctgtcaccacttgcgtcagagtcctgcgtgctatctgcctgggggtcctgagtgtgctggctgctgcactgaagcgggtgggctgctgagcaggaagccacagcatgccacgcaggcactttggctttgcttggcccctggagagcaaacacataatggcaataggctttacagggagtaggatttatttactttatctgaaggagtttaaaaattgctattgttctcttggcttttaattttcactctcaccagcctttctgttcaggatactgtgcggtgaggacctctttctccatgttaagttcgcactggtgagttgtggcaggattggttttcttgtaggatggctcagggctgtgtttctttcagctaattgtggctacatttttgcctttgcrtgtccaatttgggtttcaaattcaggattgtccaagtactctatgtttgaaaatattttccagagaccccagatttcttatttatgtgcgttagttactttttaattttttcagctgccttctagtttcacaccttcaattgtgctaatccttcgcattttaaaagttacaccagcctttgtcagtgtttcatcagtgcataccgtagcgcatgtggtcccgttcagatgcactttctgtggcctggattctaggggaagcaatagaggatatatttcattctgaaatttgcactgtttcttttttaagttaaatatttcaacagcaatggatgttcttgtctttttttagaaaaaataaaaatgaatgtttttgtggcgcttctgcctgcttgagtggcagcgttttttccctgtgcaggcccccaggtgtgtgtgattggctgccccggggccccgtgacaggggatgctttttgagctctcaccggcatcttcctccttaaatccagattgggcggagacatgaattcagcattacctctcccatgtccacacgtgaagaagcactttccaggcgcacacacctaagtcgttggccgcgggttcttggagggcgtggcctgagctcccagacgcctcctctctcacctagcactgcacagtgccttccacacacaggctctccgaggatctgccccatttattgctttgattttgttggatgaaagcagtttattaaataaatgggaaaatactccccttccccagtttcaaaagttaagatgtagtcttttctttacttaacatccaacaatgctgaaagatgaaagaaaggaaaatgctctctttaccctgccagaccacatttagctgggaggcacacagttcagagaaagtcacaggtgacattttgtagattctcaagcaggagctctctctctttttctctctttccctctttgtctccccatgtccatacctgtacctattacatacacgatagaacagcaatgggatttttttgtagctccgtaatatttcagtatttaaaaatcctctgttaatgggacttaaattttttgtatagtaaataacacctcagcgagcattgttgcacatgtgtctttatgtttggggctggttgttcttatcatgattgttttgttaggataaagtccaagaaacagaactgtggggacaaggggatgcgtgagtcaccctcatcatcaagagtgagccgtttgtggcacgtgcaccccacccactatggcaagatgcctccacacaccccgcagcagcgctgggtttgtctcaktcactgcagttctttctgggcttcccgagaaggaagggccacaagagtctgtccaggtgctggggcagacattggtgacgtcgcttatcgaagccaggagtggggccccgggtgtggggccgagtgacagacccaggctacccacacccgggcaggatgaagagtctcaagagtgctttccttaggctggttcccgtccacacaccagcactcagccagtcaagacacctcttgtgagcatctgctacatgccaggctgctgtaagcactggggtctactggtgaaccacacaggaaaagcccccacccattgccacacccagtgccagtgggaaagtcaaacagtagatgggtaaataaacaactacataatggtaaatatggctggcagtgatggagtctgccctgcacaggcactttgctaagtgttttctacatatttacagctgtgatccccacaacagcctayggatgggtcctactaaccttacatcatctgtattttacagatgagaaaacagaggcattgagaaaggaagtcactggcccaaggggctgtgccaagcaactgactcttaaccagtgagcttgcgctctgaagtgtaaggctttactcccctaaacttgtcattgcaaggcagtagaataggatctggagacagggggccttcacttcagcatccgattggttgcaggctgagctttcacttcagcccctgattggttgcaggccaagtcttcattcgcatagggtgtaacttcactttggcctctgattggtcatgagccaagtcttcatttacatagggtgtaaccagtaggaaacctctaaagggtacttaacccccagaagattttgcaagtgggagtcttgagcagcttgctctggagcttgctcctgctctgtggagtgtacttycgcttaaacaaatctgtgctttcgttgcttcattctttcattgctttgtttgtgtgttttgtccaattctttgttcaacatgtcaagaacctggacgactcgcagtgaagaccctcccccttaacaaccggatgtgccatcagggatagatgctgccctgagaatgatgaagccagtgtctaggggaagtcctggtgtgggcgggagctgtgatgttctgtgctctatggcagggctttggagggctttgactgggccagagcaagtaactataaaatgtcagaccttagaagaaaagcatcctgtactctgacaggaagcagcatgagttggttgtcactaaaaggaagaacttctgagaaccccacaaaggacccagttaggtaattgttgaaagctgctactccttcagggataatgtaatatttttccaacatttacacacgttcaccttatttaagattggctcaaaacacagaaaaatgtaagctaacctttttttttttttttttttttttttttgagacggagtcttgctctttcacccaggctggagtgcagtggcgctatctcggctcgctgcaagctccgtctcccgggttcacaccattgtcctgcctcagcctcctgagtagctgggactacaggcgcccgccaccacgcccggctaattttttgtatttttagtagagacggggtttcaccgtgtgagccaggatggtctcgatctcctgacctcgtgatccgcccaccttcaccttccaaagtgccgggattacaggcgtgagccactgcgcctggctgcaagctaatcttatgaagcttagagtatcttgattttagaacctgcaagagacaataataaagcaaacgttataagcacattttgtttgtaaacataggtttaaaaccctgaatagaatattggggaaaagaaaataacagtacattatgtagttattcgttatcaaaggttttattacaggacagttgttatacaaggaaagcggtataaatcatgtaaatatgagagaatgttttgaaaaataaaaaagattagataaaataattatttcagttttcataattgattttaaaatacccaagttggagagaatatgtagttcttacaagttggggatcatttgaaagcaaaaatgaatctttttcatggttggaaaactctagaggccttgtcttaacaagagctgtgttctgaggttgaccttacggtagcacatgtgttcagtatggcttgagatgtcagcagtttcattaagatgggaagaaccaaaataaattcacataaaaagactcaaaaagattcagaaaattttatagattatcagaaacccactagaatcatggattttgtatttgccaataattaatagctagaaaagttcaacagcaaaatagttttgattaaaatacatatttttacrtaacagaagagtcctaccaatttccttatttccatatttggcaaatttagatttacctatgtcatttgtcactggtggagatcagcattccattctctataattccttctaaatttttttgtttgtttgatttatcactttttttttttttttttttttgagatgaagtctcactcttgttccccaggctggagtgcaatggtgcgatctcgactcactgcaccctccgcctcccaggttcaagcaattctcctgcctcaccctcccgagtagctgggattacaggcgcctcccaccacgccagctaacttttgtattttaagtagagacggggtttcaccatgttggccaggctggtcttgaacttctgacctcaggtgatccgcctgcttcggcctcccaaagtgctgggattacaggtgatttatcactttctcagcccgcttagtcattctgtttttatcccctccacacgcatttattttaaattttaattataaatctctaattaaagaattaaacaattcatagacattatctgcatcatttaaagcaatacaatagcagtgaccgtgtgctctgtgagacagagaccactacaaggacatttacatgtttgcttttcattctgctgtttccaaaaaaaagttttatcatacatgcacatgttcctaaacaatatgattttagttttatgtttttgaacttcatgtaaatagaattatactatacgttttctatttcgtgggttctttttcaggcaggactgtttttgagaaccaggtttctgcctgtagctgtcggtgactggtgttcattagtgtcttgcattcaattttgtgaattttcacaactttgattcatgttcagatgtggctgctctcaaacatgatgttgtggacattcttttgtgtgttttctgacacacgcaaacttgggtctttgccaggttcctgcctgggaatgggagtgccgggtcacrggtaagctacttttaactctgcgtgacctccagcacggccacaccgtcttagacctagtgccagtgtcttcaggctgaccagggcgccttgctcggtcccgggaggtggccctcgcctggcctgtgcctgaccrccagcctgctgtggctgtcagtgtcttctgacatgggtcacccatttttatgtttgttgttggtttcgttttcttaatcatttgcagaattgaaatatctgggtgtgtgtggcttccttccagcagctaacgggaggctgcggccgtgtgctgccttcattgtcacagcttcctatggccactgctccttaaagtttcctatatgtggatattacttgcttgctgtttcttgttgaatatcagatattctggttttttgctcttacttttcttctggaagtaatatcctttggaagtaatatcctttagaaattcctgcagaagttccgttttttgttcgtctgagagttgcctccttttccttcattgttgaatgatccctcacagaagacagtgctggggaggcagctgctcttccccagggctctgaggatgtgattggttcactcagttccactggggctgttccgttccttggcaggaatccgttgtgtctctctaggtgttttgtagtcttagtgttctacatttttgtaagcgttttcacttacccctgttgatatttttttggacttcctgaatctgaagattagtgtcttccaataataatggggaattttattccttaacttttttctttttaacttttaattttgctgtaatttcaaacttacagaaaatcagcaaaaaatagtccaaagaattactgtttattgatatgcatcctttttttttttttcagaatcgtttgaaagttagtgttagatgtgatgccttcccccaactaataatccaggccatgttgcctcagataagcgtggtcactcttcaactacggtcagtgagtagagttggaaaataacagcgagcaggcattgttctctcatctgtaggccttgtttatgtttcgctgatagtctagtgatgtctcgttatcaacagcagatgacaggccctgcagggccttcaattctcacgtcctccccagtcccctttgctccgggacagtctcctcgtcatttttatgtttcgtgacattcacattttggaagcgtaggggcagctattttgtaaaatgtttttcagcttgggatttcggcatgtttcctcgtgattggattccagtgatgccgctgggcttggcggccaccgcagtatttcgttgctgctgatgctgcccggaagctctcagtgaaggtgatgctggcgggtgtttccactgtgaagttacattgtttcctgcataattagcaggtatctggtagggagataatctgggactgtgcagacagcctgctactccccgagcactgacccacaagtctcagcatcattgatggttctttgtcggagtctgttgttgtcgtggtggtggctactggtcatctagtgtcaccgttcttgctacattcaggacgggaagccctcattaacctcaggaggttcttggaaactgacttttaagtgaaatggtcatctagtgtcaccgttcttgctacattcaggacgggaagccctcattaacctcaggaggttcttggaaactgacttttaagtgaaataatacagaataaaaccaaggttatttttctcaccagtgcaccagtgttatagtcaaacgactggcattgcttgaggaccctctgtcgttggcttaaagttgcggtttccaagaacctgtggacarcgtgaaatgtggactcctgtagttaactttctcctgtaaagagctttcctttcctccttatttatgtgtttccttattgtttacttatattagtttgaactcatagattcctaatttattaactgggttataaccttttattatcaatatctattctgctgcccaaattgttccagtttggccaatgagagccccttcatgctggcgtttctggcaggtccctcccgttttgggacccttctttactctcttggatacacaaaatgtcctaatctcgcctgtacttaccctgtcctggcctggaatcagctttttctcaaggcggcctggttcctttctcggggaatgctatttagaaaccagctctcggccgccagagctgtgaatagatgtgtgtagatcggcccctgcacccacacacgccggccccacccacacacatggcagttcacttccagcccagcctcacaaaggccaccggctggccttctcctttcacatttgttactccctctgctgacaaggagacgtggagctctcagaatccatcatgtacttacttatttgttcagtctcaatcccagaatactcagagattattaacctatgcctctgtgaaaaagaaacccccaactagagtccagcagtcgctgaaggcgtatggtccagataccgggtctaaaagccactttggcaagctcttacgcacaccccaccctgccccagcgtggttgttactcatctgaaatggggtttggttatttgtttctgtttgtatttcagtttagaatttttccccctgtgtactttttgattgtattaattttcactttttgatgatgtgaaacccaattgcagcttcaaaagccagaactgtgtagcagccagactcagagaagcgggtcccctacccctgctgtcccctgtcctttccaccctgtccccatgagctaccctttctttcctgggtggccttgtgtgctttcatttgcccactttcttgcacggaaagaatgtcctacagggaactcctcttccctagcagtatgtcctggaaaccacgccacgtctgtccacaggctcctgctcattcctgtggacagccatacactctgcaattcatccagccgctctcttacctagggcccattggtatactgtacagggtagtggtagaatcacagctcactacagcctccacctcgtgggctcaagcagttctcctgcctcagcctcccaagtagctgggactacaggcccgtgctaccatgcctaggtaatttttttatctttaatttttttgtagagatggggtcttgctgtgttgctcaggctggtctcaaactcctgggctcaagtgatcttcccaccttggccccccagagtgctgggatttacaggtgagagtcaccgggcctgccatctgagttttatcttcagagttggtttatggagtgatttctatcaaaagataagtagattatatcattttattagatttttctcaagatttcctataggaaacttatatcagtttgcatttccgccagtagtgtctgagcgagcctattcccacggggctttggagtggagtgtattacttacttgctgatttggtagatgaaggatatttcagtttgtaagggccgtttttctgtctttgcttttggcttttctgttaggcttttggtctctgttcacacagtttgtaagagttctactgatggaagagattttggcctttgtctttcatgtgtattgcaagtaactgctcacagtttgtccactgtattttgacattctttctcatgctgctttcaccctgtaaaaggtttttcctccatgtatcaaacttactgttttttttaaattgcatctggattttcagtcctggttagaaagccttccttgacttccagaagatgttttctttgagtgcttgtacggtttcgttttttacatttgcatccccaattcgtttggagtttacccttgtgtatggtgttaggtttggatttaatgttatcttttcccagacagcaacccaattgtctccagtactgtttattaaaacatccctgtttgtcccagtggttgagatgggcacctttatcctgccctggagttccgtctgtacttctgtttctggactttctcactgtcacctggtctgccgggttgatggtgtctgtcgtgctctctgaagcgtaggggctttgaggcgtgttttagcatgtggttgggcatgctgggtttcattttgaatgtttctctagcgctcgtgcatcggcattgcccgttgctctcccatcatctctcttctttctttctgggattctgattacaggtgtgtaaaccaaaagtatctgagacaggtctcactcaatttaaaaagtttgtttagccaagcttaaggacgtgcctgtgacacagcctcaagaggtgctgacaacatgtgcccaaggtggtcggggaacagcttggtttcatacatttttagggagacatgaggcgtctgtcagtatgtggaagatgaacattggtccagtccagaaacgcggracaactcgaagtgtgaggctttcagattataggtagattttaaaatgttctgattggcagttggttgaaagagttattatcaacacaaaggaatgtctggattatgataagggtttgtggagaccaaggatttaccatgccgacgaagcctccgggtagcaggcttcagagagaatagactgaaatgtttctcatcagacttaaagagtctgttctatcagcaattccaaaagggaggagggtatcatgaggcacatctggatgcccgtccccatcacgacctgaactagcttttcaggttaatgttggaatgcccttggcttgagaggaggggtccattcagatggttgggagcttagaattttatttttggtttacagatgtgtgttagcatatcttcctctgtccttccagtcctctaacgtctccagctttctatctctttacctttatgtgttgcatcctggtttatttcttccgtgctattttactgttcactaattctctcttcagctctgtctattaatacttgattagttaactcactcatttagttttaaattttaatgatgacagttttgtttctacaagttccatttggatcattcagatccatgtgacacttctgatagttattaataataacagctgagacatctgtctcctttcttccttagccttgctccagggagagtgtgggctcttctaatccccctttttggcaaatgggaagctaaggcacagggaggttgaggaagccaccaggtttgtacagtcactaagtgacaggatctggaggcctctagctccagcctgaccctggatgacctctcttgttttgtcgagtgtccttcgtatgtgttttgggtcagtgcctgattttcctacaactgaggtctttccgggacttactcccgctacccatggttcttgattgtgactttatgtccgtccttcttggatgtttttttgaggttcatagcgtgttcctctagagaaggtttctgcctggtgctgggaggtgccacctgggacatgcctgtgtttgcaggtgctagggatgctcatcaggcctcatgggttgtctgaattctccccaaaccattgcgaggggtctgggattatgagttctgaggggagtcctctctcgatttgaccccttctagccagcaccaagcccaggcccggatgtgtcccttgcaggcctgtcttctggcttcccctgccaagggaactacagcccctccccacgcacactcacagggacggtgcagtggtaagaggcagtgcaggtggctgccccaggacaggccctgggctccaggctggctttcatgttctatttgccctgccttgaattcctgtytttggagtatattcctcactcttcagccaactcagccctgagtataattagacgtctctaaaagtgcgtgtgccatattgccaggcgtgaaggcttttctgaatcttcctttctgtcaccagtgctgtacgttggctttcttttgaggcgcttattttcataagaaactttctctgtgtccttaacttccagcagagagtctgggagatcggggggtcaggaggtgctaagggcctgaccagctgtgtttgcgaagtgccatggaaaactgggatgattccggtcatcacctctcgtgaggttaggaagagtccagcctgcggtatcagtgctcggtgggatggccagcccccaattggaggagcgggctcctgggcagcctggggatacttggttctaatccagatcctcacactctttggggaggaggccgtttccagcaagtgagtgtcccttgggtttctcctcaaagccccttctaaaattagtccctggctgctgcagggacatttacatcagcgcattttgttaagtacttttgttgctttccattaagagcatatttaaaaatatgaaatgaattcaggcagaagccaggctctgcygctgagaacatctgtgtgctggtgagagggagagactgggcggtggataacgggctgcagcttcctcctccgccacctcggaacgcccccggggaggcacgggacagagcccaagcctgagtgaagctccctggctgggggaacaccctgccccaggctggccaccttgactccttgctctgcaggctgcccccggcacctcgtctgcctcccgtcggcagccagtgagaggarcrtggggcctgagagcattgcctgcctgctggccggccgcccccacagtgcagagctggagcggtcttcagaggctcccggtctccctctgcagatgaagacactgggggaacgtggcctacccacagtcagcaggctcccctctccgtgtaccaggctagtctgccggcgccayggcagctgggccaccaccacattctgccctcagtgctgtggtgcagtcgaggggtgtgccttggaggacccataggaagaccaacttcatgtccatgggacacgctggaagaaacgccacagaccttgttccagatgcagttttccgtttttataaagacaagtgtggatgttttcgtttcattggacgcatagaggaaaggtgacttggcttctgctgaagcccagcagcccattcttagcgtttgctttagaatggaggacagtcggggacattttcctcgtgaatttcaccatcatctggctttggccttctttccaacaattgaggaagaaagggcctaatgtggaactacgtgcgtgcgtgccctgcgtgtgggctcctgggccagcatggatggtggtgctggcagcaccaccaccgtgcagttgggggtgggcagcaggcctcttggcggcagccaatgtccttctcatcttccctgtcaggtgctaggagccctggcaccaaggctgtggtgatggtaccagggttctcttagttgggaggggctgcatttcctctgtagcgtgggtggctggctggcctggtgtcctgccctgcccaggggtgcccctgcccgcccctccttccaggttgcagtgtggtaggtggcaccttggtggccagtgttttgtgatggtgacagtgatgtcagcgccgaggttcctcaagtctaaactgagatgatctggtgtgatttttcttggctttcaatttttgggtaaggcttttagtgggcattcttctctgtttccccttcctcatgttagtctagggccccagggaaccacagaacccctgctctggaaggaacctttagaggaacccgttctgagctcttcctttcacaggagattgctcagagctgccccgtgggctgcccaaggcctcttaggtcaaggaccctgctggctccggtccagacttctccctgccatgtcaccgtgaggaagcaccgccccatcactgttccatgatcattgtaacacctgccattaaaaagcacgggagcttcgtgtcagaatgtagtttaaaatgtgttgtaatgtttgcgtagaacagaaacttgaagttttgtgagaaacggagtcccctgtgtgtggttttggaggggctgagctgtcctttcctgtcatgggtcacagtgtccctctccccctcacccatgaaataatgacagcggcctccattcctacaaagtcctcagtcgcgggtgccgttttatatcgtaaatctgtcatcttcaactggatggtgtaacacttggattctacatttcccggatgcttggaaaggagtgccaggagttatgtgttctgcgkatcagaacagctgacgccggctgaggacacttcatccactgtttgctcggcgcttgacaaatgctacccagtctaacggtgagcgtcgggtgtctccgggcttggtgcctgcttgtgccacacatctcagtgccatgcaagaccagcatgccagtgacacagcaggggacacgtggagttcaggctgctgagagctcggaaggggccaggccgtccccctggccctaaggctgcaaggctctgccctggagctgcagagctaacacctcactctgcggggttgtaaagtggagctgatgctgcttgaccccacaaaagctcacaggccttttaggtgcctgttaatgctggaatgaaaccacaggtagccaagaaggcctgcctgtcagaccgcgaccgcgcagatctcagcagaatgtttaaaaggcgctctctgcagttttggaattgtggcgctgctcttgcttagtattagggctcaagcaggttaacgtcagggttcgttttcttaaatggccggtggccgtggtggtgttggacgtggctaacctggcacagggcagcagagatccaggtgtcaggccagtggaagggttgaagcctctcaccagcatgtctgttttggagggaagtgttggacattgagtgaggcccctctgcactcagcgaccctgccctgtgctcccagacccagttttgggtctgcttggttggcatcagggtcctggccctttctgtgttttgggacctctgtttgcttatcatatttgcatcattgcctttactccctggggggcagaggggggagctcctgaagccatttagccctgccagcctgggtctgcccttgtgcctgtgctgtgttctttctgcctggcagtcctgccctacgcagtctcatggaggcagggctcatgggaggggccttcccttggccccagccatccccccgggaacatcacactctctcacagacacactgtggccattttctgttgaagctactctgtgaaacattctctatacttggttcgggggggagcaaaatccagaatctgctaaacaccaatgctgtcactcagagtttgtgtatctgctgtctgtggagctctggaccaggcttgagggacgcctggggtttccacccacatctggggcaaaccagacccccaagtcactgacatgtcggtttttctactaatcacgttggctttggcaattctgtatataataagaagtattgtgttctcacttgcacttgggcagaacggttcactccaaggctgaatgactgccacggaccattcccccagcagggggtcctggggtttagtggtttgattctgagcacctctacgcacagagccccttagtgggttccctaactggacggctaaccctgctgtggaatctgactttttctggaccgaagaggacaggctgctctggagaaactccttgggccttgtgcctgatgctggctcgggccaccctggccaccctcccttcatgccccatgggaccaggcagcagcatgggagggggcagcttccagaacacccttctgctaggggctgctggcctccctgctggcacggccacatccatggtctgagtgtgtggttggaatgttttatcaacaccagtcctcacagcttccccagatgagcgaaggggaaggggatggtgtgtggggggattgcctcccttgaggccccccagctcccaggatacttgctggcggagctctgcctgcggtggaggccctatgacttgacctccatcttctccctgggcccctcgctggccctcactggcaggggctcctgcacgcctgcaaggccagagcctcccgccaggtgcaggagaagtaaatgcaggccagagataaatcgtatttccctctaactcggatgtggagtgagaggaaggaagcaggagtggagctgagtgttagtgagaggtggctgagaaggcggggtcccgcttcttgcttccttgggcatttgctgtaggtgctgggtttcagcctggaagggtgcagcctctgcactaagtctggtttggtgaacgttcatggcccccaatataaacagtgttctgggcgttctttgtgactctcgagccgaaacactgtggtgatctctcgtatcatctgcttgttatgtaatgtgacaacatggatatgaaatagaaaccagatgtcagggtggagcggctgaattcttccccagcgaggccgccgggagagcaggacttgggtttctcctgagttacggcgccgaacgccctgagaaaaacgcctttggagcagtttccgggattaagcgaaagtctgggctgaaggtaaagcaccaagtcagtacgattaactcttttttaagaaacttgtaagggattttctgtgctgttatgtaactgctcagtgtcttccagcgagccggcggcttgttatcaagaatccgtttagaatgtttgaactcagcctctgggggagctgggagcactgtggcacctccaggggcctgcagcgtgcttccgagggcttgggtgtagaggaaggggaacccgtctttcgcctgtgacagccttgcccttgggtctgggagcaatgaggactcggaacgtgagcctcctgctacaggtacaggccctgggggagtgagggcgctggcggacagcagtcttggcacttcacgttagcagattcggagtttctgcagcggctgaacccctgcactgggctggaagggggggacacccggaggcctgttaaccacactctgcctggactacaccatgaacatagatctttgtgcttttgaaatacaaaaaacgagctcacctggatacgaagtgtggttccggaagcagtatctggctgtggatggaggttatgtattccaccaacgatatcttcattattgttattttcctttggtagctgatctttcagagagatctgcagattcctcactttgctaagaagactctctgaaaacaggaagctaaggaactcctcactcccaagttgattacagcctcatggaagtgtggaattcttattaggaaagcctgttgctgagtaccaagcaggttatcctcttgtcccgtgtcaccagggggccagcttgatgaggaagaaagtgaccctggctccctcgtgtccccaaggcagtggactcccccccgggtctctagctctcttgtccctaagctgatagctcatcgtcaaggagggcttcctgcacgctgaccacccccatctcacagatgaggaagctggggcccagggagggtgagtgatggggtgtaggaagggtgagtgacaaggcccagagagggcttgtgatgggcccggctctcaccgttgggggtgggatgggccatccttggctcctcgcagctcgttgctgtgtggccactcattgctgtgtggccgctcactttgggggggatggggacactttgctggctgttgctgccgggccttgtgttccgttttcaggtggagatcaggaattctgagatagtggcaaaacgtgatgtggctcggggtgcgtggagacgtgtgtgacagtccccaaatccacagtggctgtggggtggcgtttcaggctgggaaaccctctggaaagaaagcacgaaacactccgacatcctcattccattttgcttgttctaaaagagaacttgaagaaaatcatcccagcagcatttgcttagaccaagtgcggtcatgagaacgtcatctgagtgaggagggcttctcttgcatgcgttttcttgagcaggagttgtcgtttggctatttggaaaaccaagtttagggtccctggtgagtctgcgaggtccaggaagcagacactcactttatctaggtgagaggacggagctgcagagatgggccttagtgaccactgggccctcgtatctctggcaggtccctgattagtggtgggaggggggttcccttttgtagccacttggtcttttgacagcttggggtacccatccttcaagcccctctctcctggggcccagtggccgcctctgggcatcacggagagccgctcttgtgttggggcctccggctcctcggctctctgcttctaaacagaacaccctcttgtttctgaaagtagcccatggtcccctgagggtcctgagcacagcccccactcatctgaggatgaccattggggcacggagcctgccccaggccctgggctttgtgcccagggctctcttctccctccctgtcagggtttccagacccctcgtgggcacccaggatggacggcaggcacagagctggagggtgtggcctgagatgggccatccggacgactcgggcctctgggctcaccagagtgctgaatgaaggccggagggcgagagtgggaaggatggcatcacccaccctgccggtggcccctatggtcctgcggctcctgctgcttctgggttaccctgggcccagggtgcaggcgcccttggggaggtgcacacgggaggctcaggccctccttggacattcctgaacgcccccatgcatccctgcagctccttccagaaggttctctcgatcctgtctggctcctcgggggtgtgtgggaaaccaggccagggtctcccggttgttggctggggtggggtcctgccttcgccccttagcattcaccccctaccccttttcaccatgtaaaaccctgtgggccctgggccctggatgctctgcgcccgaggacctgggttctgccatcacctgggcagtgtggggggcatatagggggaacatggggtgcctgatgtagtgcctgtgtttgaccttgtttaggtgaagagcaccctttccagcttaygttttgtatcatgaccgggaaaggtacgaaacragtgtgtcggggcccagatgatttgatggctctacgggccgagtatgggacacaggatagcttggccctgggtcaggtattagtcagtccttgctggcacctgggcagggacacatccgtggatggggcctggccaggtggcctctgaggtcctcgtgtccactggaaggctgtgtcctctgttgtagtcactgacttgctggacctgggtgggagctcacccacctgtggatgggccagggagctcctggaatcactagaaagatgaactttttttgccttctaaatgtatgaaaagatgggaaatgataggaaaataagtggaagtcagatctattcaggaaaatgacttcccagggaagagctggggtgcctccaaacccagaatcctcggtttctagaagcaaggctgaccgaggtgggcagcattctttgggaccttgagtgatgaagtagttacttaagcagagtgtttctcatgtgaagccaggcagtctaggacactaggaatcatttcagcgtgggggagacgcagacactgtgcttgcccagggtgctgcattcatctgaaatgccggtggctaccagctctttgtcacggttcctccgtggtctccttgaatgctgtcagattcagggcccgtgtgggcagcggcagcctcgttcccagtcgtgtttagggaatggggtcagagaagtacttgctaaagcttcctgtgtgcacgtgtaattgtgtgtgcatgtgtgttaaataaatgtatttcaactcgaaatacacgtttcgtggccatcagtctagggatggctagaatttagtcactaaatgaaactaagccgcaccgtcaccaataatgtgaacatgattaaaaaccacactcagttcttattcatttacctacaagtccagaaacttttagaacttatttcaccattaaaataaatagttttttaaaaaatatacaacaataaggaaaaatttgaaagcctcttgcccctccatcccaggcctgacagagtggcttccacaaagaaagaggcagaagccagggctgtctgtgcctgcagggcgctgttgggctcacagatgacccagactcccccgtaatggagccgcggacccacagcgagccacttgcaccaggcttagccaagctgacaggccagcggagtaaggaatgttccctaccattgtccagaaaatgtaacgagggtgaaggtgtgccaagcagactccccgtgtcagccctgaggcgactgccatcgctttcagaaacctgactaccaacctggatgaaaaccgactgcttggtcatggccatgcagttagaaaacacwgcagcaatcctcagatgagtgtggccgtatttgtgttactcaagctgctttgtcatctgcatttgaagaaacgtggtgagcctcctgtgtgtgcccatgtggcagtgggcacctctgccccctgcaaaggctgtctaagaacacagagcctgcagtacaggccctgcctcctgacatgccccaggccggctggaagaaagcgcgggactgtcctattgacgtggggaggggacggctggactctgtgatgctmactgtgttctctgctgggccatgtggctccccacagagaccctgggtgcccagtcattcgcgttctcctatgtgtgtgtatatatattatatatacatgtatttactaactttagaaagcccccaagggggccttgtttctgcttggacagtcagcgtccatagcgtgtcattcctaagctccattaaggagattcagaagcaagcagttacccctggagtctgcacgctgggcacaagggtcacaccttcgttgagagctcctgaccccaggagccgagggcaggacacggtagtgtttacaggacctggcaaaggggcactgccttgtgtgtgaggttttttcaccagtcagtcccttttaaaaacagcatatcttttgaagaacaagaagtttacgcaggcataagcaactcactttgcacgtggagctttcaggacgtttcatgtctgttacgttatagcctctatcctcatgggggctctgagttcagcagggcctgagctgttaatctgctttttcaaattattaataatgaaagtaacaccatgccaccacctggtatcatttcatgctttctatgtgcctggtgtttacacggcttatctcatttaatcttcccagcatgtaataaaaatattgcaacaggtactgctcctgtgtggactccttcccccgagctcacactgcytgaggccttcccagctctgggctttgtgtcctgtgtggacttcttccccgagctcacactgcttgaggcattctagctctgggctttgtgaatatcctgcttttatcctcatttataggtaagaaagctgactcagagaggttaagcagctggtctgaggtcaactgcttacgggtsggggagctgggcctgcacacaggggtctgatgcagagctggtcctatctgctttataagctgtggctcacagggcactccaggggctcgagaggacctggcgggctgagatgaagactggtgaggcctgggaggcaggtgcttgactgaggtgggaagtgggaccttggtgccaagcattcccagggccacggggcaggcctgtagggtctggtgggtatctggggtcccggagaagcccttggcacggggcttcatgagagcataggcgagtgccgcgccctgcagttgagcacgggggatgcagctgtcgcagtcgyttttgaagagtgaggggtgaggcctgcagttgctgcccgacgttgtttacaagtgagcaagttttacaaaaaacatggacagcatcagggctgacttgaattttttacttgaggcagcagctcaacctgttggtttcctcaattgtgaattaaaaaaaaaaaagaaagaaagaaaacagagaaagctgacaacgtaacattgatgagaggattcttaagggagaacaagccacaggctgtcccgagaaaggagcggggagatcgaggaagcacgctgccgtgtcttgttcgtggggtgcttgtgacgctctcgcaggatgccctgtgggccacaccacgagtgctcggtggcgactgcagaagggtgagggacgtttcccttcacaccagacggcgggtcttgatggcagaggaaccaggcatcagaggaggacaagtcaatccgggagcgtagataaaaaggaagcgaaacttatttcacattgtcaagctgtcggggattccagggaccttgtcctccaggcctgtccctgtgccctcctgtccccaggcctgagcagccgggtgtgggatgggaacaggccagggccaggtgcctcacgccctgaggctggagtcaggctctgttgccactttgaatccaggggcccaccctgaaccctgagctgggcttctgttcagtacgcggaggtgatgacctctcccacccggggggggtttgaggactcccgaggtggcaggggtgacgcccagcccagcatgcagagtgcccaggcagtgcccacacctttcctctccctgccaaggtgctccgggcctgagcctgtgtggccccctgcttggggctgtcaccacaatgccattccccgcacgcccagcaagtccctcctatgggtgagagcctaacttgagagactcttttggggaggagtaagatgacctgcccttctcaagagtgagcagttcttagatgactgccttgagcagcgatggttcttcctgcaggggtgcgcccacgaaacgctctgcgtgaagcacattggtgccatgctcaggcccagggagagtggagggtgctgtgctcttggactgggtcctggctcgagggttgaggggctgggccatgtccacaaaaagtcactggatggctgggctgctcccactgtgtcgctggaagaggggcagcgcccgctgcagtgtttggagtgcttggtcatggccccacgtggattctccttcctgggggaagctgttccgtccccaggttttcagctaacttatctgagttttgatgaagagagcaaggggttttgctaatctggattcctgtggaagggcctcctctctctgctcgtgttttatagcttggcaactctagtgctagttctgcaatattcgaatttgagtagccagaagaatttgctgccagggtggccttgcccttgactttgaaatgaactcacccgagacttcagcttgatgcctcctttggctaatgctgggttctgggctttggccgccgcctgcctgtccatcacaaggggccatgytctccaatcaggacagagttctaagcatttcacagtaaagcctgcaggagttaggttttctgttcttgacagactgagaatgatactgagaatgttttctgattgatttggtgagctgtctgtttatagcatcattasagattattttccatggctaggaattattcttgacctcacagtaaaggactctgaatcccccaccccctgcctgttttttttgttgttgttgtgtttttttgtttgtttgttttaaagaaaagacttgtaccatcagtcttaggcgtaatctccttggcagtagtgaggagcaaggcatctgatggagaaacaaagcatggtaaggtttttaccattcaggaatcacaccgcagtagcattgtagtatttgatcacaatttactcttactttttttcataaagaaagaaataggcctacagtggctctcacttgtaatcccagcactttgggaggctgaggcaggaggattgcttgaggccagaagtttgagaccaatctggacaacataggaacacctcctctctacagaaaagattaaaaacattagctgggcatggtggtatgcgtctgtagtcccagctgttcaggaagctgaggtgggaggatccttcgagctaggaggtcgaggctgcagtgagccatgtcataccgctgcactccagcctgggtgacagaggggagaccctgtttcaagagagaaaaataaaaaaaaaaaaaaaraaagaaagcaccagcagaatttagaaatgtgggccagtgtgggagcctcgcctggcatcactggcctcgcctggcatcactggcystgggctgctgctctcgccctggagctgttactttgagagcagatcgaggactcagcaggcaggaggaatgttcacggcagggtcagttcccacgctgcatacgccccaccatcgcccctcgtcgtggctgggatgggagaccgactttagaaccagaggctgggaagagggagatacccccttccagaaggggccttctgccgctgagtaagggggtggtgcccggctggctccatgaggggcatgaggggtgctggctatgcttggcctgaggggttgctgcaggaaggccttgctccccgccggggctgagggacccggctgagcagcagcagcaggaggaatgagcagtgctcttggagcccggaggagggggcagggcttgtccttctggacgggcagccccaggaaaagagaagcccagagctaagggcccttgccctagggaggggtcccayatggaccccgaagacgttcctctctgcagcccttcctggcactgcgtggacacgatgwacggaatgaggaaaacgagcttctttcccttctctttcacttctccctcccatcacgcagcgtgcaattatggaagaggataaagaaggaaagagcagtcggaaaaattctgtaagaaccggagaggggagttcgggtgtttttacagctcctggggttctccgggaaacaaaggtgtgctatttccacttctgtgtcttcattcctgttctgcagggaagctcagcctggcttcatccacatgggtggagcagagtcaagttcagttgggaattttttttttttcctgctcatttggaaaaagaggaaaagacactgggatacaaagagggctttataaagaagaggcctccttggtcctccactccaggactttctgcgatggcggaaatggtccatagcagcaatgcccatcggggcagccactggtcatgcctgactgttgagcttgtcagcagccacatcaacacatggatggtgtggccgaggaactggatttcaaattaaattaaattaaatttcaatttaagtaaccacatgtggccagtagctacctacagcgcactctcaggaaggctctagactgagagtttgaggatcatcctttatcagtgatttgaatggatgaggcttcatctgtttgaatttcccagttggggtaaaaagaggggatgcttgtactggaatgggagtaggttcacagcgcacagcctgggccagcatcagtgtgttgctgaatttatgctccttcccaaggttgttgaggagactggaagagaagttctgtgttagagagagggacgccctagaggagttcacttagtcacaaggagcagaaatgccctcagtggcatggattgaaaggcacttacggatggaattcgggagaaattcatggagcactgcagggagtcctctgatgggacccctcttccttctctgtctcccctgtctcccgagccccaggactgccggtctcccatctgcttagtccccagctgcgtccctgcaggctctccgctctgttgctggtttggttcgtctggtgtgtgcctcccctgtgacatgccgggagcagagcggaacagctgtgccagtccctgggccccagctggactgtgctgggtccagggtctatgagagctgctgggaggccaccagtgcaggtgggcaggaccttgctccgtgattctacccatgacgcttctcactcaaggaattggcttttgtttcagtgcatcctattgaaaatcacttagccagtaagcaaatgttggcccttagtctgttaaacattaatacaaataagcacgtgtcgctgccctcccgttgtacagttgtacagctgtaataaacaccactcgccctgcctcgtgtgcatgtctcttctggtttcggcaccccagtgccgtggttgtgcgaggggatcagaatatctgcttgagattagcccatgtcagcattttattgggattgttaggcacctccgtcctgatcattgcaccacgctctgtccctgtacttaaatatctctacttggcatttgaaacaaaacaaataaacctattgtacaggatggaccaatcatgaggcattttcactctgatgttggcagtggatgtgttgacattgagaggatattcatggtggcaggctgcccccagttccaggttttggatatttggaataaggtaggctatgacaggccgggtgcaatagcttatgcctgtaatcccagcactttgggaggccaaggcaggcggatcacgaggtcaggagatcgagaccatcctggctaacatgaaaccccgtctctactaaaaatacaaaaaattagctgggcgtggtggcgggcacctgtagtcccagctactcgggaggctgaggcaggagaatggcatgaacccgggaggcggagcttgcagtgagccgagatggcgccaccgcactccagcctgggcgacagagtgactgcatctcaaaaaaaaaaaaaaaaaaaaaaaaataggctatggccatgaagggttgcttccggattcagtacatttaggaggaaataatgttgttcatcatatgacacagttaagtctccgagagataattaaatgaaaatcattctaaaatgtttgattaaatgcctttctagcctagcccctgtaggtggagtgtcatgatttccacgttgttgggtgctggataaatgatttagccacagtctcacggctctgtaaagagtggcaggctgttcctatcactgctgatcctgtgtgtgctgtgcaccggatgtgggtggaatgaggctgcaggggcacctgcatccccagtggctatgatgactaaatgaggaggcccctgtagagtgcacagcgttcacccagtgacagtgtgattgtaatagctggggttgctgggaccctagagtatccacggtgtgcatgcacttgaacttcaggataccctgtttccctctgaggtgcaagagctctggcgattccggatccctactgtgtgtcaggttctggaagcatcttctctcatctccacgtgatgcccaggggctcccccagcttctggaagccaccgcttgtccagggcaccagcccagtctgtcgtcaagcctggatttgatcttaggtctggctgcttccggaataccgagacgggcctctgctgttccctgagcttgctgtcagcaaatgtttggtgaggagaattatttggtttggaatttcttgtttatgttttagtccattaattttttttatcctgtgaaatattttagcaaccctaaagacccatgacacacaggtatctcttcaatattgtgctaattcctgcctttttttggtgtcttctcatctcagcatcagtagtggtggccatgtagggacagargcacttagcagccgcggcaccgggaataatgatttgacttgggggccctgtggaagaggcacatgttgccgcttgaattctaagaacactatttacctttctgttttgaaagttcactttcactttcaaggtctcaattttctcaaaagttctaaagtgataaacatagtctttctaagattttctttttgcatttgtggccttcgttgtggcacagccctgtgtcaggtggggctgagcccagagggtgctgaggggatggggctcatggtgacagcgtggtgcaatcccgaggcaagtccttggcactgtgatgggcgctaccattggggcctggcatccccaggcctcattagccagcagtgaccacaggtgatgcacaggcgttctcatgtcctgctttggattccctccgttaaggaaaccgcagcacagcaccgctccacagtagctcatagccgggcagccagggagccgcagagtctggacttgacctctgcaaccccgtctcaaccctatgctgtcacaccagtgtctgagttaaatggcaatgcaaagctctgggtcccatcttctagcggggacctttgtggcttgcccacaggttggtggcacggatcgctgctctctgggacagcatgggaccctttctggagcgaagtccacttcagagaccctgggttgctgtctgacagagctgtgggcctgcctcatcctgcggccaaggtttgggtgagcgctggctgctcgtgggaaggttgggggctcaggcacctttgtgattgccttgtcttcagtctccacttctgtcagagcttacaaagagcagcacatggggtccagaggcttctggggagccacccgtgcccctgacccaaggatgcataggccagcccttgtaggaagcagcataagacttaattcctttttttttttttttttttttacatgaaaacaaacagaaatgggagttttatttgttccctgcagccccacgaacatcttttggagccatctggagagctgatcacttctttggcggggacaatcaaatattgaatgttgagggaaattagggcaaatggctccaggactgtccacttttgacagacctggtgagtgagtttaatcattaatcattaatccacgctttctaaatatatctgccccgaagaatctcccgggcggaggtgaaagtcctggttcccatgctcccttgacctgactgaagcacagctccggggcccgacagtggacaggcaccccatttcatccctgtctggggacacatttaagcagtgctgcctcggtttgttatttagtgacttattttcaaggaaaaagatccagaaatgattagataaatgcgaagtcctaaaaaagaaaacagcgcagtttctcttaaatgccggccagcattgtgaccctgatctgctgaggccttggaaggtagttgaggctgcaggaaatgtcacgrggtgacctttagaattagagtgtcagcactcagctggctgcctgcatctgaaaaaggagccattgtagccagtgaaatggggaaaaaccagaaaaccagctgggccagggcgctgcaggactggccatgaccgccctgtgccactgtctgcagagaccctggtccaggcgggtattggcctccttctgggcagagtgctggtgtccaygcccagggcacacatacagctaagcacatcctctgtgtgcgtgcatgtgtrcatacctgcatatgtgcgtgtgtgtgtgtgctttgagagtggtggctttctgattgaacaagcagagtgctcaaggacacggctccaggtcagcctgtgcaggctccagtttggtgctccccttttcttgctggattaactttggaccatccctgagcctctttgtgcctcagtgtcctcatgtaaaatgggcgtgatagcatcctcagctctctgctgcttctgtgaagatgaagagtccctctgtagatgcgcccattgcctggtagctctaattactggctcttccttcagcaccctgtaagaagctgttgcaaatgaagtgtgagttggtgacagagcagtgaagaggctgagaaagacaatgaagggctctgggggcacttgtgatgtggtttggagagacagctkccctagaactcacacaggtggcccacttctttggtctgtttgtgcaaaagtcattggtagtgattttgttggtggtggtggttttggtgaggatgtccatttaagaaataaaatgaaactgaacgggaatggtaaacgagacacaaaacagaatgaaaagcctcccagaggctgagcttgaaaggaaacagcaaattacaaagtgagaatgccaagagctttctcctttaacaaaccagggtgcattgttctcctttctaatgataagggaggacctgtttgctctgggaagttttagaaaggacaaaggcgtatgaaggagagagtctctgactcctagtcctgtcaccctgggttcagctgtgaacattttcatgtgtttccttccggctcccatcttgtctcrttctcgttggtttttatgtaaccagcttttggatgaataaaaatctgctcttttgcttttcacccttgccagtttactataatcatctttttttttttttttttttttttttttgagacggagtcttgcyctgtcacccaggctggagtgcaggggcgcgatctcggctcactgcaagctccgcctcccgggttcacgccattctcctgcctcagcctcccaagtagctgggactacaggcgcccgccactacgccyggctaattttttgtatttttagtagagacggggtttcaccgttatagccgggatggtctcgatctcctgacctcgtgatccgcccgcctcggcctcccaaagtgctgggattacaggcgtgagccaccgcgcccggcctataatcatcttttcacattattaaaaaacccttagcagctgttccctagcactaaaagtcttatcagacgggcgttgtcccgaagccgttggacagtctctcccgggcctcccacacacccacccccttagtcagagcagaggcctagcttctgtggccctctgtcctgtcctgagagcgcacagtcctgacctggatggtgctcacatgaccctgagggaggagtggcatcgccccattttacagatgaggaagctgagacgctgagctcctggcctgggtgggctgtgctgcctccgaggcctccgaggcaggcccacctgctccccttccttccaactccctgttctggagccagctctgcttgctatcctgagcctcagccatgaggaattctggggtgcccacaaatacatctgtgtgtgccccagctgttcccactactgttgtcccttcccagaaagagagagccccacctactcagaagcctaggtctaacagagctcttccctcctttccaccttcaacggggacttagtttctgaaacacagtggcgcgacctccttgcagtctctttctcttttttttcatctctgccctgggagccaggtaggctccagactccctatcagcctatccacagctttcagaacctttccaaagtgcagatctgatcagtcaggcctctgccaaggcccatcaggagctcccagtgtccacgtcctcacggcgaacagcttccctgagtgttctgtgcccaggttcagaaggggctgcccctgcctggtgattgcggtccttgtctgagtcactgggagktgatagaggtggatcatggggcacttctgttttagcgtaaatgtgacgcctcagcgaccctgcactgcacggagcatccaygagctttctgcccaacctgtgagaatgagctgctcttcctcccataggcagcagagggtgggctgggagacgatgggcgggtatttgtgtggcccagttctctctagaaatgtctctgttaaattaacaaatggcaagttagtaaattgcaagtggatgatttaaagtcctcctgttacttttagagttctagggccctaacaggtgcttagcaaatacttgttaaatgttttcccactagaaaggttttgtaaggaggaaggaggctggcgttctcgccgtcaggtttttatgccatccgctgagtgcaggtattttgggagcacgtaaactgtatgtccaggtgatacaggttagcctcccagtatagggtgcagtggacccaaaacaggaaaaccacgtggccaggcacagcagctagaagcgcatcagctggagagagcccagagatgccctgtgcgtagccactgcaggaagcctggaggtgccctgtgcgttggtctggggatccctgtgtccataagcaggtgggcctcgggctcctgctctcagcttctgcctggctcttgaccccttaactacctcatggtagcaagaatgtgacctttctcccacgctcctttgctgctctccgcccttgttaatgttccgcccctgctggggtagattgtatccccctttgattgtggagggtagggcccttctcaaatagggttttctgggaccctgcggttttgcaaggtgtttgcagttattcaccataaaaaccgagggcaggggacaggccctggtcaaacccctttgggggaagctcagagaaattcagaaggcaactgctacattcaagctctgggaagctcccgagtagagaagccagctgggatctgtcgagaagagacttgtccagtttattatttcagggaatttgtatcccatggacacaaattcctcacgggatgccctttgggaaacgccttgtgaggactgacccagctggagcaggtacctgggaaggaaagtcatttccaagggattctgggctacctgggagctggccgctggcctcacacctgaacctgaaggccaggtgggtggtctcatttcatgtctatagggacattcagctgttatttttttaagtaaaactgtatctaatggagcttgctatttattgagtgataacttcaaatcggaaatgttctttttcccactgaaaggcctgagcaaggttttgctcttagtgctgttgcatacctgtttccacccagcttttagtctcttgtaatttctgtttgggtattaaaaggacggtctaggtccacgtgagagacctggtgaaagagagcctccttggcttctggtaatgaacttccatcaccccccttccaaacaaagaaacaaaaaagaaacagtatcctctcgacccagcctcccgccttagtctgctagttcatgacactggatcatgccttatttgacctgacccattacttggctcgagttcccagataggatatattgacttgcttttctggaagtaaagagatgcattttagatgtgggttggtgggtctgtattttctgggccctgccaagtatgcccacaggggtactggtttctcgctggagtggtggggtcactgccagcccttcagatttgtttggctctgtgctccagatggacagcggggctcagcctccactgcccatctcagtgcagaagctctccagggtctttctgtcacacatctaacaaacagccagtgctagaaaggggtttatcctcgaacgcagagagcagtgagygagggcatcttgtcttctgccgtaccaggtgaaggtgacctcagggtcccctgggactgcttctgcaggtgctctgggagccagcgcattgcagcacctgcccggctgggagtccccagccacactgacaaaacaccggaacacytggggccccacctaccatcctggcygtccccttgcctgccttgccacgatgggcaagcacagcccctggcgtggccgtcctgagctgggctgtgcgcgcagcccctggtgtggccgccctgagctgggctgagctgggccgagctgggccgtgcgcgcagcccctggcgtggctgtcctgagctgggctgtgtgcacacaccagcatcctgccccatcagttgctgtgctgcagacaaaggagggatccactggagcgggaactcttgcaaacaaaggttctattttcatgcaaatgtaatcggcggctcccggggagaaggcccagctagctgggactcttgagcttrggccccttttctagaaggcgatggtggacactggaaatcttctttatgatatctgtgtggacttagaagaaccaaataagaagctcttacatagatattgcccttcccccgacctgccagctagggctgtaagtagaaattaacctaaattaggaagataattgtccctgtgttaattgtaggttgtcttttaaagctgttttcattctccaggcctgagcagcaggctggcttcgggccctaccgtgggttgctgcgcattgacacccatgaaaaccaaagttccagaggggcgacctagcggccttcctgctttccagagctccagggtctctagatgatgacgtttctttgaaaatcccactgcagctcttcctgtgtgccctcaggccccccgccacccaggggacccctctttgagggcgatcaggctctcagcccaggccatgtaaacaaacaccggctattttcagcaagcctgtggtgtcgcagctggcctggcaaggcccatccccgtgtgcacttggccctggccagcccgggccagccctggcaggcgagccatgccttggaacgttcttacccgccatgcttttcagttttgtcataacaccccctggcactcgacggcagcgtcccagtcaaaagggggctgaacaaggaccccagggactattgtatttggggttttctttgttgggaacttggatttctgtttgaaagtgcttggtaaaacctgccgtcctccctgtcccgggcacgcaccagcaggtggaggcaggcgctgccttctgaacggctctttccttttgtcctcggttttcttgaggcctggctcacttattccattagtcatgattggataaagcttttaaagaaaaatccccaccccttgccttactgtgccacgaaaaattcctgagtgaatgagcgaagccacccacttgataggagccctggaggctgcctttcacatggactttcaggtgggccaggccctgtatagaaccccggccctccccatagtgccctagaaacacactaaacacgggagcgtgtgtggtgtgtgtgtgagtgcgtgcgcgtgtgtgcgtacgtgagtgcgtatgtgagtgtgtgcgtgcgtgtgtgtgcatgcgcgtgcgaactgaatgcatgcgtgcgcgcatgtgtggttgtgtgtgcgtacatgtgtgtacgtgactgcttgtgcgcacgtgcctgtgtgtgtgtgtgtgtgtgcctactcccatttcaggagcttgccctgcctgtttgatttttctaaagattgacactctaaatcccctttctctccaaaactctcttggggtgatatggaagactcctagggtctccagttttaccatattctccctagtccacacagaaggtgtccttcagccacataaaatgggccactcattggtgctggacatcctcacgccattggtgctggtgtccccatgtcgctggtgcttcatgtcacgtgccgttggttctgggtgtccccacagcctggccttagggtgctctgtttctttatagttaaggaattagctcagctgacagggaactaggtaagagtaaagtctgataacatggaaaatgttagtgcacatttgaaaaaaaataaatttagtaaaaatgttgatatattttaagtttgaatgacaagacttgagtgaatttttcctggttaatgttgtgtcttttgattaagccatttcaatggagtgtacatttatattaactcttgatgccttttttatttgccgtaattggattagaaaataagatcttttctgtagttgatakaactttgttaattttattctctcatttgttttccttaactcaaaaatggtgagtaaagatcacgatgctgttttaaaatttaggaagtggtgaaccatcaagaggataaggttaggtgtaatttgaaggatgattatgaagtgagggtttatgcagatttgtgcaccagtgtgtacagtagggaaacggagggttataaccaggggcattctcagagtttgggcaggatcaggcagcgggcagagctctggtgccccatcaggcggggactttggggggtgctctctgctctccgtgggctcccacatcagatgagccaggtggctgggaggggccctgcgtgcccaacacagtggctgaggggctgctgctcctgccctgtgatgtgtgctctctccccagcctggatttccagaagaaaagacctctgctcctcctgtctttttattctttattggcctggtgctgggcacttagttggagttcagtaaaggtttagtgagtgaagaaggaaaaaatgttacttagaagtgttttactcgacttccttgatctggaaacacacacacatattgtaacataagaaaagttatatgcaaaaacagttcttaaatgacacctcgactaagacaaaacacagaccttttcttttgtggttagtgctttttcgtatttcatttaaaaacaaaacaaccaccaaaaaaccttccctacctcaaggccataaagataaccttgtatattttctcttaaggcctttgacgttttgtctttcatacttaagcctttggtttttgtgtggggtgcagggtggggatcagtttcattttcttttctcattttgagaaccataatgtttgacactttacaccctttctctgggatagctgtgcggccagctcatcctccaagttcaatctgttttggaccctccctgtgctcagctgctccagagcctgtcctggggccagcagggcactgtctccttgacaggcgctgcagccgcactcccctgtctcagccccctccctgcaattgtcccagctcctcctaagctgtgacttgtctagagacaagttcctttaaaaagcctagcctgaaacttgattggaattgcattgactctatggatgaatttgaaggcagggttggcatcctgacagtatatttgtgtgtgtggcttctctttccctccatcaggtcttctttactgtcttttttcaatagatttttataattttctctataaaggtcttgtacgtgtcaagttagatttattctttattctttggtagattgtagttgttttgtttttctgttgcagacaatacgttttttttttaattaagttttcccttgctagtttttggaattgcagttgatttttatattttatttttatatccaatcatcttattaaaatcttataatttctaaaaatttttttctgtaaattcttcagggtttctaagacaaagactgttaaagtaacgatgctagtttagtgtcttcctctccaattcctgtgtttattttccttgtcttactgtgctagctgggaattccagttcagttttgagtaagagcagaaatactggacttccttctgtcgtccttgacattaaagagaagatttttaacatttttcccaatttaagtatgatgtttgacataggttattttagattccctttttcaagttaagttcatggatagctgtgttccattagccaaatgcttttactccgtctgttgtgatgatcgtatagttttctgttctaattttctgttaaacttcccttatctcttccagtggattcagcttgtttgtgataaatcttgtcattttcatactttgctagcgcttcaggattcttcatctctgttcttgaattggagtggacggtaattttccttttttaaggtcttttttttttttaacttacagggatagtttatttaagattagaattaattattccttgaaagtttgtaaaaattaacctcagactatttggggttcatatttccttggtggtttgatgttttaactactgatttaacatctttaatggttactgataacctgaacttttaattcctgtcatatggatttaaaagaaagtttttaggagtcctacttaatctacgttttcaattttattgtcatagatttgcttctggtgtttacatctttgctggatttgtctctgtgtacccgttttcatttacaacatgacttagtcttcttcttgattaatctgtattaatcgttttgagtcactctggctttgtggattcccttagttgtaagtcagctttctgtgttttaaatgcctgctcttatcttcctggtactttctgtggctggctgcacccagtgttctctctctcccgaggttggatgtgcagctcccattagttcttagccttccttctgttataagctacacagttcccttgaagtaggcattgggtgcatacaacaagttttgacacttagcattttcatttccatcccaagtttttaaaaggtcgtgtcaacagtacacctttgagatgatgtaaggaggtgccacttggtctctgtgaccttcctcccaaaaacatacaaccccatctggtcatgacatcaaacaaattctgattaagggacattctagcaaacacccaatcaagtactttaaactgtcaaggtcattaaaaacaaggcaagtctgagaaaccgtcgcagccgaaggagcctcaggagtcaggaggataaaggaaggacagtggggtcctgggtggggtctcagaacaggaggaccacagggaaaacaggaaatccaggcacggctgcagttcatgctgatggatcactgtgggctcacgaagtgtgacgcatgccccatcctggtatagacgtgatcaaatgcctcgtattgtccgagaggtccccaggacattccctgcccaggccagtgtccaactccctgtgcacttgtccttcctgcttgcatcagacactctcctgctggggtcactttctcttttctttatgaacacataccccttaggagtagctttagtagacctgttggtgatacagtccttgcgtgtgtatgtgtgtctgatctgaaaatgtctctatttcaccaacatgcctgagtgactgttaggcaaaacttggaggtgagttttctttttctcctttcatcacgtttggtgtattcttctcatccttggccggcctacctcagcatagcagccgctccttccttgtctgtctgtgtctcactggctgctcgtcacatcttcttttgtccttgatgctcccagttttgtcagggtgtgtttgggtgtggagcaccctgttgtcttggcatatgtttgcctttgtgtctgtgagtttgtgtgttttatcagtcctggaaatccgcagctagtgcccctttaaatattgctccatagtcttccttccttcccttccttcccttccttcccagtcctgcagagtcagctgtcacacctcctcaggtggctcttatgggttttcaactctccytggacttttactttcagaatacaaaatacaggatttgggctctccttcatttttgtattttgattccctctgctcagctgatttcttcgtcaggatcttctcactcaccgaatctcctttttatttttgcatggcatttattgcttaaatcattcattgagggttttcttttttttaaaatgcatcaattacacttattatttttgaaagtctactttgttcttttcctaaaatgattaattttgacaattctgttgcttcctctgattcattacttaaaatttttcaagtattttcataaactttttatttaatcaaaacatacatggggaaaatgatagtgaataaagcattaagagattctttgaaagtttcagaaacagtaatcgtaccatttctcatgatatgagtaactgaagaacttgactgtcttttgatgtgtttgctgccttttttcacttctttctgtgttggcttgtgtttgcttgggagcgtatgtctcgctggtcttactgtttggaaatagagggatgggagtgaggaggccgttcttctgataggcatgccacgtgcatttcctgggagctgccctggactccagcccctgcatcctgaacgctgcagctctgggctcacctcggtcctgacccccatgcagtcctccacccgctgccctcaactctcctgtcagctcgagttgcttttgtttcccttaattatatatttctggcttgttggagggtttccttactgctggtgagcccagcagtgtgacagaaggtatgtcttatgcagaacctggggtttccacagcacaagagcctgtaagatgacttgtctgccacgtccccagaagaggaagtttctagtacttcaaaagcccaacctttggccagctttctctcagccccttttacccagcttcgttttctccccaccagctgggatgacaggtcccgcggcggagacacttgctggcagccggcactgctcctctgcctccccgcacactagcgaagccccagcctcggtggaaccccttgctgtaaggcttctccttccttacccaggaagtgcaggatgccagggaagagcaccggctcagcattctggccacgctgcacagccgcgaacttgggggcccagccgcggcgcgttctccactcccagcagggatctgcccctcccacccccagcatggctgtgttcctccttagcgtggctctgtccccctccaccgtggctctgtgctcatccagctgcctgttttctcactgtgtaacgctttctctgtaccatctgcagtctttgaactttgaactttgaacctggccttccaggttgccatgaaggtagactgtagattgtctaggtgtggggtgggatgtattttatttgatggcttggtagactgatggatgcatttagacgacttgtctctgggcttccttcatgcttttgatcccatctctcctttcattgtgaatatcctctcattttccttgtaagttttgtcacttgtctctggcttcctttctgagcctctaaatataccctaattacttacattaaaaaacacaatgaaacaaaagtttcccgatcctgggtctccccagtctgcagcccagactctcctcagcttcctgtgggagggctgcttgtgtatttacttttgaaccgggacactggtctccaggacactggagagtggaagggcctctggctctggggcgtgggcgctcaccgtctggtgcctttccccctgcagatcctggaggccccacctcccacccagtccctactgtggtggcctgctctgtgtgtgctgggaccatcttcatgcaggggcatcttgcctttcacctgcctctgcctctgttggcaccggatgcccaggggcacctgatgggctttcatgcatgtcacctggcgtgtgtggaagctgctctcagggtcacccctgactacgagggccacaatgcacctgcccccattcctcagggaggcagctctgcgatgctccccgaggccccgcggagggtccccgtgatggagcatgctgttggccatcactgggtcagcacagtggctcagggctgcccccatgcgttggctcactctgcccactccctggcccgctccctctgtccctcacccagcatcccaaaccacattcatcagaagcgcagccagtcctgccatcggtgtcctcggctccgctgtggtcggctccctgtagctgggctcaggaccggcactgtcctggtggagagtcctgcttcagacaccacttgggctcctctcagtgtgtctgcggcctgtgatgggcagcaggtgagtgtcatgtggagagacgtggaaagccactgggcgtggagaccgcagcatggacttcacagttttcagaggccctggggtgcagaagcgggaactgtgactggctgggggcccctgcgccgacgcccttggcgccttcggggcctcaccgctgtagatcccgaggcagcactactgtcccccagcaatgttggaactgctctccacttctccccggcactacatggcccctccagtcagcccaggcattcaagccagaagctagcaaatgtattttgcttttcttctcctaactcccgacagcctgcccatcatccctttgtgacagtgcttccaccaaaacgccatcaaggccgcctgatcctctccaattccatgaccgcccgtggtggccggcactgctgttaccgctcgcggaagtgggttgccaaacacagccgttatgaaaacgaaattagctaaacttacgactaaataagtcacattaaaacaaatgcaatcagtgcttacaactctgccttcctgatttctgtactgcagtgctctcttctctgctcgcagggcttttgtgttcttatggtggaaacgcccaggtgtggtcaggccccttctagcctctgccggcagtggcgtcccaggcccctcgcggtggccagcccgacactcgctgcagcctcgtcggcactgatcctgctcatggggggcggtagccatgagaccaggctttctgctgtttgaggagccccgcagctcctgtacctcaggcccgcaccctggscacttctgctgccgggagccccttcctccggatctcagagacccagcgtcatgcagagtttttttagcttaagcctcagttcctcagagaggcctttccagccagcttgactcgccagcccctgccctcatagtcctctgcgggccaggcccgtggtgtcctcttgtagagcgcattcttccactgactgtcaagctccctctgcaccctcagcctcagcattgctcctgcatgcgtggctgactgtgggcgagcgaatcctggaacatcacatgttttgtttgtggagtggtgtgtacattgtttgtagagtggtgtgtacattgtgtgtagagtggtatgtacattgtagagtggtacgtacattgagagtggtgtgtacattgtagagtggtgtgtacattgtttgcagagtggtgtgtacattgtgtgtagagtggtgtgttcattgtagagtggtatgtacatggagagtggtgtgtacattgtagagtggtatgtacattgtagagtggtgtgtacattgtgtgtagagtggtgtgtacattgtgtgtagaggggtgtgtacattgtagagtggtgtgtacattgtgtgtagagtgctgtgttcattgtagagtggtgtgtacattgtttgcagagtggtgtgtacattgtagagtggtgtgtacattgtagagtggggtgtacattgtttgtagagtggtgtgtacattgtcgagtggtgtgtacattgtttgcagagtggtgtgtacattgtagagtggtgtgttcattgtgtgtagagtggtgtgtacattgagagtggtgtgtacattgagagtggtgtgtacattgtagagtggtatgttcattgtgtgtagagtggtgtgtacattgagagtggtatgtacattgagagtgctgtgtacattgtagagtggtgtgtacattgtagagtggtgtgtacattgtgtggagagtggtgtgtgcattgtagagtggtgtgtacattgtgtgaagagtggtgtgtacattgtagagtggtgtgtacattgtgtggagagtggtgtgtacattgtagagtggtgtgtacattgtgtgtagagtggtgtgtacattgtagagtggtgtgtacattgtgtagagagtggtgtgtacattgtagagtggtgtgtacattgtgtgtagagtggtgtgttcagtgtagagtggtgtgttcattgtagcatggtgtgtacattgtagagtggtgtgtagagtggggtgttcattgtagagtggtgtatacattgtgtgtagagtggtgggtaaattgtagagtggcatgtacatggtgtgtagagtggtgtgttcattgtagagtggtgtgtacactgcgtgtagagtggtgtgttcattgtagagtggtgtgtacattgtttgcagagtggtgtgtacattgtgtgtagtgtggtgtgttcattgtagagtggtatgtacattgagagtggtgtgtacattgtgtgtagagtggtgtgttcattgtagagtggtgtgtacattgagagtggtgtgtacattgtagagtggtgtatatattgtgtgtagagtggtgggtaaattgtagagtggcgtgtacattgtgtgtagagtggtgtgttcattgtagagtggggtgtacactgcgtgtagagtagtgtgtacattgcagagtggtgtgtacattgtttgcagagtggtgtgtacattgtagagtggtgtgtacattgtgtgtagagtggtgtgtacattgtgtggagagtggtgtgtacattgtagagtggtgtgtacattgtgtgtagagtggtgtgttcagtgtagagtggtgtgttcattgtagcatggtgtgtacattgtagagtggtgtgtacattgtagagtggtgtgtagagtggtgtgttcattgtagagtggtgtatacattgtgtgtagagtggtgggtaaattgtagagtggcatgtacatggtgtgtagagtggtgtgttcattgtagagtggtgtgtacattgtttgcagagtggtgtgtacattgtgtgtagagtggtgtgttcattgtagagtggtgtgttcattgtgtgtagagtggtgtgtacattgtgtggagagtggtgtgtacattgtgtgtagagtggtgtgttcattgtagaggggtgtgtacattgagagtggtgtgtacattgtgtgtagagtggtgtgttcattgtagagtggtgtgtacattgagagtggtgtgtacattgtgtgtagagtggtgtgtacattgagagtcgtgtgtacattaagagtggtgtgtacattgtagagtggtatgtacattgagagtggtgtgtacattgagagtggtgtgtacattgtgtgtagagtggtgtgttcattgtagagtggtgtgtacattgtagagtggtgtgtacattgtgtggagagtggtgtgtacattgtagagtggtgtgtacattgtgtggagagtggtgtgtacattgtagaggtgtgtacattgtgtggagagtggtgtgtacattgtagagtggtgtgtacattgtgtgtagagtggtgtgttcattgtagagtggtgtgtacattgtggagtggtgtacatggtttacacacgtgtgtgcatggggacaagacttggatggagtttgccatcccctgttaacagcagacagttccaggatgttgcgtcgcatctttgttgtgcctggtgtcttcctcacgcgggagagaggcccccgagcctcctggcagaggccacaatgcacctgctcccacaatgttttccttaccctttttaagttgcttggaggcttcagcatttgggaccaggtggggaggcgtgcagtgcccgggtcacctgcctsccttctgtgcccctggctcgcccatcggagggaccagtcggcacggctgagtcatgctgactcaatgtttcatacagtggagctggcttcccagaaacagctctgtattcctctaatgttcttcgtgcatgtaacgtgaagtggagtttggggcaaaatgtgctttcagggcttgtggccttctttccttctttaacacagcgtctcgggagtacgaggcactcgcacatcagctttgcccccactcttgggttgctggcattgttaaaaacgagagaatataaggtagaaatttccagatgcctttttttttctttgaccaacatgtttttcagggttgatgccacaagaaccagcacatgtctcaagtggcataaggagatttcatcagcatggccagttcttagctgacgagctggaatcccagggtgctaggaaacacaggcactttggggttggggggtgctgtcctcttccgcaggagtggaagggatgagatgctcccgagaggtgggatccgcactttctgtggaccacagttattgatcctagaattcggggagggaaacgtcagacaggccactcatggtttgtggccactttggaaacattagggaagggtcctggggaaggcgtggagaagcccggtgagagctggccattcatcctgagggcgcggtttccacctggactctcgtggtgagggtaggggacactcctcactcagtcgcccccatyccatgccccctgcgggcctggcctggtgtggctggttcttgtccccaggtcccctgctctcaggagaccttcatttgtgggaggcackgtgggggctgtgtgagatttctggcttctgctgctgctggagctgtcccagctcactccaccctgggctgctcccacccctgcccttctgctcctcaccccgacagtgtcctctctagggagaggttttctgctgggacgttggagagaggacagacttcagaggcagagagacgggcctgaaccccagcttttctgcctagatattgggagcattacttagtttctttgaaccttgattttctcgtctgtaagatggatgtagtagaactgcctcatgagtttattataaggctgaggggatcaagtgtgaatttagtgcctggtgccagtttgttcattgatccctctaatgagtcatttgttcagtcactgttttcagctcagagacgtgagcatctcctggtcaggcacagacctcaggctttgccttcttagcagcccagagtctcctgggagaaacagcaaatcaggcactttgcttttgcaagcaaaagccattatgaaatttgagtttgctgatgccctggaatcaggaggggagccctccggcctgtgggccctgctgccccattacctccaaccactttccccgcctggggcagggtgtggccccacaccagccccacttttctttctttctggtttttcagtcctgccggcagcatagtctttttatttgtttgtttggaagagatagggtctgacactattgcccaggctggcctcgagctcttgggctccaggcgccctcctgagtagctgggactacatgtccacactactgcacctggcttcaggagtgtggtcttcccggccccggccccaatggtcctcatgtttaaagaggaagagagccacactgatgggcaggaaagccgtttcctgaaggaaggtccagagccaccttagaaggtgaattaaagcaaaccacagccttcggccacttattttgactgacatgtggtacaaaacatgttttttgtttttattgagacagtctccctctgtcacccaggctggagtacagtggcatgatctcgcctcactgcagcctctgtctcctgggctcaggcgatcctgctgcggccttctgagtagctgggactacagctgctcatcaccatgcccggctaatttttgtcttttagtagagatggtgtcttgccatgttggccaagctggtctcgaactcctgggctcaagcaatctgcctgcctcagcctcccagaatgctgagattataggcgtgagcccttgtcctggcccaaaatatgtttttacattttaaaaattatccttttctttaccaattagattgtcaattttttttttaaacaaatgctttctgtggccttgtagaaaatactggttggtgggcacctcttcttggaagactgccactggagggtcctcagggtgaagtcacccccacttggcttgatgctttgttaccagtctgtttttttttttttctttttttctctaatggtgggataatttgaaaactcaaccctttccagccaatggtgagcacctgttcatttctcaagacaccctgagcctccaggtggcctccaccagcggggagccgagtgtgcggctggagtgtgtagctggagcgtgtggctggagtgtgttgctagggtgtgtggctggggtgtgtggctggggtgtgtggctggcctgctcaggagagacggggagccgagtgtgtggctggcgtgtgtggctggagtgtgtggctggggtgtgtgactggggcgtatgactggggcctgctgagcggagagtattctcagttatttgtttccggcagatctgagaacctgagtagtaggaactgcttcaggcctgggtcccggcccgggtggagttgctgtggaacgcaggtgttttctgtgtgagtttgctaagcgctgttgggcgttctggaagtgtctttccaaagcagacattatcaagccagggtccttgtggctacaccagrctgggcggctgtgtggcccttttaggcagctagaactggcctcactggttccggggatgcgtgcggtgagagtgggcacatgtccggtgagcttgtggaagtgccctgagaccctggttcctgctccggagtacagaacgtgtgatgatcagcgatgggccaccrtggcgtgactggcaccaacagcgcagagaccataaacatgttccttcctgctgaccggcccgtactcccagggtggtggcccagggcctgtccacctgggtctgcacttctgggcttccctgtcgtttccccagcttcccttctggtaatgagcttggtgctcctcctctccccacctctcacccttgtgcctttggaaaggccttactggacagaccgggaacaagagggcatctgctatttctggggagcttcagaagctgagctcaccgggctcggctctgggagcatggttgtcctccaaatacatgttttcttcttttactgatccttctgctaacctcgggaccccactataccaggtgctgggtacaccaaggtgagcaggaccccgtccctgctttcaagaatggttaagagaattgcaaaatattagtgccgtgcagagtcccaggtgccaccagcaggggcaaatgcaggcccaggagggcgcggcagtggaaaggggctgcacagagcaggggaggctccacagctgactctcgaatggtgttccccaagggctagaggggtgtgtgttagggggtcagggttgggggattttgtggcacggtgacagacagtgttgcaagaagaatgaactcatacacagacctgatcacttggtggtggcttcaccctggagcctgttgtcattccccctggcctccctctgccgtcttgcctcgcctggctctgctgctctgctggcctctgcagccggcctttgtctgggcagcgagcagtgtccaggcagcagacagcgggtagtgtccaggcagcaggcagtgttccggcagcaggcagtgtccaggcagcgggcagtgtccaggcagcaggcaatgtccaggaagtggcctgtgtctggagagcagatggtgtctgcggtgtatcggtgtctcatctccagctagagggacttaggtccccatgactggtgaagccgtttcaggaacagcactgatgaccaatggagcaatctctggcctagttgggaggtccgtcagggctgctttgaaggtggcacaggccatacatgcagaacccgggtgcctgtcccactcctgcccccgtcctgtggcctggggtccagacacagggagctggaggcagaggggctgctgagtcagttagacaggcctctctgttggcgggaccacgacttgacgccttctcccctcaacacttccaaggcatacttgccaagggtccgcacccgctctctggttcggggcctctccctgcctctgtaagactggtgcagctgctctaacttgtctgccatcttcaggttctctgcgttgccaccagagtgaacttgctggcgtgggggtcggtgtctgccgtgagtcaggtccctgcgcagtcctccctggcagtggaggaacactggttctttgcctggccccagggcagtcccagccccagaggtccctggcctgcgctggctcagagcatgctggccatctgcttgggcggagcctgtccaccaccgcctggtgccttcccgcccatccttttaaggcctctcctcctctgggaagctttcccaaatgaggcaggcgacagaggagcttcatcttctccgccccataccttcagggtggcacgtggcaccatgaggagctatctggggctcccctgggtgtcttcccctccctgtgagctcctggaaggcaggggtcctggcgttctatcttgccttcttgcatcatgggtgtgcctggcagcctgaggggtggggagtgggaccaggcactgcagaggcccccagcctcactctgaggctggacctggagtcgcagggtggcagtrccgaacccaggtgtgccacccgcacacacacagaccgtgcaggcaggggcggtggctgctgttcttccatgtgtgtccccctcgtggcggccctgcattgctgcctgttggtggggttagggtctgctgtcactccgtgggccatgacatcgccactgccatcacatttgcagagctccgtgtgcatacatgatagcgtcccgaccaacagcgcctccggtacacaaagccgtttcttggtgaatcagcaagtctgggctcctgccgtttctgggtgagccctgtgcttggacagttatgaatcatttgcttgcctcttgatttgcgtcaatcaaaccacatgtgaagaaagcggcagtgagcagcgctttgccggcagcctggctccagcgtggggcggcttgccagggacagcctcaggaggccagcctgcgcggcctggtggtctgggctgagggcctggggtggcttcggcccacggggcttccggccggcccccaccctttcttcccccgatccccgtcagccacgggagatgggtgagatggtaatgatagcgtagcgtgtgctggcttcctacgtgtaatcctgtggccaggggcacatattcgcagctctgggaatgtttatggttggaagcccctccgctgatctgttcttccctctcacacaaaatcactccaggacagggctctttgcaaagattacttgtaagaaagccttaattaaaaagagatgtcaccatgcccctcccctccttcaaaccaagaggagcagcagaagggggagtggcccagggtcagaaggacagctgggaggagcgtgggggccaggccaggcctagggaagggccatccacctgggacttctgagccttttcttttctggagcagctttggggatgaggcttgccctccgttgagtcacggtgacagctctgcactgtgctgggctgagagagccccgccgtggagggccatctgggaaagtagggttcccagggccccccagcttcactggcttgctttgctttggttattttcgaggtaggcaaatgaggttctcgtttttaccgtgaaggttacttgtattgttgttgaattagctgttgaatggtagctgttgtcctagtttcctagttagtcatggctgtggctcgtggcttagagaccagcggcgccctggctcattcccatctcttgcgggggcccatacatgattcgtccttaaaactgggaggggacgccggggtgcactgggcttgtcctgtcgtttggtaatgatcacaagtgtgtttatatgtgactcttccagggaatcgtggaaacttagtggccatgaggtcccctggctctgaaatttctctctgaatgagctgggagggtgtaaccttccacaattgtgagcccaggtttatgtttgcaacaaataataaacagcaaaacagaacagagtgatacccccgtccaaatctagcaccttcactggctatctttcattttttattacggaaaatttcaaacatttacgaaagtgaaaagacaataaggagcggactaggctgctgtccccatcttcagcgatggctgagcagggccaggcctgcctcactgtattgttccaaagcagttctaccgtcatgcaggtgtcttccgaacatgcgaccctaataccattgtcacagctttaacacatcaacacgtgaatccatcaaataatcagtcatttaaaatccccattgtctcaaaaagttttcagtctcttttctttttgtatgtggctgttgttcaaataagtgttaagtaaggttcgtgggttctaatgggccactgtcacttgtgatggacacagccgtttcctccctcttgctctccagtctatttgttggggagcttggcttgtcctgttgtgtggccacggcagagctctcactgcctgtgtccatgtggcgtgttgagcaagttcctcctccctctctttctggtgacctggcggttgcagctggagcctgcgccggaccggggctagttggcaagactgtggcatgggggcgtgggcgttctgctgggtgatgagcgggtcctgaaggtggctgtctagcttcattccttccttcctgggggctgcagagtgataatccaagacactcactcctgaatcaggtaaaagacttctgcagagaggaagtgccctcatcagctcttcggctcacacaggaaaggctttctttatttaccatctttcagaggaatgagctcgttgctttacatcatctgaaggtcactggtgagttttgtcgtttgtttttgtgtgtaattgtgagcttgtgggtttaagtgtgctccatgccttttaggcctttgctgctgttactctcattgatgttcaccttgtcctccttgatccacgaggccctgtggagttggcccttgagtcttttggacataacccttgcagtctttgattgcttccttgctctgctgtgacaagacaccttgtcaccttgtataattcctgtccccggaatttatctgataatccctcatctcagtatccttaatcacatgtgtaaagtccgtttgagcatctaaggtggtgtatttctaggttccgggaatgaggatgtagaccctgtgtggggtatcatttatccttcctgtgctcagccctcagacctgcaggtctggtctctgactctgccgctcatcgtgggcaactctctggccaggtcgctagggagggaagaagccgttgcaggaatatagggacagcttgggacgagagggccagggtagatgcctgtctaagggtctagggaggtacagaggtgagcccctctgctgctcttgtcccctacagttgcctgccctgctctgccagagtcagagggcatcgcctggggcacccacagcagcagcgcaggggtgcattgggggtgagtgcagatggttggctgcgagaggttccgatgctgggtttgacagtcagggtggtcttgtatctttttgatcctggccatccttgtggatagaaagtgacatcttattgtgattttgatttacattttcctgaggttaacaactagtgatgacagtcatcttttcacatgctcatgggccattgtgcatctttggagaaatgtctgtttaaatcctttgctcattttaaaattagattatttgcctttttattgtttgagttgtctggccctttatattctagatacagctccttgatcagatatatggtttgcaaatattcttttccattctgtaggttgcctttctggatggtgtcttttgaagctcagaagatttttattttgctggtatcctgtttggctatttttttcttttgctgcctgtgttttggtgtcctatcagagacatttattgaactcggattggattggaacgatgatgtgggccccctcttggggctcctggcttttggcttctgttgaatgtaaatgctaaaaggcttctctgggctgttaggagagaggcagattttattgcccagccagcttctgcagtgtctaatggctagattcgcttttcccacagttgtttttaattgaatgtccgtgggaaagtggccaagtaaatggaaggtttcacagagagagctgggtttctttgttgattttttttgaaactgtgcttttttgtcattactgtgcagagtttgttggaatctggcgccaggttgtgatgtctgctgagacttgtattggtcttgttgagtatggcagcattgtagtggcttttcccccactcgaaacacaagttccaggaaatttcgaagctctgtgtaacttccaggtggacatcttccctgttgagaggttaattatgggacgtggagccatcagggactctgaatgtgggacacacatcctgaggagagaggccacgtcttggaaggatgaagggcaacctgtcttcggggtccagaactggactctcactcagcagctgtgccggcctcagccacccaggctttgtgtctgtaacatggggatgacgacagtgtctacccgataatccggagatccacatcgggggatggagagctctagggaggatgccggcagaatcggctctcatagtcctaaacacaatcaccaagatgaactgttgctttcatgtgaattgagtattcctcattattccaaacacaacagcactgaaaacttagaatgtgtaaacaaaaaacacactaagccgaccgagcacagtggctcacacctgtaatcccaacactttgggagaccaaggtgaatggattgcttgagctcagaagttcaagaccagtctgggcaacatggcaaaaccccttctcaaacccctactctactaaaagtataaaaattagccaggcatggtggcatgcacctatgattccagctactcaggagtgtgagatgggaggatcacctgagcccaggaagtcgaggctgcagtgagccgtgatcacaccactgcattccagcctgggcaaccggagcaagaccctgtctcaaaaaacaccaaaaaacatactaagccccaacctttttactggttttaaattctgaatcttgcatttccttcagctccaaattaatgagaaaagtgaaggttgtgtgtctatcagataaacccggtcctttgagttgtaagtattttcagagatttgtaactaattaggatatatttaatattaatgcacatatttgccatgtttctgaatgaggaacggacactgtattttccttgccaaaagctagcctaccagtgtataatttactctgtatctggggttttttggaggtctgtgcatattttggtttgaactaagagccacttaagtctgcacgtgctgctcacagtaacgctcacatctgtcgtatccgtcaacaggtcgtcttactcctttccattaagtagatggtttaatgatttcagaaatgtcagatagttccctgttagtgcatgtaagaaattatacaaatgctgaatgcaagtagcacatctttgtttggaacaagggagtggtccagttccgaggagacttgaaagcattataatattcctgattaggttataaatgtctaggttttttagcccccggactatttcagcttattctggattctcatttttaaaggcctctttttctctatcgcctcattctatctcattttaaagtcttccttttctctatcgcctgcttcactgtgtctcaccatgaaatttcctgtttttctgcatgttgccagctctgctctttctcctttccagttgaatacatcggggggcagctaatgagcatcccattgaggccacagcgagttctttcggcttgctcagaatttccctctccaaggtgtcaccaacggcgcttttctgtttccgtcatccattcatttttacacatacggatgtggacaggccacagggtccacacagctgctccagtgcagcccgagacagagctgatggggcagcctccaggactctgggtccttacctgctgccgtgggagtcatcaggctcctgaaaggctggtgacatcctgagctcatccagagagtaggctctgggacctcaagggccacctgcgtgcagttgactctctctcagagttgcctgttgtgttttgtgtaaggacatcattttggggggcggggagataagtcaggtccactcgctgctcttgtctatgaagccctgacacatgataatgtgcaattaacaaagtgctgggatgagatccgagccagccttgggtcgtaagaaccaaacccatcattgctggccttgtaattatactgttgtgtgtggacagtttgtactttttcccttttcgagcaacttggaagatttgctgtgtctttaagttgaaatgacttgagtcatcttcccttagaaaccttctgtgtagaaactcagcctctgaacacacggtgacccggcagtcccggccacgaggtgaccagtacttgatatttgtctttttaggaaagcgcacgggctcgcagtggccagcccactggggcatgaataaggaccctcctcctccaggaggccagcagggcctcatgcttctcattcagtggggaaaactggggttctgaagaatggagcttgcagagaattcctgcagactggaatggagtttggcactcagctaaaaggtgttgaggtgacacctgcaggagttacctggccagtgccaggaagtcagaccccacccttccttgggcacacagacaatgtacaatatttgctaggtgcatgcatgcatgcacgtgtatgtagatgtgtgaatgtatgtgggtgtgtgaatgtgtgtgggtgtgtgaatgtgtgtgggtgtgtgaatgtgtgtgggtgtgtgaatgtgtgggtgtgtgaatgtgtgtagatgtgtgaatgtatgtgggtgtgtgaatgtgtgtgggtgtgtgaatgtgtgtgggtgtgtgaatgtgggtgtgtgaattgtgtagatgtatgaatgtatgtagataatgaatgtatgtacgtctgaatgatgggggtgcttggatggcttccatctgctggtaaattaggtcttagtgtgcacagtaagagggtcttctaattgaacgtttccaatggtagctcctagaatcaagccgctggaagctcagctatggaagtgatgggtccttgagatttcttgccagtgcgattagtctttctttaaaagccagctcaattccattcttctatgtcgccatttctttgtttctttccattttgtgggggtagggagcctggcaccatccacctggtgccctaaggtcccctggtaggcttctgcacaaaagcttgcctgtctgaccctgttcttggttgacaactgatgaaaaggctaagagaagttcagttctcacacctggatctctgcggtttcctggggagtcctgttcccttttctctgtccagccctcctgaggggctgtgtccctgacaggaaatgggtggtcacctgggattaccctgtcttccttggcctgcaggccatctagtcacagggcaggttcttctgtccctccaggtggtcatgagcaccaaaccgattgtactgtggaaatgcttggtaaaagccagcagggaagaagtatgttgattcctttttgtggtaagttagaactcagagagaaatttgtttactttcatgatgaatatctttatccttgacatgtggcttatttactcagcgtcttttcaaaatcacactttatcctgagaaaaatctagacccaagtctaatctctgatctcttgggtcactcttcacagtgtggaatgggccctgctccttccaggacaggcctgcctagggctgtcagtggggcctggcccgccagggccaccgtcctggccaccagcccgagtctgggagtggccagcgctgttggcattcccagtttgctgaggaccaagttcacttcctccagcacccattccaacttcctaaggagaaagctcagcagcgagaatgggatgaattgagcaaataaaaaaaattacaaccaagtgaatttaaacccctctcaaaacattttctgattattctggtaactctttgacctaatttggacaacagttagagaaattcagatttatgcctggaattcaagtatagcctgtagcttggtgtgtgtgttttaagtgcttgatatttgtctttttaggaaagtgcactcattcttagacgagacggtatttgaaagactgtttggaatgtgcagaattaccatgtaagaactcagaagctgggaacaatggcaagcggctggctttgggtggaaactaaccagctggctggagcagtctctgtccttgacggagggagaagcctgcgaggggatgcagaggacctgccccagggcagagctcttygtgaggggcctcgtccctgtgatttgagtccccattgccgtgtagaagggcgcagggcccctggcacaggcctcttctgtggagccctccaggtctgccttggctcagggctccgcctcctggtgaggaagtgtcacggagctgtggtttaacgtttccggtttgtggctagtttcttgtgtgtacaactctctatagctgtgccaagcccttccgggaacagttgtagatttttgctgccttcagcacgtcctcaagggtttggggagtccttgctgtccaccgttgtatctggggaccctgggcaactgctgagtggtgccatgggccctggtgctccgctgggaactgttggccactggtgctcttcagactccatcggcttcctcgggagggtctgtatcagaggccgtctgtctggtgtgatatggacgggtgtggtatgcgtgtccatggtcacggattagtgtttacgaagtgtaattataggtgcagtggatgggaactttctgtgggccgggcactgccctagatcctggacggtggtaggtcccaccatctcccaggtcatagatggcaacatcagaggtcaagtaatgtgtccagtgccacaggagtgctaggtggtcaagcggcaccccccatgcagtgtacagctgccgcggagaccatgtgggcacttactctccctctgcacagctgtgagcaccagctgtgcacagccactgtgcccaggatgcccagggtggtgtcctgagagattaccagtagccctgccttgtcccctgtggcttaggggacctccagtggttagggctgggggagacgaaactaatgacctggtgtcccctggggaaggccacagcacctgggtgtggggtggagcaggagtcccaggagctatagaggccaagcgggtgccttgtagacaccgtcagtgctggctaagtgaaggaagagcctcttccactttacaagctcacagtcccctttgggctacctggaaatggtgacattgggagggtcccaagaggcagatgtagaatgtggagacagagggagagagggtgggatgtgagctgtgagctgcagcgcttgcctttgggtgtgtggaagccatgatgatttcttggccagtggcttataatttcccagagggagcaaaggtgtgtgtcatgaaatcgtggactcttgcctcgggacagctggtatgtaattgttagcctcatttgtcctcagcagccccggaggcacctctggaataggtgggggtagcatggccagcacagggccaggcccccctgggcaggtgggctgtgaatctgtgctgcaggcaggatggctgtgcggaggtcatggagggctgggcaggccaagccagtggcttgcagtgcagggcattgaggacagtcagaatctcagtgtgggctcctgggaccagggtcccggcctatggagaatcaggggcacgtttcccacctagcggctctgctacaggaagtaggcctgcctggagtgtgggctccctgcctcgggcactgtgctgggatgccggcgaggggctatggcagtgtggtgggctccggctggcctggccccttggccttatggttcacctctggtctcagcagccttcactggctggcagcccctctggatgccacagcagcctctgcgcaggcttaggggctctgtgtccccctccctgtccttagagggggagctgggcaaggcaggccacgctcctgccatacggttggtgtatgaggatggacaggcagctcgctttggcctcacctcatcccaccaggcccaggaggtcagtactccagcctgatcggggcactgcccactcagcaccagccagcccatggcatggttccygcattcccattcacccccaggacctagcagaatgcttgagctcatgcataaccttaaaatggtgtttggaagttccaagaagcctggtgtctctgacactgttgtttgggatcctgcagagctggctgaccttgagcctgcacccagcctggtggctgtgtctttgtggggtgcctgtgttggtgccggcgctgtggcctggtgagcattggcatcacctsgtgttcctgctctgtcctttgtgcctcaaggctctgcggagcaggagagtcaggggcaaagggagggcctgggttcccgccccaccgcacctccccccaggagggctcttcacctgtcccacatgcagtgcccagaaagcacagaggggtggtgctgggaggccactaacagtggggtttttctttgattttggaagtgctgtttctgagtgggaggccttggcttctctggaggagtgatttattttgaaaccacacccattgctgggctaagattgacttcctgatacgaaagtctgtggcggtgtttgctgagaagtcacacgtttgaaggggagggttttatgacttcatctgtgatgcctctggagtactgtcagaggctgtgatttttcctgagtgtgctggacccatcctggggttggcacacatgtgggagccctgcttgtcacttgggggttaagggtgacctggagcagcaagtcctcccctggggcgggttcacagtggttcaagggaggtgggagagccccagggctggcccctggctctttggcccccatcccccactctccagcccctgtcaggctctgcacccctgtccacttcagcccgcattgggcctgccctgctctgcagggggaggggcaggagagtccatcttcagggttctctgaagctggacagttctgagaggcagcttccagctcatggaaaaaagaaagcccattgccacacctccagcagcatatgggggccttcaggtccccggaacaccgagtaggaaggaaggggcaggaccctccgacggggcagcagtgggccaggtgtcccccctgcacagtgtttacaccctgggacctgccgcaaggcatggctttcagaagagcctccccccaagaaatgctgcagacaggacggggcttctagagaccttggcttctacccaggaaggctgatctattcttcgactgttgcatcagcttcctcaacctctgcaggttcaggctgcgagccctagggagcatcactcaaagcaccctgttggccacttaggatcaggagggcctcggctcacccaagccatctccctctggtcgcatgtggttggctgtcctgtcagagccgtgggcagccacacttctttttccaagataaaccgctgcatctgcccagcgaccttcatgtgtagtcttacattagcacattcttaacagacatttagaaaccaaccaaacaaaatccagtttcctgcccccacggtctttcgctcttttgccacactcacaaatgtgagctgcatttggaaatgcctgtgcttccatttgcaaaccgaagctgaatggaacctggcaggcgcatctgytcctccgcagtggaggctggggcggcccgagcagaaagaggtgaagcctgtgcctgctgggagtccccgagcggcaggaactccggtgtctgggatggcctttggggtgtgaccttaggctgaggccagagcccgtctccccacgagctccccgcctggcctgggaaagtcagccccctcctttccagggctgygtcttcccccttttgttttcagtcattgagcccccgctcgaggatggcccccaccccaaaggtcctgtgtgccctgagtaagccactggctctcagaggtgcccacgtacccttcctttcagactgaggggagcagtggccagacagggctctgccttcacggagcttcccctctgcagagaaggggcagagtggcgtcactgggcagccagcttagatcgagcagcaggaggcgaggctcagccgagtcggacagctggggccaggcaggcggcttgctctgcatgcccaggacagcagcactgggctctgtccccccgtcggtgcccccgtgtctctcaggaaccccttcagatgtggttaacacctccaacttggaggcctttcctgactgtcctgaccctgtttattcttctctcccgtgtccttctagaacatactctcaggcaaggcatgaagatgctgctgtgtgtagagcctcacttccctgcccttgcccctgtccttgacagcagctccgtgcgggcctagcaatacccgttgggcatcagtgccaagagctgccctgcctgggggttcctggtggtgtagacgtggacgcctccacacctgtgcagtgaggcccatggggcagctccgagggggaagctgttcacctgctgcctgttgtgaagagaaggggtgatctccaggcaggggactgggcgggcttcggggcggctgatgtgcaaggggctgggmtgggcgggggtcctcagggtgggcttcgagacagctgatgtgtagggggctgggctgggcgggggtcctcagggcgggcttcgggatggctgatgtgcagttgcacagtggccccgtgcccttggagccattctgacctctggggcagaggctagggcrccgacacagcagacatgaaggagggtagtgtttttcatattttctagcagtaattgcagtggtgtgtatgtgcctgtgtcaccgccgcagcaggttctgggatcttctcttggtcccgagtgtttggggcagtgtccacatccttcattctctcgtgtcttcatcggcataatgggcccttcctggggcttggcttcccgggggcttcacgcgtagatctttcgtgaagcacagaagcttccaggctgtctcagtggtgccgtgaccttccagtgagggatccactccttagagcctcacgctctcctgctcaccagggcaccagcttttccaagagctgctgggtggatcccagaacagtccctccgtgtccttagtgcctgagcacaggcctcctcgtctgtgttcttgggctgcgagcgtggcccacagaatgccctgtgcccgttgcgccttcagccgtgtgcacccttgggggtgtcccgcttgtggtgcctgcccacccctgcactagcccaggtctcgttggtcccacactcttgcccagaaaatggagccaggctgaggatggggacatttggccaagagtgtcagagccaggctctggccccctcagagtagagatcagtcttgcctgctaatggcattacctcatctcggacctgggcaaacaaggcaagggtgatttgagaagatcctcgtctgtttctaattaaatttctatctctgctttcacaaaagcttctcttttatctcttcctcctaattatttttaaaatctcaaggaaaatacatcccttccacttacgattccgcagagaaccaaattgctactctgtttctaaagtgtgttattgtggtctctgatactaagccaaggtttctgtaatcccactaaaattttatctcacatcacagaaatttaggattcccccaaggagacaccacaggaggaaatactagcttataaaaagccacgtggataccttgtcgtgggtctcagtggaccgtggctccttcttgggccttggggtgagcgtggcccggcgtcactgcaggcggcgctggcgtggttgggagggtccctcagggctttcccttggagcgacaagggggcagatgccaccctgctggattcccacctagggcctctgtgtctggggccttcagggaagaggccaacctgtaggggccgggggctcacgaaggcagtgctttcatggcgccaggcaacccgaggaccctccgacataggcttttcgagactctcagttgccctgggcaggctggcagcagaacctcctggctgggccgggtggggggtgtccctgccgggctcctgccactgttaaggagcgagggaaggttctggggtggtttgagttggaaacctcgccttctaagagtggaccagcccactgctgccccttcctccccgtgggcctgggccaccatctcaccaggccctcttaggacgctgacttctgcttttcttcagcagggagaccccttgtccagccttgtctctagcccgtgggttgtgggggaaccagaaggctcctcctctgtggacctgaggctcccagcctgggaagtctacatgctggctggcaggctagtaagatgcccatttttggcaactgttgaagcgtgttttgtcatgtcctaggatgccccatggatgcacctaacagggtccccagggcctgcccacctcccagagcccaggcctgccacggtttgcttccgtctgtgcagagcctggctggctgtgaccacgctccatctcagcacacggcagctgctggggtggagttctggacttggtgccttctgtacgccctccttagtctcatctctagcgtgttacctgggctcgtgtacattctgttgaatttagttcctaaagtgcatttaggcctcggcagtacctgtctcacctgcacgtttcttgattttctgtttgcctttacagaatgggccagctgggctcagtcttatctttaacaccaccccggccaccccatctcaggaggctgaggcttaagcccagcctgggcaatgtagcaagatcctgtctctacagaaacaaacaaaacatccagaacgtccacctgaaaccttagtgccgcatcgagtttaggtgcatgtacctgtggggagcggagactgccgctccagccgctcccaggctggcttcygtctccaccccagtgccctggccttgtcatcttccacgtaggaagctgggttttcttggtggccgctgacaggataggcttccgtgcctccttctcaggttcaaggtgtgagtccccatcccagcaaagacagagccatttgcacaatgcaatgtgagccgccttcctgccctccatgggaaagagaggcagcgctcgggccccaggtggaaggcgtgcccagggggaggccaggcatgagaacactgcagcagggggacctcacatcccctcacatccaaccttgcaggctgcaggagcagagccggaggccacaggccacaggccacacagcagggccacagagaagcggtactcccaggagtgagtggcctgataggcatttgatagagacacttgaggctacagtgttgggattgctggcgggaagagagatgaggccagcaggccggtttggggcattctgtaccacgatgaaggataatagaaacttagcatgtttattggacaataaacagaccctgctccagacccgttatttgtaccacttagttaatactcgtatcagcaccctgagatccaagcgttgtccttcccattttatgatgaagaaactgggacatataaaacttgcctaagatctgacagctagtgagtgagggagtctggtttgaattgcacgtctgggttcagagtccacggtcttacccaccatgcgatgcttttgcatgagcgtgtgtgtgtgcgtgtgtgcaagagagtcgtcacagggcgcctgcagagtctggacacgyggtccgcagaggggcttccgttggatgggacaccccaacctctgtctttcagctgaacttcaccaaaaggaattgctcagcttatagaggtggcggcctggcatgcagttaggaaatcaatcacagcgttgsgggtggaaggcaagggagcggtgtcatctggctccttgagtcttcagccttccttcctgggctctggcaggagcttcacccttagatcctcttctccttagctggctgtcagatgccctctgtgtgacaaaggacgtttcactgtgtcacttctctcttcctctcctgccccacaaggccatatttcctacttgcaggctgtgatctagggactggggctcacgccataccacaggctctgggctgagaagaaactccttttttcttcaacattgtcagcagagatctttcctcttcattagtctttttaaacaaccaggttttggttttgtcacttcggtctatatctcttttctgtttcagtaagttctgttcttattacttcctttcacttttatgagtttaatttccgtttgtttctaagcctttgaagtggaacccgaatatgaggattttaaggccattttcctctatgcatggctttcgctgcttcccagaaaatttaatgtgtgctatttttattacccaatttccctttggcatataggtaatttataagtgtttttttggttgttgttgttttgttgttgttttgtttttgagacggggtcttgctctgtcactcaggctggagtgcagtggtgtgatctcagctcactgcagcctccaccttccaggctcaagcagtcccccacctcagccacctgagtagctgtgaccacagttctaccacgcctggctaattttgtgtattcttggtagagacagggtttcaccttgttgcccaggctggtcttgaactcctgagctcaattgatcagcccacctcagcctcccaaagtgttggggattacaggcgtgagccactgcatctggccaagtgtattttaaggttttcctagttcttttttgttgttgatttttactttagttgcattatattcaaaaaaatggggtgatacgctgtcaaagtcaggaatcagtacctgtgttaaagtctactttgtctgacgttaatattgctatgccagccttccttcggctgttatttgcaaggtacatatttttccaactgttttctttccatactttgcatagctgtatgttttagatatttccttgtgaaaagcatgtgtttgggaatttttttagtttatgttcttctatgcagtctggcagtcttcacttcggagtagagcctttagtttgtttacattgaacatgattgcctagaatgtttgtgtgcccatctgccatttcactgtgcccttactcctttgtcctgtctcttctgtggcatactttattatttgtcaatattcatttccatatatccacacgtgtaaacccttttcattgttctttatatgggtgttcatttccagtcttccctctgagatcaggtgtgagaatgtcttctggtgtaagatgatcagtctttgttggaaaatgactctttgaagaatgcccrtgctggttagaggattctagtttgacagttaccatcttctagtacttctaagcagtccttctgcactgtgaaagatattaytgttttctggtttacgtgtttccgttgagaaatcaccagtcatcctaactgctgttctttgtaggtaatcccccctccccctccacggccgtttttgttttcagcaattttccctggtgtcttttagccatttggggtagttcttggccagggtcctttcagacgtgcttttgacccgttcagtgtctcctttcctgtgtctgcctgcacattctgtctcggtgccttctgtttctccaacttcctgcccttgacttttgagatcattctggaaatgtccttctggcccaccttcctactcacaaattcactctagctgtgtctaatctgttaaatgatggagtccttaatttcactttttgcatttttcagttctagaattctcttttcaagtttccaactcatcttcttaaacatagaaatcatcatttctttaaaatctatttctaaaactgcckcaggatcttaaattgcattcaactcttttatcgttactagaacactattgatattcctactttgaaactattgtttatgggtcctggtattgcagcaaataagtaacaaagtctctttctcagaattctattatctggagcacctgagggtctttttctattgtttgttgttctgttgggttttttttgttgggttgtcttttcctctgcctgatatgtgaatgtgtaagtgtgtgtgttgaaaatattatttgcaaaatctgttgagacagtttgaggcctaggatgatgacatcatcctcattagtagactgaagtttgtttctgcctggtgcttgggggccctagcaatgagtcatcacttcagttctatttcaaggattacagagtcattagaagcagagctgcaattgttgagggtccatttattgtggagtctctttttttccctaggggttgcttccagatcccaacccacatttccctccttctctcctgcctgtcagtccctggagttctcctcctaaccctaatatctgcaagaggcggtcaaaagtactaaagattcttagatggctgggggtggggctctgcaaataccaacaggggaaaatcagccccaaatgccatcttcaccccccagcctttgtctggtcctgtaattcttcactgtttttttttaacttagtagtgtcatcaagaagatgtgtttatatttgtccagcttttgtgatttttctctctgctaaggctggaccacatggcctatttcaccttttttctttttttttttgcacttgtgttttttgaagcagtcatgtttattaaatatcgatattcagagtttttttggtcaaaaacaaaattcttctataagatgattagcagtatatatggaaaatcaggcaatttgaaatgaaattaataactaagataattattaaagggkttataggaatgcttattctgttatttacccagagttatttgtctacatggatattttagagttttaacagcaagtttatgtgagaataggtgtttctgttgagggacatctgaaaatacccaggttcttctgtcttcttaggctatcccacgtggattcttggtctagtggatccgattagcagtatacctgcattctaacaaatggaatggtaaaattagtattattagcatgttaaggtcaaactgtttccaggtactcttgcttgggtagagatttggaagttgactatatttgaaatctgaagggtgacaagtcagtgtttctccacattatctgtttccccataggtagcttgatttattcatccagtcatctgcccatccagtcccttctgctgctgaactagtcattgcttcagggtcatggacacaaaaacagacaagggtatgcccctcttaggggcagacacagaacagtatcagtggagcgatctgaggaagccagtgttggcagggagccttctagatggccaacaccttctatgaaagaggaggatgctgctggggtgaagtcctggccttctgggaggggctggaacccgcctcggcgctgggtcagtgctctggatggcagcctggccccgaccagcctgtcctttcccccatgtgttgttctgaatctctttcccctgcgacagaattcacagaaaaagcaaacctaattttttccttagtcaaaactattaaaaaagaaaaatcccacacttaaagccagacctctgcagaagtaaatttgggaattcattcttggatttgtttctctcctgccttaaaagagaaagaagcctcctagaaggagccccactgaacttgtttgctgttttcttcagtgaaccgctttctgtggctctgcctctctgagaatgtttcaaactctgaaacgcagctggaacacacttgagatgctccacacagactacaaagtgatggcatggactgtgcagaacagatgctgtttgcattaaaataaaagacaaacataatatttgcattaatcgagaacctttgcaggagtatttgcatagagtggtttatccttttccaagagctggttactcttaactaatttctgagtgtagaaaggataagcaatcttttgctgattatttctcacaaagaattgctttygcccaagtgtgtagctgtttccaaagacgggctctccgacatgcacgtgtgatgttgagtgcagcacaggaagaatggcccatgtgcctggcagtgattgctgtcagtcatgctcttgggagctttttgtgtttcagagtaggattgctgagctcgtaccctgcttttagtggtactgaactttgtttcagcagagttgtgcagagttactcacactagaccatatttcagtggcctcctcttcctccttataatgagaagaagccaaggctgtggcatgttggcgtgtcaagtgttttggtgcctgtgcgtacaatttcagggacagctgtacttaattcttatttcattagtgaaggctgtgtaagaataaagacaaaggactcagagcaaagaaaaaatgacggtctctcaaagagaagtagagcccggagatgcaggtcataaaccctgcataattggctctgagtttcttagctgtcaaaggaaaaagggaagccctttaattttaaggtctatgttgttcttaagaggaaaccaaccaggtgttttaaacagtgactttgaaacacacacacacacacacacacacacacacmgtgagaaaacaagattacacatagtctcggtatctgtatgaacctttgtattaattgaatattcagtagttattaatgtgtacttacatgatttactagtgtttttgccttaccattgcttctgtcatcttactctttcacctgggatatgattttcttccttctgacataatcccttgttagttcagcaatggtttctgaatggtaagtactcaagttttgtttatctgaaaatgtttttgttttcccttttacccgaatgatagtttagataggtgtagaattgcaggttgctgtgtctttcagcatgtttgaagacatttcattatcttttggctacttttgttgctgttgaaacattgcctctcaattcaatgttcttagatcatctaactttcctaccttggtgcttttaagatctttttccatgtttagtgtttaaatgttttattgcactgtgtctagatgtcgattcacacttatttatcctaattgagacttagcatgcttcttaaatctaaggactgttatgtctgaattctggaatattctcattcgttatctgttttaatactgcatttgtacattttttccattctttaggaactcatactaggtctatgttggaccatcttattcttttatccttgcttctctcctttatcttttcctatctttgtgctgcattctggttagttatctagatctagttttatctttatatctaatttgctgtttttatctttaactagatctaatctgttcttctcaattatagaaaattcacttaattctttttaaaaacttctcatctcccatttccaggtttttttccttcatgatagtttctcttcttcatttaacttttttttttttttagcgcagcttgttgtcttttccacattgttttaatatttgtggacattttggagtcatttctcggttttgttgttcttgcygattcccacatggtgggttgtttccatctatcatttgtgatgttaaatttgcatggtaaactcttcagcaggggactttcctccctccctycctctcatccttctttgtgtgttttgtgtgctgtggattgtgggtgtagccctaaggagctatttttctttgtcttcctggggctacagggtttcccaggttctagactagttttacccttatttctagacttgagattccagaactactcaaagaatatgaatctggaggccacatccacagggacccaggtttagggtcttagattctcactgaagcctcttcctagcaaccctctattgcttcccaggcctggtgggtggggttttctagttctcttttcatagaccagacagtcctccaagagttctgcccggacacagggtctcagttccagttccctgtccaagccacgctcatggccacctctcctgcccacccagatatgcagccgcccactggctccctggtgcctgtctccagttctgatgactcttgggccccaggaacaggcagctgggtcttagtgcacctgctcagagggccgtttgctttctttcctttctggtaattggggtcttctcttgaattcaactctgcctacaatattagggcgagattttattcwatcttcataactgtttctttgttcttacagtgggaagcgagggatccttatcgagtcagtgcagtaaggtttgggaacctaaagttctggttgacttgctgtgttctgtagctctgtgttgtggacatgaggaggctctgtgcttttcaaagtgtaaaattggcttttactacaggcgcgtgttaattcagaacatcaaagcaaggagtacacattcagccactgctgttttccagttcctcttttcttgtagttgagttaaaaggctagcccttctttctagttgtctgaatattagatgtgacatcggtcataacagcatacaggggtgttcgttttaattcaagattgccttcatgcccaagtgtgggactttatgggtataaaaccaaagaaatttgctttagattacgaaagctgcatctttgttttgttttgatgtaatttctgtgttttctttgccgtatgattctgatttttaccacgctaacgcagtggtacaagatttatcatctgagttgcacgttgagtgataggaagtggatttgttcccgrgactctaatatcttaggagaagatgaaaatatgtcatgagcttaatgccgcgtatgaagtgtgaygggaatgtgtgttgtgcctctgctctgccaggcacactgccagctacacaggaagcctgctaggaagtgtgcagtgcgggccgccgtggccagcgggctctccgttgcaaaaccggtggccggcgaagcgcaggtggtgcgttcctggcggagaacaggctgggtcttaagggtgtgtgcgtcagggagggaggagagaaatgatcggatttctgcttcttcaaaattcaaaaataactttattaaacagaagataagggattatatttttaaaattttggataactctgttcttagagctatgaagcatttaaaaccttggaaaatcgtttaagaaaacattttaacctattgactgccctctggtttggtgcagtgtttgtcctttggcggagaagcaaggggaggaggtggcgggcacagaccatcttcccatcctcaagaaggaacttccgtgggacatgagagctcttggaggcaacagcttcctttttgttctgctctttccctcgtgccttttgatttttctctttaactttctgctaaaacctgagaaatgctctcagccaatctgctgaaggaggggaaagtcagaggacttgctcccacaacgtgggctgtgtccatggtgacgtgggctgtgtccatggtggcgtgggccatgtccatggcataggctatctgtggcactgcggcttgtgagtacgtttgtgggtgcttagtccagtcctctcagtcctgcaaggttggagagcatcctggcacccattcgatggctgttgacggtgaggcccacactgatcagctggctcatgtggcatcacaggctcctgggagtggatcctggctttgatgctgggcgatcctgctcccacactcccggccagaatcctggaaccaccatgacagtcgtcatgtggaaaccacaagctggaaagtctggaaggggcagaaatccacatcctgccagtgacattagcgtagtgaacatccaacagcaagtcgcttctcctggtggtggctctatttttagaagattaaaatagaatgcaatacaaagaaatcactgtatatttagaaactgaagcttctgttgtataaaaaggaatagtgataagattaagttagtcttggtgtaggggaggttgtgatgtgtagggtatattcattctgtgcataacagaaatgtaatagtgatttctgcacatggtacacctgcttcttagaggatccagaaaagctggttttgttggagggaggagtgtgctggagtactattgaattaaataataatgatgtgattatcttgaatgtacatttgtaccattgaataatgagccttgtgcagtgggagagcgtgttctagaatacaaggaggtagattggggcatctcaagcaggagctaggactgcaggtactgtgtggttacagctggggccagtgtgtggagaatggaactctttgtttttattttttatttttatttttggaggcaggtcttgctctgtcacccaggctgtagtgcagtggtgtgatcttgctcgagagatcctcgtgcctcagcctcccaagtagctgggactacagtcacacgccaccacacccagctgattttttgtattgttgatagggacagggtctcattatgttactgaggctggtcttgaattcctgacctcaagcaatattcccgcctcattcctcccaaagtgttgggattacaggcgtgaaccactgtgcctggctgggaatggaaatctttacccagatcacccacgacgctagctgtggtggcatctgtgtgtctcccccatcttcactttttagaaataaaattttgtttgaaaacattttagatatgaaaataaaactacgtggtgtatattattcggtagtaccaaaattaaggagagtaaaacgtcttgaaatcgtttaaagttgaggacatggaaaccactcatgtggaaaggccctttccaccccacgtcatcctctaagggagctgacggcgcccacagggccaggtgccagctgacgagtctctttccagacgtgctggctgcaccggtaagttgatgcaggtctcgaggtgaaccaggcgtgtggcgggggcacgtgaacacacgtgggcaggttccccgggtctgcagaggggaggatcccgccaagggtgagggaaaaccgcccccgagtcccatctctggcagctcttctgctggggaggcccatgagccagtccactgtcgtgccccttcgctgtggcctctggcagcgggcttctggctggaacacagcagtccacagtcaggccactgaaaaccgtcctttctgtcgaggtcccagggaggaagtgcctcttctggccccttctccttggagaggccaagacgttcctctaaaggaggcccgatgcctgtgtcaccactgccagtgcacgctgaacccatagcagcttctggatacttcaggagaatggcctgctgtgtgaaccagtgcttgattttgtacccactgtgtctgccccaagacaagctgctggaggctccagccagtggcagccccagtggcaggaaggcacgtggagctgactgcctggagctgggccgtgcggggccctggactatctgaatctcatgtcacattttcacagccttcaattccttgttcttccccactggttctggccaggtggccccgggatctctggggagccacctgcagggttagagaccgggtactgaagacacagtgatgttatcacctggacctctcctctcggacccctgggggccgactctgtgtcttcatcagctgggttctcagcacctaaggtgatgtctggaccacacgtgtctcctgatagtgcttgtcagagtcatggaataaaagcagggtgctttgtttaaccagaggacatccacgcatcctcataggagatgtggagcggggtattccctgcaattccgatgggagaggccgcggtggccatcacggaggatgctgcgctgggcctccttccagaggcgggagggctgtgcacggcctccttccagaggcgggaggcccggaagcagagcttccccttggatgacgcgtcacagcaggaaggagcacagctgtcgcggggtgagagacggcagaaccagtgtggagcagccagctgacacattaaacgagtcttcactgcttatgtatattttgtgcacattctttcctgacacaagagttttgagtgcagtgtgtgtcacttaatattcagctccttgttttttttttttctttaatagctcagctaaaggaatgaataaatattttagaagattagagcccctcccaggatggcgtggtatttggatagtgagatttcgggtagagtaaaggatgctgctgaaatacatgttgttgtagaatatggagaacttgaattttgaaccattgacacaaattctgaacattttggattttttttttcctgagaaagtcacaaagtaatgattcaaaggaggtttagacgtactgtttgctcttcaaaatggtgattggctctcttaaaatcagcaggttccatcaaatctgcattttggatttccggcttgcttctccccactcaagtctctctgtcttccctacctgggtgagtgtggcacacccacgccaagtccatcgcagagtcctgatggatccctttccccatctctcccagctctctctccgcctcccccgccttccgcagcccctccccgccctgggcgacactccgcatggtggctgaagtcggaatggaaggtccttaccrtggccttcggacctgcagccgtgtctcctctgtctgccccgtgggaacccccaggcttgttcccctcccaggccttgcccttgctgttccctccacctcgtgtgtacctcgttgggatcgttgatcccacatgtccttcaggtgtcggctcaaatgccaccacctcacagggccctctcaggtcactttgtctaaaagaacaktccctgccgtgttccgcctgcgtgattgttattccagcacgtgatcccacacggtcttctaatttacgtgtcatcacctcttcagcagtggaagtttggggtgcagggacttacaacactgtgtccccaaaattgtggccatcacttaatcgctagttcaggaaaacttgaatgaatgagccagtgatgggatgttgaccttgaggcttgaatgagtccgtgtggagaggcagaacagcagagtgggggtcagtttgcttttgaaagttggtcccaaccttgatcaggatggtctttatcatctccctggcttctttaaaatggggacaataacagtatctgtgccagttatttctctggtgagaaccatgagtactacttctgtgaatgaaacccagagataagtgcctgaccatcgtcagctcctgctaggagttacttagctgttattgtttctcatttagaatgtaagcaggatgttatgtttagttctagcaagatatggcaacaatagtttagaaaatgaaatacattttcagtgaattgaggcaaatattgtcctaaaaagcgctagaggtggccgggctctgcagctcatgcctgtaatcccagcactttgggaggttgaggctgcggatcatgaggtcaggagattgacaccatcctggctaacacggtgaaaccccatccctactaaaaatacaaaaaaattagccaggcgtggtggccggcgcctgtagtcccagctattcgggaggctgaggcaggagaattgcttgaacccgggaggcggaggttgcagtgagccgagatcacgccactgcacttcagcctgggtgacagagcgagactccatctcaaaaaaaaaaaaaagtgcaagaggagtaagtctttcaacccaaggggcgtgttggctgaagcaccttggagcagacttttgctgggtgaagccaccggcctgtcacttgggtagctgctggcrgggtcagcctgactcgcacagaacatcaccgagtgttatgggcgctgggggagccccagcctcactctctccccatctcactggccactgaccacagattggtcacttccgaaatgctgccttaaacttggcatcaaaggatcctttttctgcacagagaatgagcggtgctttcaggtctggtttggtgagaggaggagagggtgtggtccactgtggtcagcgccctccgttctccacctcgctccagggagggatctctgctttgatgctcccagccgcgcagttaatgtgcctgcctagactttcsgcaaatggccactttgagtttattgttctaaattagtgactcatttttcgtgagctacttattaacatgcacctattttccagcttcctgccacctaaccacaagcacctttagcgagtttgtgatgttcagcagtgtggaaaatattctgggagaatggttcgtctgtatagtggttttcgttgctgagtcacgtttggtgagcagcttgttcrgctcagatgccctggcgtggagggcacgggccccggctgcggcactgaagcaaaggtgaagcgggaggagcaaagggagtctctcgccccgcacgtactgtgtgcctcgttctttatctgtgttcgtttattcactcctcatgtcagcctcgtctccactcgacaggggrgatattccaccccaaaccctgcaggactgcctcccacacgggttctacgtccaggtggagggtagatgcgggtaggaattgtataatatttgttagaattctcgggagtgaaaaggtgttagtttagaaagtaggatgcctgcggggaaacagaagtggtgggtacagcatgaaaaagtgggccttttggtttgcccggctgtgcgggtggcccggcagcgagggagcgcggttatccacgagcagaccgcagagctagtctccagccattgccgatagctgcatcacctttcatcattaactgaagggaacctatccagaaaactattttacattagctgtggagatgctatttgtgtgttttgcagcgttcctatttgacgtctgttgtgtgtgactcctcccactggctctggtgaaactgcacacggtgcatgccaggtgatcctcctcgcacgctcccagcgctgtacagcacagctgtgcagtgacgcacccacatgtgccctcgccactgggcmgtggacatcctctcaggagcagagatggtgctgttttcaaaggcaggcgaggacattttctcctgatttgctaaatcacttatgaacgcttcagctggcctgtgccacttggtaggtaggggtagctgagagctgtctctccgtgttgtcttacttagggaggaagcagcctggccatgccaggccctgcagaaccgtctaggagaggccctgagacactccctccaggaaacgctgttctccggcccttagagcacagagcagggccctgcggagcaggaagagcggcttgctttcactcctgccggcgccgtggccatcacctgctcagccagcgcctggccggcccccgcccacacacctggctctatgctcggtgccaggacctgtggcaacaggacagccccattcagcccccgggcagccccttttccacactgattcctgacactgctcctcgcgtcctgtggccygcagcaaccccggtgcttctccggctgccacgcctcctgggtgcatggatggtttctccgacgggggaggggaaggggcgaggtgctgtgtttccactgccacattttccctgggaaaatccccgagtaacctgctgttccctttcccccgtggctcactcctgcccgcgtttgcctccccaccgggctctgcctgcctgctgagtctgcgtgtccagcgggctcagtttgcacgttttgtccctatcacccgactaagccacaggtgttagcaagcctggcctggcacgtgagagcagctggacacccccctgcagtctcctctgccctgtgtctgggcaggtgctggcaccaggcagaccccatggcgggactggacgcaggcagccagtgtgggttgccggttctgctgggccggggccaggcctctgcgttgctcactctcacgttcccagacgctcagggcctgctcgctgagctgtgaaccagacgtgtgtgtctgcttgaacacataggggctggggatgaactgaagactgttgggatattcgtgaaggaacaagttaggtagatcacccagcagatgctcaggaaagacatattgaatagaaggtgggggcaggctcgtctttattcctggcatctcttgaaaaattgttatgaaaagtttcaaagatatatgaaaggaaagagaccagtgcatagagcgagtgcccacagccacctcccgccaggaaatccctgaggctctccatcgtgaccacttcatctctccacacctttattttctggagaatttaaaaccgatctcagaggccacagcaccatcccttaaatacttgaatgtgtgtttctaacagatccaaccccattatcacactcagcagaaggaatcatgattcctacatatcatcttatacccaaacgatgtttaatttttactggttgtcttaaaaactgtctttttacagccagttgttcaaatccagaccaaaacatcgggactggtgggcatatctgaaatttcccctgcccactctccgcctcactgagtcctttgtcctgggattttctgtttcagggcttgactgatcatagccaatccagtgtcctttagcaggttctgccaaacccgtacttcctgtaagccggcagctacagctagttttgattcttagtggagagacaacaggaatacttcttaggttatccttgacattttaagactgcctgattaccctgaaggaaaaatattgcttagggaaagaatctttttccattttcattttctctaataaatgcacataaactatgttggacatgcctgaggaattcacagcacttactcattaaagtttaatttctattaatgggcagatgcaagcactgttatggaactttggtaattttcagtaacctgcgcagtggggaaaagcagaatctagtggcctgggatgctcgaggctataagcagagctcccagggagggccggttgggtgggcacaagtttatggagcatcaagcctatgcctagtatctgccaggcccaggggtagtgccagggtgtgggccgcacagtggagggaggatgggctgctggggtcactcagcaaagcaggaggctgagctgggaggaggccagcgcaggtgcaggtcctgcttgaggtggcagatggagacccctctgggggttcaggtcaggggaaggacctagggggaatttgagtatttggctgaccttgtagatcattttgtttccaagccatgacatttcagcccactgaacttccttttataatttaattgaacaagggcatcagagtgccagtaaaattctactacctctggtcacacaggttagaggcctgaggggatggcatgatggccccaaacccaaatagatacccacttcattccacattgactcacacgccgtgtggagggaaggtttgcatgtgagtgtgcaccgcaccacgccctccaggaggtgcaggtcttggtgggccacatgggccctcgcgcagcgctttctcacagacacctgccagtttggtgcaggccaagaggctgttttcctcatggccaatcctcccagcagaaggagttttccgtccctccttattcaggcaaaagacaagtccttttgccccagacacgagaaccaagtggtttcttttgtctttgctttaaggctaagctctttctttaaaccatgggaactctgccgttgcccatgaagttcggtttgaaggtatcggggcttctctggtctgacgtcagcccttgcttaggtgttcacgcagctcagtccctggagtcccagtgaggccctgggacaaaccccagttgaagcacattctataaaatacccaagcaggattgcttaaagctgtcaaggtggtcaaaaacaaggaaggtctgagatactgttgcagccaagagaggcaggaccctggatgggcgctaggacagaaaatgggcaccagggaaaaacggaggaaatctgaatcaagtccgggctttttctgtcatgacacctaagcacagcatcctgatggaaggtgttagttgtagggcatggagggtgcagagtacaggaatggaagatgttagttgtagggcatggagggtgcagagtataggataagtctctactagctttaatttttctataaactcacagctgttctaaaacaacacctttgtttgaaaaatatgaaaggatggggagattggctgcaatgaagactgtgtcgttactgtttcccagtagccctaagcttccgttcccgtgtctgaaaagcagctctgttagcacagtggggtgtgcacagtgaggtgtgacctatactactcttgagtcacagcggtttcattgtttttgtctatgtcagcaaccccccaccaaacacactttagaatgttaatttatccagccgggagcggtggctcacgcctgtaatcccagcactttgggaggccgaggcaggcggatcacaaggtcaggagatcgagaccatcctggctaacatggtgaaaccccgtctctactaaaaatacaaaatactagctgggcttggtggcgggtgcctgtagtctcacctattcgggaggctgaggcaggagaatggcgtgaacctgggaggcggagcttgcagtgagctgagatccagccactgcagtccagcctgggcaacagagcgagacaatgtctcaaaaaaaaaaaaaaaggaatgttaatttatccaattctcattttatgctcataacgaaatattgaagtgaggtgctaaggtgaaatgtgggactgaggtctccaagtcttcagaatcaagcgtggaaaagagtttaggtgtagcttgtgtggagctcttgctgccttcctgttcccraaaaccccctgggcctgaccacgctggtttgtcacaggaatgcaaagttagtttgacatgagaaaaaaaagtttactacgttatcagatggaaggggaaattatttaataagctgaattgatgcagaaaagtttaatacagttaagcaaacatgtgatttaaaaatatgtcttggcaaactaggagtagatgggaacttccttaatctgatagttacctgttggacacctgcagcaagcaatacactttccagtaaaacattgaaatatccttygtaagatcagaaacaagaccaaagtgtcttttatcaccatttctctttagttactgtactgtaggactgagccagcagaataaagaagaagaaaaggtgtgaggtctggaaggtggaaacaactgtcattatttgtacgtgacctgattctatatgtagaaratacacgataactacagaaaaatgattgaaattaatattctacgatacagaaccaataagtaaaaattaattgtgtttccatatgcaagcaaacagaaattgataatggaaatcaaatatcaaatacctagtaataaatctaaagatgttcaagaccgcaacactgaaaattctgaaacatttctgagagaaatgaaaggaggtaatagcccatgttcatggattgaaagatgcagtactgtaaagattatcttctctcaaaatgacagatgcagtgcaatcccaggcactgttcgtttccctccctccctccctccctccctcccttcccctccttcctctctcgtcctctctctttctctccctctttctctctctctctttctttctcttttctttctttctctttctttctttctttctctttctccttctttctttctttctttttttctccttccttccttccttccttccttctctttctttctttttctcttttcttttcttttggtggaacttgtcaagttaattttaaaatttatgtggcggagtaaaaggccaattttgcccaagatgatctggaagaaaaaagtagggttttttgccttgccaatattaagagttattgtacagttatggtggttaagacagtgtgattattggcaaaaccaaaaacaagttggccaacaggattgagatttggcttataagggaactaatgttgcccatccatggtgaaagataagacctcttaataacactgaggggacatttggctgttatcataggaaaacataccccaaacccctgtctcatagcgtatacaaacatcagtgccagtagatgagagacttacatataaaagggaacactgcaaagtttcagggtaaaaatatgttaaaatatctctgcagcctccaggaagagaagagtttcttgaacctgacataaaagcagaagctttgaaagattgagaaataggacctttgagaggatatctgcagcatttaattgacagaggattaatgttcagaatttgtaaagaattcctctgaatcaataagaaaaagacaacccaactgggggcaaaaaacaggtcaaaaagacatgaatccaaaacagccagtgaaaaagccaataaacatgtaagaagatggtcagtgtcattggtcatctgggaaagacaaatgaaaccttcaagagacaccctttcwccccaacctgggcaggactaggtgttcccaggcaggtcccaagggtggaaaccacactttctccccactcccttcccctcccagttcaggagcctgtgcgtggggctttcatgtactttctttattggctcaagaaacctcctttcttgtgtgtcrgtattgtgatgtgaaacccttggtggagggcactggtcttggtgggtacctgtttgctcaaggtccagcttcagacaagccgctggtttaattgagacagaactggattccggctggtgctcactccgtgatcctaggaaactgcacagcccttgaggccatttccccaagtgtgaagtggggggcctgggccctccgggtgaaagtgaggttcctttggctccagaaggccgggtttctggttagacatacctacccgtctgatgcaaggtggattctgaaaagcaaaagcactgtctgtcttagtcctgttcctcccatgggcggactccgagtctcaaacaatgctcagttcaggctgggtcctgtcggcgcgaaagggactcctggcaagagtgatgtggtcactgcagttgactgtgggtgcattgagcacactggggcacatcatgtgctggtgaggacacgaggtacccgtgctcctcggcctccctctcagtgtgcatctggtctgcagccccagcgctgattaaatgctgtttgaggacactcagtacgatcgtccctgtccagcagggtttccaaaaatagattctcaagcggagacagataagggggaacctgcttgcagcaggcgtgtgatgaggaagtggtactttgcttcccatcttcattattttcctgcttgtaaacgctgggttcttagcaccgctttctcctcagcctgagaaatttcagcccagaggcagataaatatggaaattccacctctcatcactaatttcattttaactcactctggaatatgatatctgaaaaaacacagcgttaagaatctattctgtgcacattcacggatgccgtcatgcgttccagctggctgtgtaccgcagcttgtctatttcaccctggtgacagacgttctttgccccactggccacgctttgtttaggtccgttccaaagctgtctttcccaggcctggtggcccctgcgcctgcaaagtgcactcaccgccactgctttacccccaggattgtgttccaccagccacctctggcaaaacgcctttagtgtttggcttctcgatcatggctgctgccctgagccccagcctttcataatgagggatgcggcatctgtcatgctgtccaggtggacgaccaaggacggctcaggccgggatcttgtcttaaagagactgtggccgtgcttccagctggctggggctcacggggcctccacatgtggggttagcgtccggcactgagacccatgtctgtgccgccgcctccaaggccgcctgtgcttgagacactcctgctgttttctgatagttccacatggctgccctgttccgcgagaggcaggcacttcctattaacccagtgccgcctcagaacagctttcccttcgagcatttccatgtcattctacaaagatgtgaacatggcagtgttgggggtttgaatgtacaggttgttatgagactagccaggcccagtggcacacaacgagaacaagcagcatctctgtgtggtggaagaataagccttatctggtctttgtcctcgttcctggcagggagctcttaggatcccaggagcttcctgagtgtccagcgagcctttcgttattcctaaggaggagcttcttatgtgcttctgagtttatgctaatgaagtgacttagggcaggacccctggatagcctcgggatggggccagtcaccaggacgcagagacgagaggagcagcatgttcagccgcacctgctgaccccagtggtactgacacagaggctcctgcactcaggacccctccagaccctgccttcatgttactgtttatttgcatcttttacaataaacccatcaacatggtaaagtgtttttctgagttttgtgagcccttctagcaaattacagaacctgagaggggcttgtgggaactcctgatttatagccgatctttagaagtccaggaggcccaggacttgtgtctgaaatgggggcagccttgtggacctgagcccctgtggcgtgtgtgctagctctgggcagttattgtcagagtggaactggatcattggacgcccagttggtgccagttggctggtgtcagaaaccacmccacccgccagtatacaggattggacatgttaaggtcaaggtctggtttacgcagggaatccacrtgctgttatcgaacggcattctccttggtgtgccagctagtgcaagcatgcaataaatgtcttcttgaagggtaggtgggacgcggaccagcccagtgcccagaaatgtaggtgagccaagacccactaagctgcaccttgatctgaaacacacgagtgatgcttgtggatacaggaacaccacgtatcgtgacttacaagtcaaatcggttgcactgagatctgatgtgtcttcctgcttcagtgtagtaaaagtaacttgtaattaggcctcatgtatgaactcggtgctggagggatccgccttttgggctcaggcataagcagttcacttccaaactcaagaaagggcttcatgtgagctgggactctggccccaccgctgctgctcaccactgggggcttcttggtttccaaactttctggttctagggcttttgctgaggtggaagctaaggttgggcgttgagctgactacaggggaggcagttctgggggacaggcattggctcgtaggaactgttgcagaaccctgaccagggtggtccccccaagccccctcctcttgaccccttcccattggaaaactgcagctacattgagatcttcaaaagggccttctgctgtttctgaaagtatttatagtgggatttgggttaaatacacacacacatataaacatacatacatacaggcaccttttcgaattttttattttttgtctacaatgagcatttatttatttttatttattataaaaatgaatacaaatatatttatttttaggggaaaaaaaggcttgaaaagtactttccaccactatctggggtctctttctgagttgcagtgaaggttctcttgagacatggcatcatgtttacaattcagcatccaggccatctcctaaggtggccatgttctttgagaaagccctggaatgtgtgaagacttggggcgattgctcaggtctggtggttgcttctaaggtgtaactatgacctgccggtctttctcctgacccagggaagcagaactgttttgcctccgaatatgcccagtgtcttactgtctttacttctgttttcaaaccttaagagttgccgagacttgggaggagctgctggttggttggagaggtccccgtggttttttgttgttgtcttcattttgatttttatttctggcacccacgtttgatctctgcattgcccaagagcagcctcacctgctgagctcctgcaggtccatgttggcctcacactttcccagttctaacttcaagagcatgccctccaatctcctgggacccttgtttccgttcttgaatattgaacatctccaaggacatgcacgggttggcaatgctaggaattatctattttggataaaaaaatgggtttttttttttttgcagtcatttgacctgatgttagtcgtttttgtcctgttttaaaacttgtatctacagagttccatggctgccctgcgaaactggtgctctccttcgcttagtaaggaaaatgacctccgcgtgcaagtctgtaatgatatgcatattattgcagggcattttacaccacttgtcagaagctaattttaaaagaaaagtgtgattcctggaaatcttgccagagttttctttcctttctgcttgggagaatatagaaaaatcccaggcggtctaaatccagcctgtgccaggtttaggtggtgggtgggttccagtctcatctttgcagtgagtctgaatagatggaaaccgctccataatacagtctaaaaatggatttaaaagaaaggactctataccttgagaacacctggtgaagcgttctcctccatgcctatttgcagctagagtggcctcagcttgcctccttccctgtctgcacacctggcgggttccgagggctccctgtgctgtgtttctgtgagcgtccagaccgtttgtcactatctgagaagaggaagagctgctcttctctttttgttatcttaatgcttgtggtctgcagaagagccgacttctgatcagcacgagtgggtataatgtggttgctgaacagaagtaaacccaaattgctaagccagtggctcttaggccagaaacgggcgtttgccatatctcagtaggaggctattttgattattctacattggcaaatacaaataatctatgatgaagctgaaagtgtccccctgtaaaagtaggaaggacacatgcatttcattgtttggggagttactccctgcagactcccagcataaagtatgttggctgaaatgcgcgcagtttctgaagccagtgccttctctgttctccagatggactttctggccgagaccagccagtggagctgctgaatcctgcccgcgtgaaccacatgcccagcacgggtaagtccgcccacccctgccctgtccggccggccctgcgctgagccaaagaggtgttcagacgctctgccttattggaggagtgcagagagggcgaggggggaggtgtggggtatcaggttcactgaatttgggtgctcttcctggtggtaaaagaggccatcctttttggaaatgaaatggctccgtgccatgtaaatggtagagaaatgctgattttttgttgttttttttctctctggtgctaaaggatgtgttcttcccaaaggcaccaactgcctggcttaggtgtaacccctggccctgatccccgtgagggcctgtaggaaagacctctgagcttgcagtgggcggggctgggtcccactggccacgtgaccgtggacagaccgcgccttttccattgccaccagcttttgttggttaaatgagtcagtggcatcatctgtcttccaagtacctttcagctctttaacaaaaaaaagtatcggtggtgatcagaaatatttcattccataggtaatttttagttatttatgcatttgtctatttggagacggaatctcactctgtcgcccaggctggagtggagtggcgtaatcttggctcactgcaacctccacctcccgggttcaagcgattctcctgcctcagtctccccaagtagctgggattacaggtgtgtgccaccacacctggctaattttgcatttttagtagagacggggttttaccatgttggccaggctggtcttgaactcctgagctcaagtaatctgcctgcctcggcctcccaaagtgctggaattacaggcgtgagccaccgcgcccagccccataggtaacattttaaggtactccaagtctrtaggccatggaaacagactttttcccccttttctttgtctgtaaaacccgtttccacatagaatcctccagggtttaaactccttgtgagggtaccattcttcccagccatgcagcctctccgagaataaaacctsaacctcctgatggcgtggggctgagggaaccagtgttccgttccacatgcgtcctgcagggcagtgtggctgggccttgcagggactgcgtcccgaggcctgggtctctggttttggctctgctgcaccttccttgacagtcagcctttgctgccgcctgtgccctccggtgccccagttagacccactcatcaccccgaaaggaagttgaagccagcttgaagccaggctgaacgtttccaagaagagatttccttctttgccttgtgattcttccaagtcggccaggttttctgtcattttccaaacccggagttctggaggtgtctttgccctgctccgggaaggctctctgtgtctgtggggtacggtcccctggcctcttggggggtgttcggggggctcctttctgtctgttttttacaccttgattttactctgcattattactgatcaagcagtttattttttacyccagcacactggagcctgggggagyggtggggagctttaagtaccagatgaagatgcacaattttaaaattttggcttatgtcgacagttttggttttcactttctctcaagttcactttgccggtgttgttttcgtgtaaacactgaattctgtggcyggggcatttttgagacaacttgcttgtgcttaaccaggcgtggcacgagggtaagaggattttctgatagcttgatgggctgggaaaagatggtaaatatgcatagtttccaagtgaaccaaaaaaggtgggcttcaaattaatattctggcttgggaagcgcaccctgcctgtcgagacctgccatgggatccctgcctggtgtgaggacaggccggggcttcagcctcccacagagggcacctggggccygcctctgctgcctgtttgcgtgggarcttaggcgagttgctgaatagctcagttttgttttctcatttcttagccggggatgataatgcctctctacagagttctcataaagatgaaagatatgtgtcagctttttagtagttcctcaataaatgtcatctcagtgtcccgttgactagtactgaggaatgtgtgtgatgtagcctttatatccccgttcaaggcctggacctctcctgcagcctgtcaccctcattctcttcctttggggtgagccgccggacttgagaagtggcatgttgggaaggctgccccatgacgctggccatttacctcccttgtcatcaggttcccattggtctgagtcagagagagtgccgtgtctcctggcatttattgcatattcaggcatgggttggtgggcrtggtgggagtgtttgcagggtaattttaaataacrtagcagcgatgcccaggaacagtgggcagagaaagcatgcatgcatgtgcagcagtcctgtatgacatccatcattgagcctgcacagtggcctgtgccttagaagcctctaatgtgaagcgtgttctttcaaactgcattttggtcatttcaacccactgaaaaatactgcaaagaaatattaatctcaggttaggtgataactggaaaattgataggaaaatgtctttaaagccacatttttatggtatgggagtataaacatttttaggtatatkttatgtcagtcctcaattgctgttatacatttcctaatgattgaatttaatcttaactattctttagacattttgatgtttgaaggtgtggaaacagactgatacacacacacactcaattgtcaggaatgactccagcagtcactgtgagagctcgctccctttgaacagatgagtgtgtacttgkagcaggaagggcgcccgggcagccctccccactgttgatctgtcctgtttcctgaccattccctcgtgtgaatgccgttatgttcaacacaggtctttttctgattatggttctttttcaatacacttagtcctaataaattcccacttccaacagaaaagcattattcataccatgtattcgtgtgccatcttgagattttagaaacgtcaggtgagcatatcatgtgctttgggaaagtctrtacaggttgagtatctcttatctgtaatgcttggaagcagaagtgttttggattttgggtttgtttttttttttttcggattttggaatatttgcattattcttactggttgagcatcctaagtgtaaaaattcaaaatcagaaatgccccaatgagcattgcctttgagtgtcaccgtgaaaaagttttggatttggaggcattttggattttggtttttgggtttgggatattgtcagctgtactggaggaggaaaaagccaaaatgccatttgtcttagatcaactttgatttcttcaacttccctcataactttttatctgtagactttgttctctttcttttttaaaatgttttaaaaattttaattgtaaagtagctctatcataaaagaaaacacataaccatttgcctaccactaagatataacagacatgttgttagtattattccatctttgcctcctatttctttgcgttttgaataagtggaatgtcacagttgtggacgtggctttgctcttcccccttcctgggagttgttgtctgcttgctgaggggaagggccacccttggcttggtgagggaagggccacccttggcttgctgaggggaagggccacccttggcttggtgagggaagggccacccttggcttggtgaggggaagggccgcccttggcttggagagggaagggccaccttggcttggtgagggaagggccacccttggcttggtgaggggaagggccacccttggcttggtgagggaagggccacccttggcttggtgaggggaagggccacccttggcttggtgaggggaagggccacccttggcttggtgaggggaagggccacccttggcttggtgaggggaagggccacccttggcttggtgagggaagggccacccttggcttggtgaggggaagggccacccttggaggagacttgacaccgaggcagatcccaggcggagacatggtggcagggtggggtgggggcgggagctcgtgacccccggttctctgccagagccttgtgttttcccatggagtgagcaaacagagccattgactgagttaggctggggagatgttgcagtttgaggacagaggagaaggtatggaattagtcagccaggagagaccagcaaaatgtcatacaggattataaacccaactatgcccaagggctgaattacggggaacttaaaaactattactactcagtcatttgtttcagattcattgtagctaaaactcctccccttcctgattataaaagcaatgtatgtttattgtagaaaaaaatcactaaagtggtgggtgttgggttccaaggctggaggtcgagctggcttccagccaggccttgcaggcgctcagcagcctcgattgaggagaggggygcttcggggaggacgcctacctcaggcatccgggagcaggtgctcagcagcctcgattgaggasaggggcgcttcggggaggacrcctacctcaggcatccgggagcaggtgctcagcaacctcggttgaggacaggggcgcttcggggaggacgcctacctcaggcatccgggagcaggtgctcagcagcctcggttgaggagaggggygcttcggggaggacrcctacctcaggcatccgggagcaaaccggaggcaaacaaaaaaagtcagtagcaacaggaagtgtggatgaaggacttactgttaaacagacggcatgctgagggcttacggccctcatggcgctgctctccaccgtgaccgagtgccctggctcctgtgccccccaccygctcctacagaaggaaagccagagcctcagatcccrtggccgctgtcccagggtcgctcagcatatacattacagggcaggacacatgactgccctgagggctgtgctactggggagaaagacatcctcagaaaatgcgatgcccttccatcggccaaaaggggaagtagaggccgatgttaagaccgggatgctggactaaagagaagcacgttccacggtttcctgaggcataggggtggcggtttcatcaccctctgtacctgtgtcctgggaaacgtgtatctgtcagagttagggaggctctttttaaggttatgtttcaaaagcaccatttttaaaagaaaactctggaaccttaaaggggattaactagaaactgtagagaaactctccaaaataacgcaaaattcacgtttggcttcagcgttggattcccacatctaaggggtgtttgaccagcacactgtcaaaggagctgtatttccagacactgctcttacattttggaacaggaagtatttgaggttggctggtgcctggagctcatgctgcctcctagatgtgttttgtggcggttgttgcattgtttcgtttggtgagaagaaagtggaatctggtacaaatctgcaaggacgtgtgacctcaggggaagcttcgaaagtctccctttattggcaccggaagctgttaattaccttcatacacagagcccgtggtaacaaagtccttggttgtaatattcctgcgtggtgcccctttgtgagttttcatcataaagctggcatttctggggtttggatagggtccagtgaaggacccacggccatctctggtggttcctcgagtggcccccacggaaggactgggcaggagtggcaggaagaagagaggccgtggcggcctcgtcctggcggcgcctgccgtgactgcttgggttattttcctccgatcagggaagtgtctttgaggaatcaatgccctccrgcccacggactcggcagcttgccagccacrggcaaggattggccaggacggtcatgtccgccacggaacatgtcrcctgctttgctttttttttttttttttttttgcttgcttgctttgttttaatttttagaggtaaaatgaagtgtagaatgtaaagacatcaaagtaaaactgtttgtgtaaaccaaaaataaaattctaagtcccccaacccaatgaatggacccccttcttgaccaaggggtcccaaagaaacttgaaaaatgagttcaggccctgatgggaatggggggttggacaggcctccttagacgccccctccttttggcgttcaggcccagctgaccagcgttaacatcaaaacagcgatctcacgactgataaaacagacacagcagtaagattcccrgttccaccctgactctgggatagcagcaggcgacagagagcaggccctgcaggaaataaaagtattttaccccagaatatattccttccacctattttgagtggctatagaaaactgcctcttgggggggaaatttgcattctggagagaatcccatgccctttccaggtctctttttcctgatccaggagagatttaactacaagtcaccttttaaagtcccataggagacatttaccatctattctctctgaagcctgcttcctggaggcctcatccacataacgagaatctccgcttatcttaactcaaacatttttttatgctgacatcaactcttcagtcagaaaacctttcagtctgcctaggatctgtgaggtcctcaccctacttcttcaagatgttctgggccaaaccaatatataccttacatgtgttgcctgtaatttctgtctccctaaaacgcataaagccaacctgtaacgtgacaacctcaggcacagacttcctgaggctgtgtcctgggccatggtcactcgtatttggcttaaaataaacctcttcaactattttacagagtttggcctttttcgtcaacatttgaaaaatctgaaaagaattcccatggtttgattctcttagttcaaactaatgttgagagtttgttgactgccctccatcaagttaacctgagggccggtatgaatagccatgactcaaaggccagacgcaggagtctgccccccacatggctttagaagctgactgcaatatagcgttactcctggaggccatgtgtgtgtcgtgtacaattatgagcaatttagaaatgctttaagagtcacttttggcaattaggcgaattggccccattactttattcattttatttttatttttatttattttttgagacatagagtctcactgtgttgactggagtgcagggctggagtgcagtggcaggatctcggctcactgccacctctgcctcccaggttcaagcgattctcctgcctcagcctcctgaatagctgggattacaggcgcccgccaccacgcccggctagtttttgtatttttagtagagacgaggtttcaccacattggccaggctggtctcgaactcctgacctcaagtgatctgcctacctcagcctcccaaagtgctgggattacaggtgtgaacgactgtgcccagcccttgttactttatagtagagaatagttttggaccagaagctgcgccctcctgcttggtcactaccttgttcactagatgtggtgtcgagtaatcctcaagttccaattccccttcgatggctgaaggcatattacctcttaagaatttcaaaaggtgttatttttcaaggtctgttcatacccatgcccccttctccagtccttcccaatatctcatccctatccgcccctaaaccttcagatcgttctgtttttctctgatgctgtttgctttttgccacctggagacaagtcacttctgatttctgctctccttcccctcagatctgtgaactcccatgagcagtaacatcaggtttctctggaaacactgcggggccaagaacaccacctttcacgtggcgtacacagcctgtatttgcaccccattcactttcctcctaactctcagtgacagctccctcctgccatcccgttccggctcagtattgacagaggccagtgaaggatcaggtcctgggctcagctgagttgctccaaggcctgggagcctggcagacatgggggcagcacagtcttcctgtctcccttyggccacatggcctccagcaggctgctcctcacctggtgtcccggggctgcttggtcctgggccagggcgcaggcagcaagggcaagtgtctggcgtagcgtctggcacacaggaggggtctgtgttctcttgcactcttgcttcctggtgccctctggtgtgcctggccccaggttcgtggctctgcccttcctgcagctcaaccaccgtcccttccaccttcccatccctttgtggcaatgtccctaggagcaactgtctcaagtgaaacccagcccagctgatgctgggaagcataacaacaggagggcttgaattgcgttgaaaatgtgtcttgagaagatgcctggtggatggaagcagctgggagacctrgcagagggcccgggccaccctgcagtggcagctgctggacctgcagtccgctggacctgatctgcagggcgatgactctcgtgaagctgctgagtcagtcacatttgccttcagagggcccttctggcttttaatggtgttagccctctgaggcttgcttgctcatttcaccgggcagagactatgttcctccgcacccgaggcatgccctcctgtcctggaactccagggctgcctcccgctccttccgcttgtctttggagggcctgtcttcccttctctctgtctgcatttccccaaggtgcttgtctgtctgtccaggctctgccttctgtgatgacagtcttcctggcctttctggtgagcacggtatctgccatctgtagcagagggcactgaggctggcgggacctgcaggggcatgcagggtgctggccgctgggggctgcccggtcccacttggcatggtgtccagcaggctgcttagcccctgtgacctcactgggagggcccaatgctgcctgccctgcccccatgctggggcaggaagaccaggacacctcacgtgtagctggccagcttccactggtccgcagttttcagtgctgttccatctccctctccagagggtagtagtccctgggctctgccagccacgtggggtaagcggtggttggggccctgcattccctgagcagatatttcattctccttcacctccagtcctggtsccaccagcccctgtgccccggagggctgtgtgaccgagactggtctgcccctccyttggcccaccctggctgatgggtcagctttgctgtctctgataccttattcacccagatcctttctgacttccagcattttgtggctgctctctcatctcctgtgtgtgtgttgtgttggtgtgtctttctaaacaatccacacactgtttcagcagaatcttggagggatcctgacaacgtgattgtgttcactctgttatttttgaccagaaatgccctgtggctctgaaatgccaccctgtggctggcaggtgggaccgtgcctcyccacgcggcccaggacactgctgcctgccagccccacccgtgagcctgccggcctcactttccaactggttctttccctgtccgcagtgcctgaggcagaaagatagaaagtttctccatcctgggtggacattagattgtttgggttatctacatttatcaccccccccattacatgttacattgttgttgttgctgtcgacccaaagatttctgaagagcttactgtctgcccttagcaaggaacatgggtggtaagaaagcagacggttattggttggggcgtcgtggagaattgggggtgctgtctgagaaatatcctctgggtgcttctaaaaccgtccacacatccacagcaaatctggatggggtggagctggtgactggttgtttctctactttagagggagagagaaagctatgtggcagtcccagcagtgcccctcaaccgtgttgatacagaatacagagaaatctcactgagtatctctcrgggaggattccacagttctaagtgatgattggttggaagaaaggattttttttttccactgagaatttggtttggtttgtgtattcggagtgtcactggtggccaaaagtattatccaggaatgaatttttgcatcatgacatcatttctggttaaagggctttttatcttttttcttttattaccagcttygtgtgctttaaggctgtggactgtaaaatgtatccagagggcctgcggagcccytcagtggcatctggaagcctgtgccgccaggacgagggagatggctctttgccgacccttgtctgtgttagggtgtcgcggtgcagctgaaagggagttccttctcagcagccacatttgaccctaatgtcatgttttcgccgtaccaacaccatgtcccctaccagaggaacctgcccatcttttaaggaaggtttccatttctggacctcacagcaagatgcacacactgtcacacgtgatgcagaaccaaactcaggccctctgtgtttccaatgaggggctccgaggggccatcagagccaggtgtctgaccaggtgagggaggactggaggtgtcccttgggtagcaggtacgtggccacgggcgaggggaagaaattgaaggcggtttagtcaggcgcctgaggaaggggctggcacttctttcagttctacagcacccagccctgcgtgggccttcctgggcgggcctgccctcccctgccgacctgccttccccrccttcctggcttccctctcctgctcttgagcccagccaggctccacccctccatccaggtgtttctcatccccccctggggtgggggcaccctgcaggtggtgggagtccagctatgctttactctcccgcagaccracttctgccttcgtggatctgctcttgtgggtgtgttctctgttttattaattcctgttttaatagctgttctcctttctctgcatttattcggatatgcttgttcttttaggttgaacatttcacttgttaatttttagcccttcttcctttcggatggaggcattcagggttctgtgctgtgcttcccttggggttcaaatggggctgctttggataagttctaatttgtattatttaatttgtaaagcatattacattaacacttcataaagtcttggtgtttctcaagagagttattttgaaatttgctttttggttccttttttatttgaaaaaatgaaatatttagaagtgttttttgtttcccgaaagtctgaattttccaagtcatcttttttgttattcatttctaatttactccattatggttagaaattacccagctgttgaattttactgagacttgctttgtggtcaatttttatgaatctttaatatatgtgtgagaagattttgaattctctagtaattgggtgctggattctaaatatgctcattaattccagcttattgattgtaaattacctacaatattagaacatgtgagaggcgagaatcgctgtggaggagagtgagcagtcaaggactggggattcaggagggtggatttctgcgttcaactcattcattcattcactcattcatattgattgggccttctaatgccatcccctgcccttggcatatggaatacatgtatttatgattgacacagagacccctatttcatggtactcatgttaccctgggaggaagagaggaaactagtaaaggcaatgagtaaacagtagagcagggaaggcagagcagggytcgggagtggaggggctgcgattttacacccgctggtgagggcaggcctccttagaaggtgagcagacatttgcaggccgaagacctggtcaggagaagagggagtgggcggtgcgggagacataaaaggccgggttaatcaattaggcatggctttgagtgacatggaggctcctggaggttctgagcagagaagcgacaccacgtgacgtatgccacagagaatgcagtggccacgtgggacaggcatcggaggagcagggagacccaccagggtctgggagcaacccaggcagtggatggggctcagtccgggtaggtggagtgggaatgtagaaaatggtacaaattctagagatatctgacgtagatgggatttccttagcctgcagatgggctgtgcaggaaacagaagagtcgagggtgacctcaggatttttggctttaagcactgctgatggagttgcatgaattcatggggaatgtgggtggagcagaccctgcgctgggatgaggattagtatggatctgtgcagtgctttcaaaggcacccagtttggaacactgagtggtaggcgttggcgagcctgcgctgaacgtgggaggggcctgcgctgggcattcatagcagaaagatacatggacatgaactctcccgggcagtggatctcctccgtgcaaggtccacaaagtagactttgtttcttttcccttttttttttttttaaacaatgtttgcttagtgctggcatgcatcttctaccaaatcctactttgtaaagtgttcctgctggcaagagagttactggctccgggatctttgctgggcagagagtgtgagcgcacagcctccacagccagcagcaaggtcctgctcaaagtgggactcgtggttgctcctmattacagcaatgatgaggacactgatggccacaggtccccttaccaaggccacccatctgtcactcagctrcgtaccgtgtgttcattggcatttaatgcccctggggacatcacacagtagttactggttcaggaactgaggctgggaggcgtaagtcactttttawcaagctgcccaggtgatttttctggacagaagtctgaaccagccccctgccttctgcatttccacctgcctgctggattattccacccccagtgacccgcagcgcccttgaaagatgctgcagcccacgccggtctccagaaagccccggcggaatgtacgttgctgcctggaagaggccggctcgccccagagagaggggctacctccttcaggcctcgtccttggtgccctctcttcttctccaatgktttctatttttaaatatttcaactgttactgttaagtaatagtggttcctacttyggcccagctgttaggtgaaacacataaccaaacgtttggaggttgctaagaaggaaattctgaaatgcgttcttatgtaaacttgatcttacgtaactgagaaggcaagagcaactgcagtgggatttgtaggcttcctagaccactgaaactatttttaattttcagacaatatatttttatccattgggtttagggtatttggatagctttcaggagtaacgtgtaacttgtgctggtgtgagcaggctggagagatgggctgcagtggtttcagggaggtggtggtgttccaggaggtgtggccagttttgaatccaggtgacratgcttactggctgcatctcccgtctgtgatacccaggtccscgctgggacctgcttcagggggctgtgaggacgaaaggagatcacaaagcaaaaatactttaaattcgtgctcagtcctgaaacattagttttttgttattgtttctattcrattgcttttgcattggaattgtagagtcttagaaagattttccaggaatgctttgtccataacgtgattgtagcagcatctcagacggatggttctgtctgttatttctgggggtcatgcttgtctttcatggctgygcttctgtatgagaacttaaagcacatttcaccatttttttttttttttttttttggtatggggtaaggcctggttctatttatagtttccaggaagtacatttgtgcacttcttgaaagccaacttaccaactgcatgccaggtttttattttcagctcttgctcaatttgagcttgcaaatatttccaaaagatgtttttttcttcctggggatatagaacaaattagaaacattaaaaggattttctaaagagctttaaggatagttctgaaatagggagcagggaaaaaatctaacacttgcgttttcattaaattgtggaacagaagcacacagatggtcttgctccctccagatacagccctggctggtacggccagcacccagggactctgcacacggaattccacragaataacatcacgggctgccgtaaaagccagggaagcgaagggaggcgtttctgatctgtttctggccttgcgctggcacagggtgtcatcccttgggtgggaagggtctttggagccccttatggcagcaagtttacagccgcatttggatttaatgctggcaaggaaggactttattttctgttcgaatcaaatttggaatacgtttttgagtaaagcttgctgcgttgttgatacagcttattactcagaagaaaaaaagccttttaagtgacctgttaaggaaagttttatttcctcaaagttcgtgatagcttcaatagtttcggcttgtcatttaataggaccttttgaaagaaatattcaccagaaaagaatcacttcaagttgtgtgtgcattataaaaatggctctcgtccacgatgactggctgaaaaatgagatttttgagtttgtcatacatttaggggacccttaagaatgtggacagatgtggaagtagctgttcttcagttgaaggctgtgtgtgtgtgtgtgtgtgtgtgtgtgtcccactctcagcgcactttgaggcgcaactcgaggtgacacagttgagtccaggccttgcggtgagtgctgaggacacagagatgggcatgggccgtccttcccagctggccactcttaacccctggggaggggcacagggtctccgaagctcctgccacactcctgtcttttttgttttgctttgcaattcagtagtccctgtggggtaaccagatgctcttagctttgttggttggagctgtgatttttttttccagagggtttcccagaatgctcccatctcctcccctgatgtggtgtcaggtggcaccatggtgtcccccgctcctgtgcacagaccttggctttcctcagcggtttatgtcagagaacgggccgatgtccgctccatccccttcgcttctcttttattcttctaaatggtattcgcaagaacactrataccatctgacagggttctccttcatgtagaggaatcatttaaggcgcctgtaaacggggaaggtaaagagagacagggcggtgaggcctctgtgcytcactcagcgggtcacacgccaccgcccgcagaatgagctgagtccaagggctggtgggagggaggtcttcgtggtgagggagtacctcgccttggtcatgatgacaacacggtaccaaggtcggtccctggctttttttggctacagaaggtggaaccagtgggggaaacctggcggaagggtacctgcaacctctctggactttcttggcaacttcctgtgaatctataattatcttttaaattcacaatattagtgtgagaaacctttaataaaatatatggctcgtttcccatctgttatccatttaaagttgagatgtgtcattccatgggattagaaataaagaaaaaaagatggatgttcgtagatgaagctgaatgactaaggttgatcattgtggtagccggatacgtgggtgtttattatattcctctcgctaactctgtgtgtcgttgaagattttcatgatgaaaggccgctgaccagttcctaagagtcttctggcaccatcttctccgaggtcactgtcttcccctacsaagcacaaactgtccccaccataggctttatcgcttctgcctagatccgcaatctgtcrgatttctttcatctttattatcttcttcctctttttcagtgcacartgtatgctttaattttctagttatttttctaactttttgagtctaatgtttttatttgtttgggttccttttgtagttacttacatgtaggcagctattcattgttctctgagctcaattttaggcaattcctacaattttcgatatgtgatgtgttcattactttataaatttttaccactttcactagaatttgaagcgtttaagagaaagagactcatttttcccatggttggatttttgtttctcctggttttatttctggttctgttgcagtgtgttccagtgtttagtctacactgtgtgtatttggaaactgtgttctttatgtggcattggtttttgtaaatgtttcatggaggcttgcagcaaaaggcatacatggcttaatgataagaggttcgaggcctatctgttggctgaagtaagaattgtactattcccatcctctgtatgcacacctcctgtgtgtttgctctgccgtgagtgtacaagagcaagttcatatctagtgctgaccatgtgtgtcttcattctgtgtgttctgtgtttttactcgaaggtacccacagtgtgtgcctcagacagttccgtcatctttgtagattgcatgctttatacttaggaaatggtcaaatatgtttgatatttagtgttggattcaatctttgtgataccgatatctcgattgcacatttcaatttgtttctatttgccttttggggctttttaccygtctaatctgagccttacactggatttgtttttattttatttattttattttattttattttattattattatactttaagttttagggtacatgtgcacaatgtgcaggttagttacatatgtatacatgtgccatgctggtgtgctgcacccattaactcgtcatttacattaggtatatctcttaatgctatccctccctcctccccccaccccacaacagtccccggtgtgtgatgttccccttcctgtgtccacgtgttctcaatgttcaattcctacctatgagtgagaacatgctgtgtttggttttttgtccttgtgatagtttactgagaatgatgatttccaatttcatccatgtccctacaaaggacatgaagtcatcattttttatggctgcatagtattccatggtgtatatgtgccacattttcttaatccagtctatcattgttggacttttgggttggttccaagtctttgctattgtgaatagtgccgcaataaacatacrtgtgcatgtgtctttatagcagcatgatttatagtcctttgggtatatacccagtaatgggatggctgggtcaaatggtatttctagttctagatccctgaggaatcgccacactgatttccacaatggttgaactagtttacagtcccaccaacagtgtaaaagtgttcctatttctccacatcctctccagcacctgttgtttcctgactttttaatgatcgccattctaactggggtgagatggtatctcattgtggttttgatttgcatttctctgatggccggtgatggtgagcattttttcatgtgttttttggctgcataaatgtcttcttttgagaagtgtctgttcatgtccttcgcccactttttgatggggttgtttgtttttttcttgtaaatttgtttgagttcattgtagattctggatattagccctttgtcagatgagtaggttgcgaaaattttctcccattttgtaggttgcctgttcactctgatggtagtttcttttgctgtgcagaagctctttagtttaattagatcccatatgtcaattttggcttttgttgccattgcttttggtgttttagacatgaagtccttgcccatgcctatgtcctgaatggtattgcctaggttttcttctagggtttttatggttttaggtctaatgtttaagtctttaatccatcttgaattaatttttrtataagatgtaaggaagggatccagtttcagctttctacatatggctagccagttttcccagcaccatttattaaatagggaatcctttccccattgcttgtttttctcaggtttgtcaaagatcagatagttgtagatatgcggtgttatttctgagggctctgttctgttccattgatctatatctctgttttggtaccagtatggatttgtttttaatataatgattgttcagtcctgttttttatccaatctggtaattttcatgtgactgtgttatttatgaatgttgataaaatggacatatttctcctaaaattttcatccarttttatattctgtttatctgtttttgttttttgagmtggggcctcactctgtcgcccaggctggagtacagtggcatgatcatggctcactgcagcctctacctcccaggctcaagcagtgctcctgcctcagccttccragtagctggaaccacaggcacgtgtcaccactgctggctgactttttaattttttggaaagatggggtcttatgatgttggccaggttggtctcaaacttctggcctcaaacgatccccctcccgccttagcctcccaaagcaccgtgattacaggcgtgagctgttgtgcccgaccctgttttctgttgtgaatgcttcttgttttgtttcctatttgacttcttggatatgggctttcttaccttttatttggtctggtgtgtgtggtttcttttccttctggtgatttggaaggccgtgctctctttttagttcttattgtgtgaactcttatgagctcatacgctttccctaaactgtgctttcctgttccagcaccttcagacgatgtgagagagtagcccgtcggcacagacactttctgccgtctcttttctccaaccttctgattttgttacttgcagtgttattttgagttttggtgattctctttataacatataaataatatatttagactgacatttatcaagttattagccttaaaatggttactgattctatcactgagaaaaatgagaaaacagatacattaagtttcttcccccaaatttcagtttcattaccatttccatttaaaatgcgaggaattttaggttaaccactaggttttggaaagttgggtttgaagatctggtcgcttgattatccaccatgaaggggagtcgacgggcctcttgcttttggagagcttccgggagcgatgctgccggctcctggagaccctgctaccgcctgtgctgtgttcaggctctgccaccagcgggtcccctttggagccctgcggaggtgtgtcctcctgagcccacccttaggcccagtgcccgcagcctgccatggcccagggtgtgagaatgtctgccaaggaggctccctttctataggagagctgtaagggggctcggggtttggggttacactgggggaagggaaagtggcgtgaatgcagtcrcctgtcttttgctacttacttctcttctgacaaaccagggactgtgtcatttagaaattgttgagaatagttcgaggtagcttagtcagagcttccttcctgtgcacattctgacttgcctagaaagatgccgagtatggcgggtggaacccctgtgcacccccttctcaccagactcccatcccggcacagggaaggggcaggacacacacccttccyggtcagtcctgttcccaggggcccaagtagcccacaggaggaaggagtgcagcagggcagagtgaaggcggagggtctggcaggtggagcttcacccagagaaggaggctgtgttcctggaaggacattcagttcaagagcaaaggctcagatgttcataccataaatattcagcatcacataaaattaaaaactcagttaaacaaagccttctcttcttcagaaggttttggttgttagtggtctgcagcgcagcaggtgtggacagtgagcacctgtgtccccaggtgtcctgagagggcaagatcagggctggtagggcgccctcctcatcgtcttcctcctcatcgccagttgtctttaaggtcagaacatgagaacatcagctcttagtgccaaggttttttggagactttttcttttatttttttttttctctgggaagatgtgtgagaacatttcatttttgttcttgaatggaatcttccrcataaatactacatatacatgtacatatgtgagtatgtgtgaatatctatgtgtgtgtgtgtatatawaaacacgtgcgtttttatattcattgatgtggaaagtgctcacagtgattactaggggaaaagcatgcataatatggccctaattaaaatgtaaaagctatatacaatgtaagcacatgtacatatatatgctgaagagtatatatgtttgattttttaaacaaattagggtttaatgtgttaaaagtacctattattttaaaataaatttgggtgcattctatgaatatatcataacttttatgagtccagccaatggcataaatatttacttggggactttaacacacattatcaaattgccttccagagaggttgcaccgttcattatttattcagggtgattttttatgaaccaagattcgcagacccccagtgcctgcgcggaactgatgaccgcgtcctccagggagcccggtgcagaggcgctggtgcagacagctttgccagtccacactttcttgttttgaagtttttgtgtcttgtttctgttttggttagtggggaaggggtgtctgctgtctggagattagagagaggtgtggcatttcctgcggggatgtctcctagtgttgccgccattcatgttgttgaccagagaagagagatggagtccaggtgggcagaactcgatctccctgcgccttgagccagccccgtcctgagcccttgcccactccagatgtgaggaggttggcgacggtctttggtgccctccctgttgatttcaggtgagatgagggagggcactttggcctgcagggagcccaggtttctggggcgtcgaccctgcttctctgggctcccagcagccagcccctggtttcgtgtcaccagtgactccctgttgccagcttccatgcccggcctcagcccatggcctctcaccagtgttgacttggtggaagcacctccttaccacaccacatgctcctggtaccttcccccgccccggccaccagtcctcaggtgccttggtgggtttttcttatctctccagcatcatcacatccaagcgccccagggcttgtctccggcccactccttgtttccactgagtcattcccttggtgatatcctggcctcatccagtcaaatcatagatcacaacaccatcttgattctgccgctcgaatgtctgctcccgcctggatctcacctgccttccagatcctagagcctgcttgccgtcgatccccagctgggcgttctcagactcagcaagtttgaaagcaggctcctgatcttcccctgcaaacttgcttctcccgcggcctctcctactcagggcaacctccgggctcaggatcccaagagtccccttgactcctatttctctccagtcccatgcatggcctgtcagccagcactggcagctgcccattaaagtgtgtgcagagggaagggtcccagtcaaatgtgaaaatgttctaaaatcttggtaaatctactaaaagattgttggattgtacatttgagaagggcagagtgtaaaatatacctctttaaagctatcaacacgtgtgctgagcctggcggctgctcacagctccagcattgccacgcgtggcgagccacaggtgtcacccatgtggctgttgcaggtgcctcctcacctggccccaattctgttcttgcccctctagtctgatctcggccaaggagccagagtgcggttgacagaataatggaacccccgaaatgtccctcagctaatcctcagcccctgtgactgtgtaaccttacccggccaaaggagctctgcagatggggttgttactcactggagatgaggaggttgtcctggatcatcagggtgggccctttgtcttcacgagggttctttaaggaagaaatcaagaggatcggagtcagaggaggtatgcagacagagtgtcgacagggccatgcaggtgctggtgttgaggagagaagggaccaggagccaggggacatggcagcctcyggaagctagagaaggccaggagcagattctcccctggagcctgcagaagaagcacagccctgctggctttctgactttcgctccgtaaaccccatgtcagactctggcctccggaactgtaagataataaacatacgttgtttcaagccattgagtttatagtaacgtgtcacacacatcaagcacaagaagctaacacccagagtgagcctgtcaactttatgtcagccagactcagcttttcactcccaaccatgtgacctaggcagrtttctctacctccctgcctcagttttccacatctgtgaaatggggactagcaggcggttaggcacatgctttgcatagctttctgctttcttgcgggtccccctcatccagctgtgtactcatggagggcaggccctgccctgtgcactgcaagcgctccagggagctggagatgaaggctcactctgtccctgtcaggcagtgtgtgttccatgcttttatttcagtgtgtgctgaatgtgggctgtcctgtgcgtctccccttggtttttctcctgggaaccctgatgctgggttttccagcgtaagcacatcaggagttttgttgctggagttgggtagtggctccggccactctccgagctggaaaaacacaagctggtgtgactatgcagatgcrggcttttggggatagacaatagatgggcctccagaacccgagtgaattccagatgcagtagcaacagcagcaggcttgtttgtgtagggtccagaagtttcttgtggagagctcaatcctccagtgagtggttgaacttgagtagcagtcttcagcgagcagggaatgaggggcgcgggcaccgctgagttgtgctgttgggtttaaagaaacctcatggccgttgctgagtgcgttctttttcagcatccgccacggctcacccttcagcattcctcctggctacccagcatctgtccttgtggctgtggccccgcccgcccctccctggcccytactttgctgttatgggactgatgagctgtgctaagccctcctcctcctcattcttgtccttccttccagcatcgtggccgtctcatattctggggacagctctgggtactggcgggaccagagagagcaacccagatgccacacctcctccagctttgcgttttcctgggcgattgcagggaggggcagacagtaaagaagtgaacaagtcaacagactggaacccacgtgggtacagaggctagagggggcctttgttttggtctgcttttctgtttttcaaattagagtctttcccaaatgtttggtgatcctggctggccagcgtctaagagtgagtctctaacaagctgggcggggcatgttgactgcttatcttcctggccaggtggcagacagggacctgatcacttcctggtggtcctggatgccactgcctgttgtcctgttctcttagcccagagaggaccctcycagctcctccctggagtccaggcctggctcacacagcctcacsccttggcatgtcagctctcactgcccctgtttactgcccatgctggcgctcctgccctcagcctgatagcaccaagcctggggaattctgggggaatgggkttggtccctgtatggggggcagaagggatgaggggtcacatgctctttatagctcagccttccctgggccattctggccttcagaccagcctggcttcagctctctggtcagccagcccccgactggcttccagaattctatggctgctgtctgcttgtgggatctgtgtttttggagagatttatatcttttttccttttttcttcttttttttaaactgcttttagaatggggttgagggagtcgggtcagtgccctagcctgtgttctttacaggaagcaattctttaaatgtcaagagggaaatgccccctgcccgcccagctcagccaggaggccgtgggtagaaagaccctttcaaccaagtctcacaattaaggttagagatgattttggctcctaagaatactctagaaatctaaagcatcccagttcacatcacttttatctgtttctttgtaaaaatgcttatcattgggcttacagattaaaattttagtgagacagaacatcgttttcccaaccttcccatcggtcacattagagcaaagtcttcaasagcatttttcacttaagggatgttttctraaaagtgaccctgtgcttttgatgaaatagtcagctaaggagaatggaaccctttgtaccttcacgctgaagtctaaattcagcgtctgcagggcacgggactgctctcgaggaagctcctcggtggcgcgtggtgccactacctctggattgtttgtttttgtcctttttttcggggcttatttttgaaagcaaaggcatgatcagttatagcagtccttgaagacagtttaagatgctggattctggggaatatgttatatggcttaagaacatctgacagctcagtgaaagcaaagtggaaaagtcactgcctgggatttaaaggtgtgtctgcagcttcagcttttgaatcattgggtttagaaaccacagcccttgcttcagacaaagtcccaagaattggagtctggtgttggctggcaaccatatcattcaagttaagccaagtgaggtgagaaactaacggaatggcaatttcaaatgcagattcctttgatgtttcttttatctcaagataaaactcagtgctggggatttcttcatcctcatttgactaaacccagtcaagatgtgtgcaggggcccggaccaccctggggaccatcaccgttagcaaccaggactttcggcccccaggagaagcacggggcagggctctcaggaagggcagagcccaattctttccagcattctggaagctggcttttatactgcttagtgattttgyattgtgagggcaacaattctgtttataatattaaaaataggatgaaagaaataatatattttcttctgtcagacatttttgtttaaatttttgaatagatccatttaaaatggaatgtaagtgaatctttttgtgagaaagtgattttcgatgcatgaaagctaggtgattttaccctgcagtcaggcttctgatctgcaggtattgtaacgtttaagattgcttcatccagcctttcaaatactgtccagtaaagcaggacaggccagcatccaccttcttttaggatggcatgtgtaaaggaccctcagtrtttgtggagtgtgttttctgtgatcaggttcatgccataaatcccctttaagagttggccggcgaaggaatagtgctttttcgtccttgtcccgtggaaggtgccgcaggagctggttggttttcactcgagagggttctggtctcagccgcgttccaggctcagatcccaagcaggtcattgtataaatgttcttatcccacctgttgagtgtcctctgtcaccaggaattcaggatggtaggattttgtgccgtcactctgtcctctaaactggcgtttcctcctttattatgataatataaaggggaccttgtgtcacaagcgagtcacttttggtggaagtggggcaagacatttccctgtgctggtttaagcagggccggtctcctccaagggagccccaagccrttgtgctcacaggccgggtaataaatgtacacgtttstagtaaagccattcaccactccccaaaacacaacgctgagaatagggtttagcactgagttactttctttaaaaaactagttttgccgtgtaagtatgcttcctcagtcagcatacggtttggatttgcttttccragcttttaataatcgaaatcatactgacgtcgttttctgcagcttgtttatttttgtttttgttttttgtgtttttttaactcagcattgtttctaagattcatttacgtcattccacatggctgggattcgttcactttcatgccagatacaattctacactctcaatattccactgtttatctgttgctctgttgatatttgggcggtttgtagttaatgctgctataatgaatatccttgtaccattctccttgtgtagacgtgcaggaatttttcaagggtggctgtcctaaggagagggcttgttgctgggtcacgaaagcgagattcggctgtctatgagaaagcccactgttctagaaggccccgtctcattcatgctgctgctgctcccacgcccccgctscctgcctctccacccgtagttgggtcggtgggcgtaaagtggkgtctccaggggtctgatttgcctttccgccctcactaacatggtccagcgtttgatcctttgtttcccctgctgtcagggtcttctgtgaccaacccattcataccttctgctgttctttggaattctctccttctggcggctttataggagttacttacatgttacggatacaggtcctttgtcagttgctgtgttaaagtagctcctctgagattcagcctttcactttttaaggctgtctagtgagcagaaaattttaatttaaatgtagtcasatgtaacaacgtcatattttgtcgtaagaagcacttttcacatcttgagttttctattccaaggatattttccaatagtgtctgctaaaaatttcaacattttgtctttcacatttgagtcttaatccacatggaatccattttggcctgtggtgtgaatagggacgaatcccatctttttgttccccgtagaatagyaggataagtgtttgtcccagctgcatttgtggaacaccctgttttttccacagtaatctgcaaaggacctgcatctaccctctttgggaccacctcaactrcttctcagttcttcttccatgtagttttatattcagcttttaagatcatgaactaccttgcactggacctgtagttccgtttggagagaatcactatctttagaatagtaagtcttcctatccttgaatacgagctatcttgccatttatttagaccatttaaaaatgtctttcagggccaggcacagtggcctgatcacacctgtaatcctagcactttgggaggctggggcaaatgaattgcttgagctcaggagttcaagaccagcctgagcaacatggcgaaaccccctctttaaaaaataataatacgtaaactagccatgcgtgatggcgcgcctctgtagtctcagctacttgaggggctaaggtgggaggatcgcccaggaggtggagactgcgatgagccatgatcgtgccactgcactccagcctgggtgacagagtgagaacctgtctcaaacaaagaaaaaaagtctttcaatatattttataatttttatccataaaggtcgttctcattttttgttagaaatacttctaggtgccttgtattttttttgtttcttatgttaggttttctgcttgttgcagtatgttgaagtggaattggatttctatgttgatcttatctaacaccgtattacatttccttattagctctattgacttccctgtcattcttctctttgcaggtggtgggggtgggaggagctcagtatctgtagccttggagtctggatcaggagttgtgttccctccctttgtgcctgtatcattacatcagctttttcaggattcaccattaaaagcaatatttgctgggaccttttaatagataactcttttttggttaaagaagcgctcttttatttctagtttgctaacagcttttataatgaatagctggattttaacatatacttactttcattctgaagatgatcataattaacggtgagttggatttataggtggtttgtacataggttgcttttcttgtgttttctttttttttttttttttttttttttgggacggagtctcgctctgtcccccaggctggagtgcagtggcrcgatctcggctcactgcaggctccgcctcccgggttcacgccattctcctgcctcggcctccggagtagctgggactacaggcacccacgaccgcacccggctattttttttttttgtatttttagtagggacggggtttcaccgtgttagccaggatggtctccatctcctgacctcgtgatccgcctgtctcagcctcccaaagtgctgggattacaggcrtgagccaccgcgcccggccttttcttgtgttttcttgtgttaaaacaccaggtgtattggtctgctgtcttttctatagactattagattaagcttgctcatagtttatttgagatttttgtgactgtatttatgaccaagactgtaatttttctgtcttttttatactttgcccagttcttttaaaaggatatttattctcccctcataggattggctcaggatcctgcctgccctttgcattctcttgaagagtttgtttaaagttgcatgatccattagttgaaacgtggctgtcgctgcctttaaaatgatttttgtgaaaagattttaaagtattaattcaatttagttcatgattatagggttaattctgttttctatttattttttgtcaactttggaatgtttttctagaaatgtgtctacttcatgtaagttttaaaacttactggcctcaagttgttcctttgtatttttttattttttaaatctctgccatatctgaggctaggtgattaaactcctaatgttttttaatttgtgcctattctttttattttctaaatcactcataacagaagtttgtcttgtattggtcttttgagagaatcactttttaaaattattttggtgtatatgagtgtatgtaatgattacatttcatttcatttatgtattatctgctttcatctgttttctttggatttgttctactgttgcttttctaatttcttaaagatatatctcgtctttcagttcgtattattattgtcataataagtatttaaggctaccaagtttcctctaattatagtaaacagaatcttacaagattttgtatgtatttttttcattcttattctttttaactgttatggcttcttctttggcccatagatatttagaaatttttttttttttgaaattgaactttctattgtagagaattacaggcatacccagcggtggggagagcaggtggagtgagccctggggcgtggtcaggtggcttaggccagggcagtccctccagtacttgcgtttaggcctccctcccatccccagcctctcagtctttcagaatcagaccccagtcaccatgtcatttcatcaataacattctagtgcctagctctctaaaagatagggactcttttactgcattgatgatgtacatatttagacaagatgaaccattctttattattagcagatttttacccaatgttgatatatccctgatggtgtttaaaatcacttttttagtttgtggtttgacttttggtaccaggagtctctgggtccaagcagtgttcatacactgtgattggcacctgtcatgaagtcctcagttaatctctaggtttcttcttcctaccttttttttttttttcagtccttgagatttatctgttgaagacactgtattgtttgtcccacagagttttccttcctaggttctaaattttacttgattttagccctgtcatgtcatttaaaatgttcctttgttgcctggatttcctataaattggcagttagatctagaggtttgatcagattcaagcttggttatttttggtaagactttatagatgcaatggtgcacctcttttgggaggcaaccagccatacccatgtgtgtgtgtgtgtgtgtgtgtkcacgtatgtgtgcatgtatataacagccgtattttaaaacatttatttaattactttctttttttttgaggcaggtttttgctcttttgcccaggctggagtgcagtggtgcaatctcagctcactgcagcctctgcctcccacgctcaggccatcttcccgcctcagcctcctgagtagctggaaccacaggcatgcaccaccacacttggctattttttgtagcttttgtagagatggggttttgctatgcctcacaggctggtcttgaactcctgggctcaagtgatccacctgcctcagcctcccaaagtgtgggattgcaggcgtaagccactgggtgtaactaacagccatattcgttatccaacaaattatttctttcttctccttaaaattctttctgatggatcctgccccaacctgaccgctgctttggaggtgatgtgctttattcctggcagttaaggtgaaacgttactgcatgagcttaaaatgtctaaagtccctattttatgtccctgacctctacaacacgtggkttacagacactttaacactgagcaccccttccccattcacctcttgccgttctctactatttaaattttccttcacttcaaccccacaagttaggtaaacttcttccttcttccttctttgttcttctccctycctcctcgtcctcccctcctcctcctcctcctcttccttcttctttcttcttcttcctgtgttgttcagatgaagtctgtttagatttctctccgtagcccccagttctttgctcaccttttcttccctccccctttctctgcccacctccatgttgttgatcctcccctgactgcttcctggtgagttttttaaactttcttagttttcagcctggtatatgtttatatcctgagctttcttgcagaatagcttccctgtgaatgcgattctagcttgacagtggctttctcttagttctcagaggctcactggtcctggcttctgtgactgcatttcmtttgttggataacgttgcccatattgcggggtcttctgaactctgtctcagyggtctgctgtttcgctttgaagttgtcttgattccattctgctttttcatgcatcgttgtgctttctgtgtctgtagatgcatgtctcccaccagttctggaaaattgtcagccatctatcttcaaatattgcctctccagagttctgacagtatgtagaggtttgcagctcagagtacagactctggcacctgagtccctggcctaaatgtaggccttgccacctgccagccaygtggggtggggagaccaggccggaaggatgagtgcctgcaggagttcagtgctgagggacagaggcggctcrgggacgggggaaggtggggaggccctagcaatcagctttgatgacaggtggggtagggaggagcacagacaccttccctgtgacattgagttagctctttgacccaggtagcaggggttagctctgttgggggcaatggggaccctaagaggctttggtgtctgaaaacagaggaaggggccatcagaggcccctccgtggtctcagcacctgccctgataggagctccagaggatagacttggggtgccctctgtcctggagggttggatgcagggttgaaacctgacccattcccagggtctggctgttgaagggcgagaagcggcagactctctgtgccaggcccgggacgcctggtccatccctaagcccttcctgagcacacctcagtggtgcagccctccacrgaccctcttttccctgaaagcaggggttcttgggccagcgtaggggctggcagtgcagatggcagactgtaagggccggtttcrctggacgtgatccgaatcagagccctctgcccatttccctgggcccatcgcagcctgcctgccagctacctgccgttcctgacattctgcctgggaaatcgtgtttgtgttcccgaaccctccgcagtacagacaccttccctacggagccctgtgtattcagggtgccttttctaataaagcccaggccgagtcaccactgcctgaactggagggcccgtggcccgggcacaggggccgctgcatcgtggtcagcattgtggtcggctgtctatctgcagtcactacacctgcacagcatggggacgccgggacacggccggccagcaggatgccctgcgcagagaggagctcacaggttcacagaagccgccaggctagatgcttagaaatgaggactcctgctttacacaggaatatgaggtttaccagaatctgcttcattgttcgaattctcttcccttcattctcctacactatgaagagctttttatttcccttggaagagagagagctcgatggatgcattggacccggactcctaaccaggagctgtgggaagggcgctgaggaaatgaaagccagtgtttctttctccctcttcagtggagaacaaatcagctcctattttcttggtgccttatgaagcgggagtgtttctgagtcctactcgaatccmttgaagctgataattccattttagtgtcgtgtctgtgttagtacctcgcagtccctcatctccactgctttgcatacagaaggttttgcagactgaggaatccccagccagggctgggggtgagggatggaggctgcagtgaagtctttccctactggactatgggtcagggatgggcaactgtctgtggtcgccttggcagtcaccacggcagtcaccacaccctccttttacagaagacagtcagaccgtggacgttcagttcatgcatgttttagaacccaagtctgtttcagttaaagcggttcagcttygagaccacaggactcatactggttagtgatcctggagggagggaaaggcaggtcctttggtttctttcttatatcctgaaagtgtaatttttgtattttccaatgagccttcttggcttctagttagagtaaaaaatggaattttctaaatctgagcacggtcaaacgtatttttatccttgactcgtgtgtgaagctgacactgattttgctagaataattctattattaaaaagggacagggaggattcttcccaggtgcacctgtgtccaccttgtctgtgctgggtgggcacccacttgctgggggtttggagtctccagggctaggcatccacactgggcttactgagctcttccccttggtgtttcccgctctcttgctggaccagtggacaggtcaggcccttggccttttcgcggtagcttctgcctgccaccctatggcacaggagccctgcagggctgtgtgcctgtagggctgaggctccrctcagcgctgccagcacccaggagtctgggcttgctgcctgggctgtgctgcaccccgtagcctacatccaggtgcggcgatcagtctgctgctgctcaggcggcgtggacaggcccttcctttcttgtcaatgctctttgccttcctggtgctcaactaacaggacatgccaaaacctgcagccctgcgccctcctggacacactcgtggcatcctgatcactgggtttatcaccctgggtgatgaaaagctttttctgggcctgctgttttgtcccagaagtgtgtggagctcatgaggtcagggggtacagctccatcgaggaagccttgccttgtctctcctggacggtgattctccatgttgcgtggccctgccaccgcccctcccgcgtggagggtgcatcctgtccctgtgatgaagaccagccacacccatgccagcccttctcccagagtcctgtgttgaagaccagccacacccatgccagcccttctcccagagctccggttgccctgcaacaagcagacatcctgctgtcgccccgatagatggaggccagggtaccttctccagagtcaccccgctgggtctgaactcacaccccacccaagtctacgccccgtccactgccccactttgcctgtctccaggtgttacctgtttcttctcgtgtcttaagtccacactggaaatttggagagaccaggtctttctatctgagtgtcctgtgagacaacctaaaaggagattctgggtggagattactctcattaggctttcctgacaaataccatcctgcagtctggtactggagactgcagagcttcctactataggtagtccccatcttacgccagtgtcccctcaggctggttccaaggttcgtggatgaggtgagggcatggagacagccagccctccagcagcacccgctcgccttctccatcagaatgttctcgggtccagcagacccggagaagccctgggatgctggagatgcctgcakgggggtggaggctggggaaagakcctgccaactgcagggaccacccttctcagtggcacagatttgggctgagttcataccttattatgcatgcatctacttagactttttttctgccagtaagaaagcagtttgaaaacgtagatttggaaggtgctttgagtttggtgcaagtgaaagccgatttacataaaaacaaaaacaaaaagacagtggagtaaaatgcacacctggtattaattgtagctttttatttttagcagtgaaaatactgtttcaggaatgtgtcgtttccatctctgtgctcagcaggctgggcttggccgggcttcccctctcgtcacctgtttttctggtgctgttgrgaagggaggtggggcctggctgtgcctctggggctgtygtctcggccttgagcagctttgtgggagcagatctaggttgctgccacagccccaggagctttttaggaaaaagtgactttattcacggagagctgtgggctgtaggctctcagcraatagtaattacaggggggcctggcctttggtcaggaatgaaaccaaagcccaagccacacagagcaggccgaggggtcgggcaggcccccagtgctggctttggaagaccatcgactcyggagcagaagttctgaggcctcagggatgcttgggtctctacggcaggttaggacccaggccctctcattgctcccaaatccctgtgttgctgaccacacccagcctgaggcacccccctgggtgacctgtgagctccccataacactccttcagcccctgatgtttccagcaagaccagcctcctctcactgttcagccaggttaggatgccagggttctggtttgctgtgcactagtgtgtggccctgggcaagtcacttaaaactgtctgtacatcagtttcccacacctgtcaagcggggtgtcccttaaatgaattaatacatcagcactaaaggccgtgggccagagttcaccccaggccctgtgattccccggtagtgaagaggacaaggaggcaggggaagtttcctgtgtgggccctctcccacctcctgctcgagcgagcagtctcctctgctgcagttctcagggagcctgaagagctccacctcccttcttttctagaaggctaaagcgcagtgccatccaggcctggccrtgtgctgcagctgccttcatgctagaactctgcaccgagaacgccactccgagcacggcgtcgaatgcaatctgcctgtgacgcgtctctctccygcccagccccacacagagaaagcctcccctgtgcacatccataaataccactgtatcttctctttgcatttatttctttacattttgatttcaatggaaagcaatacmaagcaccttcttcttgcaccataatattttttattcttatttttcaagcataatttaacttacagtgattgttaacataagcttttgtctttggcattgcatatatccatctaaatgagagaaacagaagtggcatataaaaactcacctacatacgaagctccaaggtagggccacttaagttacatgttatctacagaatatttttawatctttaccttaaagaatacttctactttctctacctcgtctctactttgcrtgcgtgcccctccccaccatggtaaatacaacagttgcaattcagttaagaacactgggggaaaatgacatcacatgtaagtcagcgtttggaatgggtctcagttatgaccgttcaggcstttgaatgtcagcttcagcgcgaggtgctctccatagctctgaggagggatggcaggtcaaacacgcatgtccgtccctcaggaaattcacaaaaacgccagtaaagatcgatagttcgtaagtcccaacccaataacagcgcttaccccagtctccagactgtggtctctaagactatttcccaagaaagggacccacacaggggtcaagaaatgtacaggaagagggctgggcgcggtggctcacgcctgtaatcccagcactttgggaggccgaggcagatggatcatgaggtcaggagatcgagaccatcctggccaacacggtgaaaccccgcctctactgaaaaaatcaaaaaaattagccgggtgtggtggctggcgtctgtagtagtcccagctactcggaaggctgaggcaggagaatggcgtgagcccgggaggcggagcttgcagtgagccaagatcgtgccactgcactccagcctgggtgacagagcgagactccatctcaaaaaaaaaaaaaagaaatgtacaggaagaccccaaagcatctggtagcagaacagggcgctgctctcagagagcactcacagggtctggagggccgcccgatccaaccacggggctcctgctcgtcaaggacaggactgtgagcattcgtaaacagtgaccggaaaacacaccctcctcactgctcgagtttggaggctgccacgagacccactcaggattttcagacatgggcaaaccgaggaagagaatcaagcatgacactgcctttctcataagcgctgtttgtgagagtaacaagatagttgatcttggattccttcccgttakagaaatggtcctgctaacacatggagaggggctgatgggactcgaagagctctgtttttaaccctgatgagagaatctagtcagtgatcattttgagccttcgcaacacaaaaaagccacccagagagcaggggttcgccttaggccttgctggsaagtctaagctgcctctgaccaggcctctcggtgagcacccagctttcagaagaacgggggacagagccttgctcgtcagcaccagggtgtaatcagcaaagtgcagatgacccgatgtcttcagctaataaattatcggggtggggggcaggaagcaggaggtcaggggaaggggtcttaaaagatacatcagctaattacaaygtatttggatcgtgatttgaacaaaatatttaaaagtgtttatgaaactatggggacactttctggctacttcataatattacagacttgtccatttatttgcgtgtgttgatggcatttgatttggaagtcttcgcagtgacgactggggcctgcttccctgtcatctagaaggtggggaagtggtggatgagcagaggacctgagatcggcttgattacactattcttcmtgcttttgtgtatttttggaatttctcatgaaasataaaaatatatattccagagaaaggtcataagctcacaaagatggggagaacagaagaggggcgacacgaatgagagcctggcaactgacagcaggtgacagagtcacagcgattcagcagacccaaaaaacagatctcagccaaccacgaggagcactgagaactcaccagatggaagctgcgctgccacaaaggggtgctctccagcgactatgatcctgagcgcctctgcatggggacaggagcaagctgaggatgtgggtactgcagcaagaacrgggggctagtcactgtgtccacagcaaacactgagtagggggtccctcccttggtacactgaaggcccagctctcaccctctagtcccaggatggagaggygcctctcgtggacagtaggccagccctaggggaaggttctctgggcactgagccagggggttcctgatgatgccacctccagtcaccctccatgaagcctggcattgagaaccagactgtgcccacagttggcaggtggttttcgtgcctccactcacactcggcaacacataaccaggggcaaccaggcacctgaggggaggcttttgcagggacggtggagagcaaacagagactccacagggaaaagaaaacttgtcaccaggcttggtggctcaggcctgtaatccctgcactttgggaggccacagcgagaggatcacctgaggtcaggagtttgagaccagcctggccaacatggaaggaagggaggragggagagaaattagctgggcatggtggtgcacacctgtaatcccagctactcgggaggcaaggcatgagaatcatttgaatccgggaggtggaggttgtattgagccaagatcgcaccactgcagtccagcctgggtgacactcagcacacacacacacacacacacacacacacacacacacaaacttttagtgagctatcattactatcttcagagactagacaagatattttatctaggaaatatgaacaggatgacattttaaaaaaagaatatccagggtccattgtcctctgaaaatggctgttttatttgtcagttagaaacaaaatagcaaaaatcatgaaacctcatttaaaaggttagaatatacatttaaggaaatcacacatgaagaagcgtgtaagacaaagacaaggaaaacagggaggatggaaaagacccagtattgttctgggagatctcctactcaaggggtagaagttccagaaggagagaatgggaaaggggaacccttgatgaagtgcttcagggagccccctacgatgggagcacgggagctgccgtctccaaaggaccagccaggcgcccagcagtgggtgtgaaaggtcttcaccaaaccacacggcttcgaaatttcggaacgctgggggcctggagaagaccttatagatacccggagagagacatcgagtcacactcaaggtgcagcatcacgtggcgcccattttcctgacartactgggagaggaagacaacagagttgcgccttcagaatcccgaaggcgaaggatggtcttcaagctggaattctatacccagccaaagtcaggacgcgtgaaggggagaatcgacacrttttcagatgtgcagaacttactctcatgcctccctttttaagacacagctggagcctgagttctgcagagtgagaaaataaaccaaggaagacgatggctgggacaaaggaagcgggagacttaaggtagggcagagacagagggaatcccctggaggagttggacccgtccaggccagcagcagtgcagacagasggagcgcctgcccggggtgagtggcacagcttcggaggcagcgtctgggccggcctcaccagactgcctgcctcgctgcctaaacctgaggatgcaacactcagccgcttgtctgtgcctgacctctgttgaccacatggccccactctctcttccttgccccactgcctcgattccccgaggtcactcatttctccaagggggtcttctgcccagytcccacctgagagctggaggtggccaccatggagggcagctcaccccccagaccacaccttctggcacctggttctggtccacatgactgccctgccagatgttagacggggtgtacttggtttcctgggggtcacccgtggcttcaccccagaagaagctctggtcccctgtcccagaagctgacggcagactcggactcgagactgtcctgtcccgggaaccatcgtcaactcctccttccactgcactggtgttgctgccttcagtcttcagaaagcaaaggacgtgttttcagggccacatatatgcagatgttattatcatagcaaagcaagaggacacttaacaaggtcaggatgttgctcacggggtagggggtgcatgtggtttgaagggacgcagagggtgaygtttgggcctcattgaagcggaggatgcactggtgctggtttcattactgttcttttactaaacatacttgttcttcagcatggatggcacactgcacaataaataaaggrtgaaggacattgtagctaagtcatgcatttctgatgtgctgtctccctcctcttctgtcccatcctctctcttccccccacccccacatagaggcaaaatatcagtgtaagaggaaatcatggttacatagttgaaatatctattatttttcccttgatttgaatgagtcattctttacttgaagagaccctaaacattgactgtgttacctaaagaatagtgcctctttttcttccatatctgtatgatggcatgaaatcgcgtcctgagaagaggacctaagcatgtcgtggaaaatcagtatgcttctttatgaacatttattttaaaagagcgagagagagagactaacaggtttttctgtttgtgattgagaattcattcacagcacactgaccgtctcccattggactctgaatgcggcctttgtgctctcactgacgtcaggagtctgattgtcttaatatgtttctcaaggcacaacctataaaagccgttttctgctgtaccgtagaatattcatgagaatacagacttttttgttttgatgctgcattctttaaggagagaaggttttattgttttcttcagggtgctttgggtcaaaagcactagcagcttctgttgggaactcgtggcattttgaatggtttttgatacagaaatagcacaagtcacgtctgacacagccgtaggcgcacgaatgcgtgaatgcgattgtggttctcatctctgcagctggtgtgtggggccgggcctgggacagcttgggcctcatccccacccacccggctcccaggatcctcattaggaagccctcaggagccctggggtgggtctccttgccctgtgaacgctccatttgtgttaytgaatccaacataaatgcagcattgtcttcagaggtgagcaatggccgtggccggaggtgcgcatgggatgcaggcggcgtgtgctgctgttgattttctctgctctgctcttagcttactttagcagatagtggagtttcacktggcagtccggtaaaccaaggcagtgtgaacatcccttccccacaatgagtgaaaaygcaggaggtgccgtagygagaacagcgacagcattctgcgcattggtgagcccgactccccagcctcggtgcccaccgaagccccctctggctgcactgtgccagtgagtccaggctccttctcagcagaaggtggctgctctgcagggcccctcgcctccctgctcctcaggggacccgcactcttccatgtccrtaggsagacgcgcacyragctggagacacagatctgcgaggagtaacttgcctctctcaccagcactgccagggrcggatcagcgccagcaccttccagcatgcgctaaactgctggagaagctggagtggctggaaggagccctgcctgcctgccctcctcctcctcagttgctggccttggcagctctagggtgacccagcaggggcctggaggagtmggaagcagcttcccagctgcagtctgcatcatcctctctgtgctgtcacagaatggaaggttttagcagaaaaaggagtttgtaagcgacattcagaagatttgggcagcagtttcttcccccatagggtcctgtcttttgggrgtggggagtgctgggccaggctgctcgctggctgtttcacaggtggtggaatttaagagcagacttgggtcgagctgtgaccgttcaggtgatgcacgcacaggaggttcagctgtgtgcctgtgaggcrggcaggagygtcacccaagcttcagaagagaattccccggcagcagcgtggcgctcagcatgttccgtgtctgactgttttgattgtctctcagtccagttgacaaattccttttaagatgaaatttgaattaatttgcagaacttgtacaaatctccaagaaaacagcttaaggaacagattaaagaatgaatgccttaggaattaaagcattaatagctcttgagtagactggatggaaagatgagttgtgtaggttatccagatgaggctacatccagggagcaattcttaccttcagagggcgctgcctgtcctccttggcatccaagtgagcgcatctcctccacgctcaatgatgaatgctggccggcatccctgtgaggaaccttgtgatcattttccatttctgaaaactcccaggtggtgggggcccttggcccacatcagcattgaccaccccgggytcagatctggccaggtgcctgcgttgtgatgggaatttcagtacactgaattttgcctctgaccctgatgaaatagcttcggtggcatttgcatcaagatcatgttagtgtcatctctattagatgctttggagcaaacatgaacttgggtttccttttaagatgtcctgtgattccagattcaggggaatctgagaaaagtttgaagaaagaaaattccactcggccagccaaccttgggtgtgcagagcctgccccgccttccccactttgtcctgagaagctgggtcctccccagcaccagagttgctgctgcttcccctygcrcycttggctgctctcccggccccaagcctgagtgacactctaggattgcagatggcaggctggtctctgggctccccsgtccccatgaccctccacctgcacccagacctytgggtccttgctcaggcagcccctgccctcggtgagacgcagcccactgtgggcccttcccctgggcctgccatcagctcctgtgctcctcggcgccccagcggctgccctgggcccgttcccacagcacctggcacacagcaggagccatgaatgttctttgggaactgaatgaggagtggaaatgygggcatgtcatrtttttgaagttaataaaaaaaatcccttaaaagttgttttatgttcggtttttaaagagattaacaccagacgtttacaatgctgccccctccctccatctgtgagaaattagaaatggagggggatgcgctaaagccagcagcgggtcaggcctctgcccagcgcctgtggtgggaccctgtttctacatgggaccttgggtgacagcagcacatcttataagcaggggtcccacccaggccccccacacagggataaatgaggcgagacgtaggcaataacccagcttccaagatgcaacgctgtgcagttacttattccctgtgcttatttgttcaagctaaaatgtctctgtttgaccaaacagaaagaatatgagagagaccagtttcacctacaaatatagacaccagcattctaaataacatggtcgttgttgatgctattttgtttttctaactttatcccttcctggagataaatgcaactttgttcttctacattatacaagtgtatgccttccccgatgggttcacccatgggtgctgactgtgtaacttagaagaacaaagttgtgtttatccctggraagcacgggcccgctcacctgaggcactctaggaagtcactgcagggcactggtcccaggagaaccgcgtgccaatcacagccatgaacgcggaagagggaaccrcaacctgacagtcattcacgagactgtgtgttcaggaaagcatttagcaccrccgtgcttgtgagagccggacccgtagcccccagtgcccacagcagggagcccgccagctgagtcttcttcaagaagccaggccccgttctcttttctccgagtttgcgagtttgctgacttagctctcctccctgcctttcatatattttattccttaaaagaaagtctgaagcaaaygtaggtgaacgctgatgtttcataaaaccagcattgcttacgcagtttttccattttgctatattttgtcataaaaatgatcagaaaagggaagaaaggaaatgaatagggtccagtcctcacccacatatggggtgggggagtgggtggacccctgctttctgctcctgcacatggaacagtcctcacctatgtgtggggtggggggygggtggacccctgctttctgctcctgcacatggaacagtcctcacccatgtgcggggtggggggtgggcggacccctactccctgcttccgcacattgaacacgcagtttatgtgcgyagattcttctcacataatagcaaatgaaaaccttttactgtgtcaaagtcgacacccaattaaaaactaaatacatgcattttaaaagttgggggttgcacttcactgatttggggaaagaaacagaaacagtcagagaggaggatttcatttaaaaaacaacaataacaacgaggcagcccgtgctgcgctgtggaatgtgatcagatatattcagaagcttctgtcaccttctgggttgctttgtgtcttttcactgtccaggaaagtggcctgagctggtcttcgtggcctgaggcctgggcactcctcaggttcaagccagtccagccagggcagccagcagggccaggttaggagcatgattgactgcrgtggggcaggggaggggtgaggagacagtgaagtcagccagrgaagctgagagcacccctcrccctgggcrccaggagctcaggtgactgcagctcccacggctaagcggcaacccagggatcagaaccccaagctccggccagtgcccaggcctcccccaaagcatttcccacccttttytcaggagaaggctgagtcctgggaccaggacctccagtggtttggagacaaarccagtgtgggacctgctgcctgggcagtgactgtggaaatgctttgcacccaggggcagctgccacctatgggctgtttcacccaaatcggtggctttgagactgtggagtgcaggttttcctaggaactgagttgctgacaaggcctggtcttargccagtccagagacgggctgagtgtcagggtgaacgtgggtgggctgctctcagggatgcacctggacaaggtyacgcccaaaggtgctgaccctgaggggcgaggagctgttttctcagcagccctcttgttggcccagacacccctctgagcttgagaccctcctagagggcaaggccccacctccccacttggcccaggtcacatgagtgttggttatggggagctttctgaggggtgggcctgtgggaggggagcaggcaggctgggctctcacttggactctcagtgaagttttcggcagagtcgcgtgtctgagaagtgacgctgggatgtccctgggctgtgccaggagcagtgctggctcagagtgagtgcctgcacacactgcatgctttcagaatagggacctgccgtaaaaggggtgcgcaggtcgggctgtttgtgatatctgtaatttaaacctacccttcttcctgtgttacttttctcactttcatttggtattgattgtaaggaatgaaattgattcagcttctgttcctcatcaaaattacttgtagccttttctcaatagcacattagtacagggcagaaaatccatttcttcgcgaggtgcagaaacgcatgcccagaggaacgcacttgygccaagagccaggagcacgtctcgttggctgtgtctggtaaacatgttttccaagggggcgcttgtctcaccatggaaacgggctccgggtctcgagcgtctgtctggaccacttctggggcacacgctcttgtggctctcacagcggcacggtgacttcgatggaagaggaggaagaggagcaggacaggcagtcttcctggctgagacctggcgcccgcgcttttccttgaacagccacaacctttttctttatttttctcattattggcctctagaaatgacgtcagcaaggcctctgggcctgtagcggggtcctctgagagccggcctcccggggagggtggaggaaggaacagggattgtggagtgcgtcctggcytgacctcccatgggcttttgtgktttttgcccttgaggaatgggccccagaggcctctgagtcttgcattttgagtttgttgggcaagagggggacagggggagaggggtatccaatcctcaaatggtcacaaccccccccccgccccgtgaaggtggccagtgtgttgggtgggggctctggggcccagggacagcaaagggcggcagtgaccggctctcctkcttgtttttcccacagtggatgtggccacggcgctgcctctgcaagtggccccctcggcagtgcccatggacctgcgcctggaccaccagttctcactgcctgtggcagagccggccctgcgggagcagcagctgcagcaggagctcctggcgctcaagcagaagcagcagatccagaggcagatcctcatcgctgagttccagaggcagcacgagcagctctcccggcagcaygaggcgcagctccacgagcacatcaaggtgaggcrcggtgcggggctgygggtgggccaggcctccggcaccctcaacwcccggtgactccagccctgcctccgcggartgtgctggggccccaggcatgatgcagggttcctgcaggaggccttctgcgttgggacggtaacaccaggcaacaaaccgcgggcagcacttgcgtgtattgtggaggacgtggtgctgagtgggaacggcggtccaaagtcattgagtggaagcatattccaaataggaaaaatgcttatcgcctaatttcatccgaaacatgctcagaaatagaaaagctaccaaagggaagaagcaccagaaccttaatgatcgttgctgggaggtgtattgacaaatctgtgttttcttttccttaggacttttctatattttctattttctctactaaccttttataattagaaaaagataatattttcttttaatttaaatgcggtaagaaaaaaaagactttttttggtacttactgtctacaaatatttaatctgataccagattttaaaattaaatcaattggaaatatgtactagtgatatgtagcaaagttatatagttggcaggctagttatgatatctgtgattataatatgctgtcactgcatttagaaccatttagagcaacaccgtctaatagaaatatacatgagtatattaaaattccaccagtaattttaaatattctagtggtcacagtaaacaaagtgaaaaatcccacaaaaccagaytaagttatctatatctgtgtaacaaaattaccccaacacttagcagtttaaaatagcaagtttgtattgtcttgctctgtgggtcaggaatcctggagcagcttcgctgatggggtctcccattatgttgttattaagatgtcaggcagggctgtggtctcatctgcagggttgactggactgaggcgggaggagctccattcaggctcactcacatggccgcaggcaggaggcctgaggtcctcatccacagggctgctcacagcatagcagccagcttcccagagggagcaacccgagaggaagcatggccaacatggaagccacagggtctctcgtgccctgatctgggaagtggcaggccgccaccaacactgctgctgttgttgttcatgctaagtcttggcaagccactgggtcgcacgtagggyatgtctccattcaggccagccgcatttcgagccacacgtggttcgtggcaactgttggacagcacagatgtagggcatcaaaagcctatgaccgtatgcaacctggtgcttctgagatgctcacgtggtccatgggtagaagttgttcacctgaggtcttggctacctggcattagcccacacacagatattagtgtgcccacctagtgtgcagagtagcttaggggtgcatccctctgtttctgccctagctgataattctcttgaccacaggatcccagtttcccttcctttatrtgtaagacactttgttcagtgtctttatttcataatcactgtcgagaaatggaggtaaagtagtatcagttgtctgtagacttagtggcagattgtgggggaggctgcatcccaaagctgggctggccctggaggacaggctcagggacagctccatgtcccctctcatgggtgccaaaccattctgtgagtgcctgtgcttcaaaggtgagcccggagagctctgtactcggccccctctggccttgagggaacgggggctgggaggtttctggctggaccctgaggggctgcttgcgggctctgggtctttggacttggcaccgttgccttggcatttgttggcttgggagttgttgctgctgctttttcccagatgcatgggcctgctaatgtcagtgtttgacaaaccaaggagaggacactttcctgagctcttgaagtccatgctttatcgtttttgccttcagatttcagagcracctagcagccgtgtgtaacaaacacgtcacttgtccctgtggagattggcccaccagcctccactggcaccctgtccactttaacaagcrcwctcgagtttagggtggggcagttgagagctccacaagcaccataccctttgggatccctgtgatcctgacactcctggcaggtgggacatgagagaggacacagtcttcactttactgatggcaccactcggtgcagtggacaggccagtcttgcctccctcacggccctgaccatgggcaactgcagctggcytctgtttttctggcctgggagaagagttttcaagctggctgcaggaaacaggtgcatgccaggcagaaggcgcgggtccgggggagtcactgcaggcaatccctgcagcctgcccagggcttcagctcaccagcctttccatgatctgcgaagagcagccctcaagaggccactcgttttatttagtttttgcrccataggctcacattctatgactcctagaagtaattttttaaaatgagtaccgtagctccttygtattctgcatgttggcaaccccacatcaagcccgaggactccctgacagcagtcttgacccaggcactgccctgtgcctctcagaagyccccgtcggccattggtcccgcctgcctcggggacatgaggaccactcactcactccggcttccctgcsttcctgcaggccaacacagatgctggctgaggatggcctcaggggctcctgctgaattccatttttcctgttgtcactgcaccctggtgagccctgcagtccttgccgttgatccacctggagcattcacagtgcatgattaggaccccaccccgaagccgccatggctgtcggtgcagagcgaggttaaagagatgggattgctgatgtctcattccgtgctggttgaatttgtagcttttacaagaagacgacgtagatgagaagctgagaagtaagcctaagccccgtgtgtttgactggggctcctcaaggtagtcctaggaggccagaagacataaagaagacacttgagttggggtcagtgctgccatctcagggtgaggccaggtctcacctccagaacccctctgcctctcctcttctggtgccccaggagctggcttcactgcttggaagagagcaccccgaccccagtcctcacgtcgctcctacaggccaggccttcaggccatgctcctcattcctggaggggtccctgggaaagcccaccccatcaccctctgagagatggccagagaccttagaaccatggctctggagccagtctctgggccagggtctcaaaagcacagaaagaagttcaaggttgcctttctctttgcattttaatcatttatttcttcattaaaatagagattataaaagccatttgaactacatagtggtttcattacattaggaggctkttgtttggatgatttaaactctctttataagccatcatattgtttgttagtgacatttggcaatagtgtttgtcagacagatttcttgaacacaaaatctaattagtgtcattaaatcatcagtgaatttgaatagagttttataattgaaaagggagtcatttttaaaatataacttaaattattaatgttgggtaaataggatcttttaggagaattttaatgctcgtggtccccttggactttccggtttcctggctgtttgtggtggtttagacacagccttgcctctccttctcggayggtgcttttccaccaagaagcggatcccaggtaagcgtggaagttctctcttgcacttctgtgtttttgtttgtttgttttttgaggcagtctcgctcaactgttgcacaggctggagtgcattggtgccatctcagttcacttcaatcttcrcctcccaggttcaagcgatgctcatgcctcagccacctgagtggctgggattaccagcatgcaccaccacaccctgctgctaatttttgtatttttggtagagatgggtttttcccatgttggccaggctaggctcgaactcctggccttaagtgatctgcctgtatcagcctcccaaagtgtcaggtttacaggcgtgagccactgcgcccggcctctctcttgcatttctgatcaatgcctcccagaagaatatggagaggcaggacacaaacatggatacccagagagggtccaaggacaggccacgaagccatggctagagcatgcyccaggctggtgagtgatggagcaggggcatgtgggagaccccaagcacaagactgggccccggcacccacctcagggtgcatctctccccaggaggcacagggcacmccccacactgtgcacctctccctaggaaacacggggcaccccctgcagggtgcatctctccccaggaggcacgggacacccccacagggcacacctttccccagcagttagggtacayctctccccaggaggcgtggggcaccccctgcagggcacatgtctccccacgagacacggggcacccttcatagggcagacctctccccaggagatwcagggcaccccctttagggcattcctctccccagaagacaccgaggcacccctatagggcacaactcttcccaggagatacagggcaacccccatgggggatacaggcaccccatggggtgcacctctccccagaagacactgggcactcctcccatagggcacagcctccagggtagtcaccgagggacccacccatagggcacagcctccagggtagtcaccgagggacccacccatagggcacagcctccagggcaggcactgagggacccccccatagggcacagccctccagggcagacactgagggatagccctccatgatagacaccaagggaccccccccataggacacatcctccagggcagacactgagggaccccccaccataggacacagtctccaggacagacactgagggacccccccataggatacatcctccaggrcagacactgagggacccccccataggacacatcctccaggrcagacactgagggaccccccaccataggacacagtctccaggacagacactgagggacccccccataggacacatcctccgggacagacactgagggacctcccccatagggtacaacctccaggacagacactgagggaccccccatcatagggcacagcctccaggacagacactgagggaccccccccgatagggcacagcctccaggacagacactgagggaccaccccatagggcacagcctccaggacagacactgggggacccccccccatagggcacagcctccaggacagacactgagggacccccyctcatagggcacagcctccaggacagacactgagggacccccccatagggcacagcctccaggacagacactgggggaccccccctcatagggcacagcctccaagacagacactgagggacccccccaccaccataggacacatcctccaggacagacacttagggacccccccatagggcacagcctccagggcaggtacagggcaccttttgtatgtaggttgcacatcgccctcctgcaaggcttaccctctctccctgcactggtgtaaggcgtgccttttcttccctaacttcagcctattcccagtcgaatgcatgaagagtaaaaatcatttacacactgttttagtggcatgtcttttttttttttttttttttttttttttacactagcaaggctggcctctttttcgtgtgcttgtgtgtgtgtgtgtgtccatgtgacttgtgctatggagagcacagtggataggagagagttttcagagctgtttagttgatagtgtgactcttcctttcagggaggaactaacayggaaagaacctagttttctggcactgggagcgtgggtcatgatccttattctctttaatacctggccgaggaaggtgaagagatgttgcccaggcccagctttctggtcacctgaggcagctgtcagtgagcattagagctcacctgagctgtgccgaatgcctgatccagggctctgcgccaggacaggggtgcggtggggaggcagggggcaggagcacactcttggtttggagcagagtccctctgtggtgcctctgggtgaaggttaagaatagacgggaagacctcgtgcacacctttgcttagcatgagctgcctcccaagctaggcagaggcacatgcacgtggcagtgggcagtggggccaggtgacacatagggcacgtgggcacacacctggagagccatggatgccgtggccctaccccagctggtctgcacctggtgttcccatccatgggcggcagcttaccgtccgtggcgtccattctgccgccctttcctcctggcccctgccgctttatgcgggcgcggcatctgcccactctggggctgttcccctggcaagttgaaaaagagacacaagaaagtcaagagtttcgttttaaaagtgaaaatctttttgggttaccacttgaatatttgtatattaaattctgaagtcagagtcaaagcagctaaattctggggctcctatatttggttcagagttcagtgtacgcttaacgtaaacttaaagtctggttagagtaataggatcagctatgattggttttgtttttgcttttcttagaagaatgaggtcgtagtcatcttattttaaattgctcattatagtttcagtctgcaaaaaattgcttcccaacagcccttgccccatggagtagtctgacgtgtaaagttagcgagggactagttgcagacaattttagctaacttaaaaataagcgcatctcaaagtcctgtttttcgaagcctgaatttggtattccagtgacgcacctgccctccagaagccaactgagggttcccatggagaataagtacctattcacgatgctaggatgtggggcaggagtgaagaagagtgaaatggccatcttcccttgtggttccagcattttccgagcatgccgagggcagagggtccctgtgtcttctttgaagatcaagaaacaggcctgacgtctcagcttgtgctatgaacagggagtgttgaaatccwgtttgtcctgatggctttcactttgcaggctttgctctacagrtaatctgttataaatctaataaggtggaatgcctccctacaagtagcgaagccgagatcacacagcgttgccgggggcaggtagggaatcagtcactgtttgtgactgctggtttcattaaaactccaccacagtcatgtttctgggagttttgccttcctgtgaattttaatccccagcagccatggttgttgctttcattctttttgaaatgatggtggaaagagctcactttccctctgggttctggctgacaagtagatactgtgagactgcattaggctgcatctgtccgctctgcgtttccgccctgagtgagctctgagcagcgggagggagggagccaaggggccctgtgcaggtgacagccagaggggargggctcgccatracgaggagatcagttcaacaaaggactgtgtttgttttctgagctgagaagcaccccgaagccctgtgggttgtatgtttataggttaacctgctggtggcattcccaatctgcagacagtgtggcccagggatgctctcggggcacctttccctgtgtacacagctccrggtccccagggcagagtcctgaatctgtacatgcccagatgtttgtcctggtagagggactttgcttgcatgtggcggcaaggaacaccgcgttaggaaggtgtgctccaggtagtatctccctagccttgagggggcctgattttaccttaggatatttagtgtctgcaggaagtcggcgtctctaggcgacatctttcaaaagtgacggtttgatgacaatcaggccgcacggaggcaagcccagaccagctcttctgagtgttctccccatgccacctcttccagtcctcacaggaacccttgggggcaggtgccacatttaacccagcacggagaggttaaatatttaggtgcaagtgcgctggcagcaagcaggtgggtggagcaggttttatcagccaggcagcctggcctgggcactgccctccagccagcgtgctatgggccgcctgtgagtcttcggaggccagcgctgccctgatgaaggacayggcaagagcttgcttatgtttatcccaccatccccaagaagttcatttaagttggttgttcggaattaagtttttgccatgggaaagatacaggtgagatgcttggtgtgtgcagctagccctgacggccctccctgcccctcctgcgcacacrctgctgccgggcgtggtgggtgccccctctccctcggcccacccaggcctcctgccttgcctgtgcccacacatctgccaggagcagcacccctgctggaaggcaagcctgcattgcacctgcctgggtagggtcttgcctcagcccctcctctcctccctccttccttgggtgtgggcctacctcctgccacctctgcagctcttctatccccgtgctcctggctggaattgagtcccaccccccttgtgagggctgtaggtgggtgggcgtgtttgtggacagggcttttcatytgtgaggagagccggcaggtcctgtccccaatgtctggatgctgatctgctctctctgctgctgtaaatccttgctgtgtgtgaccacaggtgtgactgggcagacctgcctagagcccgaggtcccactgccctggactccaagcgattcctgtggggctctgccatccaggccacttccgctgccatgggacagtggacggggaggctggctgtgggctgcaggctgcaatgacccagcccaggtgggccgggaaagaccagcgctgtggtctccgtcctggaggctggggcagcctcagtccagagctatctgctggggtcactgcaatggggcaggcggtttctgcctggggactcttcctcggggtgggccatggggggcagcggcccagcacacccttccatccacatggggcactcatgaggggcaatcatgttcattttgcttgttcactgccagcgccagtttgaggttgccgaatgccatttggttggccaatgcctgtctctrtcccttgtctgggctgggggctttacttacagaatggaagaatgaggagttttaccttacaaaattacacagttgatgttacgtttaacatcgtggacacaatgtgattcaaatttcacacaggtcacagacatgcggggtgactggcatgtctcatcttgagtaggaagaggctgtgagcaagctgaaatcctttcttccctatttacaagtggttctgggtggtcgtggaaaccggctgmgtcctcagcagtgggaagcgaggtccaggaacgggattgatgccctggtgaggccattcctcatcccctgcaccrcctgtgaccatgaaagggcttgggccaggctgtttttgcaggctggatcttcccagaagcctaggggttkgaaaggtgtgtgtgctgggtgcccgggggctgagctggacctccaggctctcgcaggagagggtgtggtggccacctggaagctggctgtgcaggggcagcaagggtgtgaagcttgccagtcggctcgggcctctcatgtgaagaaggacccagcaagatgcaggagatgttcccggacacacaccgcctgcccccgtcaccttgccaacgccgctgaaggttggygcccacagagaagggcagcgcccttgcacgctcacagttacctggagcacacatgctcaatcccacgcgctcactcacattcagaacgcacacttgggtgcrcaagcacgttgatgtgcaggttcctccgtgcgggcagccctgttgtcttggagcagcgagccctgtagcagaaggcttgtgccgcctcccaccctgagcacgccgcgtgggctctcaggctgtggcacctcagggacccagccccccatccctgctggccctactctgtcggggttgcctctgcccgtccgatgtaatccttttcatctgctttcctacccctcagccacttttcattttcctttgttatcacctcttgctctgaagtgatgcgcatttgttgtagagcggcaatcggtcccgacctttttggcaccagggaccggtttcgtggaagatggttttttctgtggacaggggtgggggacgcaggagaatggtttcgggatgaaacttccaccacctcagatcatcaggcgttagattctcataaggaccatgcatcctaaatcccccacacgcacagttcacaacaggatcacactcctgtgagaatctaatgccaccactgatccrgcaggagcttgagctctggcgggaatgctccctagcctgccacttacctcctgctttgtggcccatttcctaacaggccagggactgctgctacccgtccacggccggaggtggggacccctgtcgtagagggattgaagaatacacagggacgacagtgtgacgtgggtggcatcccatgggcgccagtcctgctgtgccagcgcagycactcatggagcacaggcatccagtggctgcctcgcacgcacaccccactctatgcctcaggcgtccggtggctgcctcgcacgcactccccactctatgcctcgggcgtccggtggctgcctcgcacgcacaccccactctatgcctcaggcgtccggtggctgcctcgcacacacaccccactctatgcctcgggcgtctggtggctgcctcgcacgcactccccactctatgcctcgggcatccggtggctgcctcgcacacacacyccactctatgctttgctcatcctttccctggcctgagcctcatcctccaggaagaatcaccagctggtggaagccccactctggagccagcccggagcccctgattcactaaatttcctccacagaaagttcctcgggccactctggttgccaggatgcctgcttatcccgtaccctctcaccgtcccctcttcctccataaggggagcaagaccaacaaaaagcaacccaccagtggccgggtgaggcagctcacgctcgtaatcccagagctttaggaagctaaggcgggaggatcacgtgagcccaggggtttgagaccagccccagcaacagagcaagatcttgtttcrtcaaaaaagaagaaaacgtatctgggtgcagtggtgtgcacctgtagtcccagctactcaggaggctgaggtgggagaatggcttgagcccaggagttcgagaccagcctgggcaacatagcaagaccccttctctacaattttgtttttttaattaactgccatctatttgggagtctgaggtaggaggatcacttgagcccaggagctcaagcttacagtgagctatgattgcgccactgcactccagcctgggcaacagagcgagaccctatgtctaaaataaacaagacactgggacaagagacaactggtaacggaacaatcactggggacagcagacagaccatgaccgggacacgtgcggccacagagggtggcagagaggctctcccaggcaggcaggtggcagagctcctcacacctgtggaggcctggcacttcccccgggctggcccaggggtttgtgtggaagccgaggaaagtgtgtgcagacagaaccctggagcatgcgaacgagagcggagccatctcagaggagcggaaggacgtgcgggagccctggagcctgggttgggtcccaggacagaggtgctctgggtttgcgggagtccctctcagggcgtctggtcagttgcaccttcccacactcgtcagcgccaggccaaattgttccttttcaccttttccgataccgtgagtgaaatgggaagtgttcactagtgagcttgaacatttatcccgatttctttttaaacagttcttctgtgcatcttgttcttttctgcccaacgttttagtgggctkcctgtcatgttctcattaatggataacaaccatttatataaaatttgtatgtcataaatactgcagtttttcttttaccttctgccttttgttattaagacaaacattttatgtcgacgtcagtttttgaaatatgagatataatttatactcggtagaatgccagcccttaagggtgctgttgggtggctgtgcccttccctgtagacagtcaacaggtcggacactccacccgctggggcgtttcctccggcctcggcacccccaaccctacctcacccccgcagaggcagccttcttctgattttcatccttgtgcgttagttttttctgttttagggcttcatgtgaatatagtcagccctccatatttttgggtttcacctccactgattgagccagcggaggatcagagcctggagacactgagggccaaccacccgtatttccacaccaggctgtggtggaatgtgcggatctggagctgcaagtgcagaggctcagcggagggtctttcagtcttgcctcttctctctgctctttcaccctctgccaacacctgctgtttagcagttcacctgtgttttcttgtgtacacgtaggttgttgttttttatggttaggtggtattctctttgatgaacacacatcatttctccaagtgtccaccttcgagggaacatgtgggttgcatcaaggctggtctgtgaccagagctcccatgcacattcttgtacaggctttttgtgggtgtgcttccgtgtttcggataaatagctaggaatgggattgctgggtctcggggcagatgtgcatttaactttataaggaagtgcccagcagttttctgaagtggttgtaccatttcacgctctcttcactgtctttgtgtcgttctcaaaatagcatttccaacttgcaagataacataactcttcttgcgtattttcttctagcaagccaatggcttttgtttttaatgttttccacttcgaaggtaagacaatgcccagagcccggaatggccctgacttctttttttggactgaaatagcagcagtgcagggcagggcagtgcccagggccacaccagggcagacgtgtagggcctgggctggtttcttgggtcttcattgggtctctgtgtgtgtgtggagcctgggctctgaccgtctgtctcctccttccacttgcagcaacaacaggagatgctggccatgaagcaccagcaggagctgctggaacaccagcggaagctggagaggcaccgccaggagcaggagctggagaagcagcaccgggagcagaagctgcagcagctcaagaacaaggagaagggcaaagagagtgagtgtgggcacggaaggccaggcagagggagggaggccgggcagagggagggaggccgggcagagggaggggtgcgggcacggaaggctgggcagagggagggagtgcgggcgcagaaggccgggcagagggagggaggccgggcagagggagggaggccgggcagagggaggggtgcgggcacggaaggctgggcagagggagggagtgcgggcgcagaaggccgggcagagggagggaggccgggcagagggagggagtgggggcatggactccggaaggtgaggggcagaaggagtgagtgcaggagggcactggggcagcacacggggagtagggaaagatctaggggcagctgagcctcaccatggtgactcttgccactttgcctgtgctgggtttctaagaagcaggccaggaatgggacccccaccccctgacagggacagtgagtgtgacagtgtgtcagcccacccatggttagctcccccagtgaaccagagtccatggatttatcttcatccagggctgcaggattcaatattaacatcaaagcaaggggcattcagcccgacttttggtttgatttaaacattttaaagactatttggcaggattcctaatagacttaaaaatattaaaagccataaagcatgccagatgcacagtgaatttcatctgtgagttctgccctgcatttttcaaagtacttttctttcgggagcattttataagtgccttcaaagcaggtgtgaggttgtagagtgacccacggcccagtgagggccagcagcgtgctcttgctatctgctccttccactctgaattttgccttctgtgggggctgtgtttgtacatctggagaccagcatggtctgttttcttctaaggagagcccacacttcatactatccaggagaacactgtatttgctgtttcccactttggacagttagagggacgcatctactgaggaaaaggtaacagtgtcgcccctgctgactgtgggctgctgggacgatgacccgtgggctcctctgcacgaggacggtgcccagcgtcgccagtgtgtctgagccctggcgtgtccccggggtgcagggtccaccgtggggctgagtcagctctgagcatcctctcagatcttcacttaaaagagcccttggctcactgtgtgtttatatcctttccatggacaacttcttgttttaagtgacacagacagtcaggatctaatcaccagagtgaagggactttcatagacactccgagtttctgcccaggacttacatgctcagttaaatttgtctgttccctggtaatactgaaaaggagtcgaggtatacattttcctcaggtaacaggattccaggtaaggagagtagagggatttactcttgtagggctggcccatgagtcagaagagaagtccttrtgcacttcccccttccccaaagataactcctctcctgatgtttaacatggaagattaattttgcctgcttttgaaatgtatgtaaatggaacccttaatatgtaggatttttgcgttttgcttctttctgtggacattatgcttgtgaaattcatccccattttgcatttagcaagaggtcattcattatctattatatattgctgcatggtgtcccatttataaatgcaccaatgtagtcatttcttctaaagttgttagatatttggcttgtttcctaaccagagctattaaaagcagtattgctatgtgcattcttgtacatgtttcttggtacatgtgggcaaatgtgaagtggagttgttgaactttggggcatgcatgttgtcagtgttcatacgtgatgcccaaaagttttcaaagtagtgtaccagtttacactcctaccagccatgtacaggggttcctgtggctccatgtccttgtcaacacttgctgctgtcagtcactttaatttcagctcctcctcatgccctcagctacatttctttgattaccaataagatagtttattttcataagtttttttgccgaatgaatattcccctttttgtgaagtgcttgttccagtctcttgcccatttttctgatgcgaggtctccctttttcttgatttggagttgttctttatatattatggaatcaacccttggccagttgtacatgctgtaaatctcttcttccactctgtactttgcctgttcactctcttaatgttatctttcaggcacagaaattctcccttctaatacagtttcagtcttttcctttagatgattttgtgccttaagaaatctttcctttcttcagaatcttggatacatcctctttaattatctcctaggagctgattgtacctggaattgatactagtggggttttgtttgtgattgcattgactctgtggttcaaattaggaagacctgatatttttacaacattgattatttaccttctttaatttttcttaataatttcttaatagttttatgtttaggaggcttgcatatatttgattaaatatatgtcaagccatttgatggctttggttgctattgtgaatggcttggtttttataattttgaaaagcagtcagtttttgaccattgactttgtgtccagcaaccctgttaaactcagatatcctaatcattaatagattgttttgaattttcaacatttagaatcctgtcatctataaataatgagaagattgcctcttttctgattggaataccttttatgtcttttacttgcttattatatagaatgggctgagattgccaatatagtatcaaattgtggtcctgatggcaggaacatttgtctggttcccagtttactgttaggtgccaygttttctgtaggggctttgtattttttactcatttgtctacttgtttttgacaggtgctatttatcagatcatggaagtttcccttccattcyttgtttgctcggggtttcaatatgaatggatattgatttttgtcaggtgctgtttcagcatcttttgagatgattgtatgattttttggctttatgtggttaatgaagtaaagcatatggatttatttgaatataaattctaactggcatttttaaaataaccccagtcaacttgattgtaatatattatcttttatgtagtgaaaacttggatttgctaacattttattttgtatgattgcaactgtgttcctgagggakattgccaaacagtttcctttctcataatgtcctcgtcaagttttggtgtcatgactgtgctggcctcagaatgagttaagcatcattcctctctccttttgtattctctggcaaagtttatttaacatggatattactttttccataaatatcttgtgaaacttactgctaaagccatcttaaccctaagatttcatttgtgcaaaggtttttgattacttattcaatttttaaaatagttcctgggacatttttcccccccggctcactttagctaagttgtatttttttaaaagaaatatatgcctttgttatacatttttgtatttttgacttagtggtttttggtgtcatgtccttttctggtgttttttatgtctgtcagacctttaatgatgtcctcttttacactccagatattggttgtttgtgctttttctctttattgctgctgttttgttttgcttttgtttttcttggtcactctctccagaagtttatcagttattcttttcaaagactagcttttgactttatggatgttgtttgttgaatatcgatttcattaatttctagtatttttatttctctatgttctgttttcttagggtgtattgtggtttttgtagctttttgatatagatacatagagcattgatttcagctctgtcttctaacatatgcttatatagctatacattttcctctaaatgcaactttatctgcatcccacaagttttgatacgtagtttgacaatctttgtctttcaattagtttggcccatttacatttaatgkaattattgatatatttatgcttaaatctatcattgtacaatatgaattataattatctcaactattctaatgcacttgtcttgcytttartgtatgtttttagtgatatatatatatatatttwwtwttttttttcaccagcttggtaatcactattttgctgtttctttactgattatcagtaggatttcaacaactgtctttaatctatcacagccttatctaaattaatacttttgccaattctggcaaagtaagggtctgggatactttaactcttaatttatatactattttgacctgtatttaactctaaacttatctttaacatcacaagacattgttgttattattttatatagtcaagatttactcataaatttatcctttccacttttattaatttctgcatgtctgaactttcatctgtgatattctttgtttaccttaatgtgggtctaatggtgatgaattttctttctgttcaaaatgtgatttcaggttaatctttgaaggttatttttgctgagtatagaattctaggtttgtatttattttctttcagcactttgagaatgccattccattctcttctgacttccattgttaatctccagaaatgagctgtccatcctattgttccttctttggaaataatctttcttccctagctatttttaagattttgtctttggttttttgaagttcttctttaatgtgcttaactgtagttgctttcattttaatgtcttctttttgggatttgtaattcctaaatctgttgttttatactgttatgaattcttagacctgattattctcaaacttcacctcaacagatactgactttgccccagtctctccatttaatctatctgggatttagttatacacctgtgttggattagctttcagtatcccctaagtttcttaagttatttttgtgtctttgtttcctttttcttttgcctcagtgtgggtattttcttccaatttatcatccacttccctaatttgtgctttacctgcacaataatctgctgttaaactcatccattggattttacatttatttggttttcagttctaggattttcatttggccctttttcatagttttccatagactttcttgatcttatttttttctgcacgtagtgcagttattttggagtctgactggtaacactctctggccctgtggcaaggctttcctgcctgttgtttctctcatttttttttttttttttttggtcagattgtgtttatttctatggttggatattttaggttgcatgtctgactttgcactgttgtgatgatgggggacctgggatggtgacacattcttttcgagtggactttgttttccttcttgyagttgaccagaagtggccaagtttcttaagcatctgaatgcagtcaggtctggagctgattctgagttgggtttcaggccttcaaaggcctggtggatttctggccatcgttactcataaggcatawccctttgaggtcctacgcacaagctyatgaggttyattggggtcctttaattttcctcagtttttgtggccctatcaagggcctcttcygaaacccactgttgagtctagagaacaggctacccgagggtggggtcctgctccccgcggtccctgtttctgacctcggccctggtgttccaygctgccctagttgttctctgtgccttcacacagaaggctagggtgctttgtctagatcttctgaccatttccagtaggtttaattgaattacctgaataaaaattcttgaagttacattattgaaaacaccatgtgcttggagtactccaggtttcctaacctgttctttatactgtttatgttcttcgttttgtctggagtgaaaggatatgttaatatttggtgtgtttggtgatttgccttcatataatttttagattgtgaaattggcattttgcttttaattaatctgcactagatttgaagtttttccaaataggacatttttgttcatttgtttgtatttgaaatccttgtgttctaaaaagaattaaataactattaagtaaattcagtttgtaagtttatttttaatgtaatgaatgttataactaatgctaaattagaattgggatataatctaaactgtattattatgcctatattatgttgtacatttttataaatatttgctatttcagactagatatatttttcctaagagtacatagctaatgcactctctgagtttttagtttattcctctatttagctatttccaagttcttagtaattgtttttgtccataaaactaacacttttatcaattatcacagcattttactcttgaaataataaatgcactttaaatgttttttcactttaactggtagaatttcaaggtagaaggcctctgaggagggtttatattccattgtaggtctaatttttgcatcaggatttgaaagtgagtaccaaatctgcctgatggccctggctcctggcacattgattagataaggtggtgacttaatccccagggattgcccacaggggagcgcttccagacatggctgcagaggccttgaggagacgggrcggcataggggagagcttccagacatggctgcagaggccttgaggagaaggaccctgcagacagggctgcacacacgcacgcctggtctttgcatgcagatccgggccctctcggtagtggacggctgtgctgtgggtctctgttcactccagggtgttctgccaaactgatcccaagtggaacccrgctggcagtgttcttgcttctgaagctgcctagtgcgttgcctgggttgaggaccaggagcgcagctgagccctctggcttcacgtgtgaggaatctgagtatcttaggggctccacggcctgctgggcggggcccaccctgtggggttgctttccactttagaaagctgccttccgtagacaatagcacgcggtccccgtgggagccctgtgcgcggggctttgacttgtctggcctgtgctggtgacgctgcagtgcaggaggcgtgcgtgggacccacatcgcgggtgtgcgccacgggcccaagcactggggcctctgcctggggtccggcctcccctccacgcttctgtggttcgccggtagcccagggtgtatcctatgtatttttctttggagtagggaaaatagttgcttatcaaagaattgaagtttaaaatttaaatatcagctgggtgatttgtgccacaactaaccaacaaataagagtttttcagattgctaaaaagcagcttggtctaaattacttccwcagagtttaccagactcttccaataaaaataccatcttgaggctcacagaatatgaaaagacttcacttcagaaaacattttggatccgtttaccagcccaaaacaatccctgcgctgcatccgaagcgccgtccacccttaactggagctctggaatgttcctgctcccctctagccccgtcacaggcggccgtcccggtggttttcactgaggatttgggtggtcagattttattattaataataaactgtrtacagttgggtacttggcaagcttgtgtcggctctgcagccctcagagtgtggtcttgtggtgaggacgcagggccgcaggcccctgtggtggacgccactcgggggctcttatgtaagcggggcccaagccggcgtcttcccccatgaaggaggttcttgtctgtgcaggctggaggagcagtggcgggccggcgcgggggacacgaagcaccgccagcatctmagcatttgaaaacacggtgcacrgcatctgtttattctcttgggttttttttaagtgaatttcttattgagtatctaataaatatcattacacttataaacatttacattacttttaattttaaataattctgcacttttatttattgataccaagtaatgcaattcatttgacagaacggtggcagttttcatcatgtttagcaagaacacactgtctttaaccagctaggttttgatttagattaacggcacttgggaatctaagacacggctcttcacataagctcggggaaggagcaggggcaggctggactcggcccgagcagtgtggagcgaatacagccccgctttctctcactgcggtccacacgcgcagccctgcagggaatggagggaggtcactgagcaagtcctttgctctgtgtaaaaatgacgtgaaaggctgatcctgaaagtcattaggtgtcctttccatgaagttgtgccttcctcagaggcaagggggtggagagaaaaaggagcactttcaggcagaagccaagcagaacctgccacagctctgtcgtctggactcgccaggcccaggccacggccctccgggagcacagccgtccctccccgaacacagccgtccctccccacctgccccgccccgccccacccagagctgctgtcctcctctctctgccccgctcagctgttgctcgctcattccttaggtctcgggtgcactctctgccccctggtatgggaagaacttggcctcttttatccaccgcttcatctctgctggccagaacgggctggcatctcatagagcctctgtagaagcctccatgcaggggatgagtgatactcaatgtgaattaagaaaaaaaaaaaaaaagtaaaagtaaaaattagggagatctgctatccatttgttgaatgggttttttcattctagaactttaagtgagaaacctgttgacagatgagcgtgtgcataaccagaagtgcagaaacggggtgggggtcagaatcagcccctcattttgaatactctcctagtaaagtctgaaagatcaaaagaagattccttggtggttagaaaggtcatgaatcgaagacttaccttcctcgtgtttcctgctggccaggcctatgctgggcatgggtggggtgtgaaccccagtcatgtctgccccccactgcatggggcatgaacgccagtcatgcccagcacccagycctgcatagagggagccaggcaggacccaggcttgtggccaagtcaccctttgccaccgaatggtgtttgcagaagcagggagaggacgtgggtcataaagtgggtcctgttcctggagtgcgcaccctcccccgtggagggccagtggatccacagtaacagctgtccctgggaactggtgttttgagcaggtaaggctgactgcactgagtttgggtctactggaaagtgttgagggcgtcctcgtcccgcacaccgagaacctgcttcttgtcctgctctgctgcctccactcaaggacggccrtgtagggggacctgcagggcagtcccctccaacaactggccatctgggtcctcatcctcactgtcgctgtcaccagcatcattttgcggttggactacttccctgcactgtcagcagcatgggtagtacccaaaaaaatgttatccgtgtaaaggcaaaaaattgaagttacccatttcacttcttatttcttttatcagtaaagttaagctgatttaacatactcattggcaaatttgccttctccttttgaaattcgccttctgtgttctctgctcacttatcttccccaccgccyggcctttccttttattcctagttgtggaggcagtttgtatatttacgaggttaactctctggtttatgtctgggtctgtttttccaaagttagcagcctgttgctgataatcttttaggaatgccagtgctcacatgcctgggaatggtagaagcgaatggtttccataagtgtgtgatcttctgaccagtccccttacagacagacagttcagctaaaagtgcttctaagtgatgttcgagtctaacgccgggtgccctgaaaaagcatccctcctgtccccccaccgccaccctacctggggcagtgctcaccgcagtcacaacttaggtgatgagacatcttcagcagcatgagctgggggacrtcacaggcacagcttgactcgggcaatgacatgattttctcagaccgacagagagccctgagcctgaagcctcatgcatcacggtggcccttcccggactcatgytggtggtcgtgtagttaatgtctttgtgtttccctggcttggctagtgcaggccccaccacagcctgggtagaccctgtttccaggcgtctcattgctgactgacccttgaccagacattaaagttccaccttaatgtaatgggagtggggttctgccgtagggaacacagaatgagcctaactaacaaaaactccatttgtgagtggcagcaaagacatttggtatgtgatgaaggtggcaaggaaaagacatctttctaatgatattaatcatttattagcagttggtcagaatatccatagagccttatatgccaaatccatttctgagccatcagagtgagtcatgaaaaaattyagcaaataaccaaatgaatgaaaacccagcaccagaaccaaggataaaattaaaatgatggcttattaaccactgaaaggaggaacaatggcagagttttaaggaaagggaaaactcacaaaggaaaaactaaaatagactttataaaaacaagcatttgaacattttacccaaattgtaaaaggaaacaagaggcagggtaaatgcacacacacacggagcagccgagagccacgaaccagggcgtccatgagacttggtaactgagccaacctcacctgaggcgcacctggccgcctttgtgttctccatccacagtcgggggatgagaatacctatttatagctctcatgcgaggccgaaccaggccagrgctggcatatactaggctctcgatacagccattatcataagaaacccacgcaactccagtggatacaagtatgaaacacacacacacacacagacccacaacaccactgtgcacatcgccggaagattctaagaacacataagccaaggacatgaattatcttgcaagagaggaaatcggcgcgtgtccagtggtgctcaggggtgcctcacagtgatgcctgctggcttttggatttgggcaaatggtgatttgaggaccagcaggaggagcagctgcccctgctgcaggtggatgggtggttcagggsgtcagcgtgtagagaagtttcgtttttctttttttcttttgagacagggtctaaactcgcattgcgcagggtggagtgcagtggcacagtcttggttcactgtagcctggacttcccgggctcaggtgattatctcacctcagcctcccaagtagctggaactacaggcacatgctaccacactcggctaatttttgtatttttagtagagacagggtttcatcatgttgtccaggctggtctcgaacccctggggtcaggcagtctgccctcctcagcctcccaaagtgctgggattccaggtgtgagccttcgggcctggcctatgtgtagggatattttggacagcaatttaccaagatgtgccgagggttagaatagtaagtttgttagatgtagtcactttgccaagatgtcctaagcaagtaattctaaaggtagtcagtgttacccactcataaatgttcactgcagygtggtttctaacaaccaaaactgcctcccagtcgggaagtggttttgtaaacatgcttcactcacctcarggtgtgtttttgaccattacaaacgctatctgaatattatgcaacactaggaagatacttaaggtgctgtaagaaggatagaagtactgtgtggttagattggagatctgaggcgagcagcctccgtgctaacaggccttgtgttcaggcggtgagagtggccttttttgccagttccctttaatgaggctttgaaaaagaatcaccgccacggaagaaaaccacagtttcgacttcggtcccacttggtgcagtcactctgcctgagtctgagctgccaagctggggaggacaggcgctgccctttgatgctgttggaagcagagccggccgtcatgtcggcgcaggtgtagaaggaagcacgcctgcctgtgagactggctttgtccctgcgtgatgcatccatttgcacaaagccttctctcttagattctgctttgcggtagcaagaatgcaaccaccacgctgccactgcctaattcagagtgttcttttatgtaagaatattaaaacttccttcagaagtgggttttgygttagctaacaataagtctttcggatgattaaatctgcattttaaatagaatgcaatgatgtaaaatcttgatgggaagaaaacckctcattaaaacccctcccggccttggttctttgaggaagcgctcaggaggccacagcgtcctgaaggtgcatagccgtccccagcccttccctccctctgtggccccgctgccctgcattrctgctgtagggcagagccacacttcaccccctgctatgctttctcccacgccaggtgccgtggccagcacagaagtgaagatgaagttacaagaatttgtcctcaataaaaagaaggcgctggcccaccggaatctgaaccactgcatttccagcgaccctcgctactggtacgggtaagtgtgggtgtggggagcaccccggcctcctctctgggggcccagaggactgtctgatcgccggtagatttgcatggagccagctcttcacctgaggcagggaaggagggtgaggaattgaaaccccaagcacagtggtgctcggatgtgggtgacgtgttctgggggtacactcgtgcggcagccgtcctcacggaggggcccacctccagagtgacatggtctgggggtacactcacacggcagctgcccctgccctcacagggggacccacctccatagtgacgtggtctgggggtacacttccacagcagccatcctcacggggtgggcccccctccagagtgacgtggtctgggggtccactcacacggtggccgtcctcatgggagtgggcccccctgcagagggaccgagcagtgctccggaggctggtgcctgtcgttactcttggtaatgttgtgccatttttcagccacaataagagccacttaaactggaactcttgtctgaatcctctgtgctccgacagcgctcccacctgacgtttcaataattcttaggctagtcaggaagcccccgtggtacttctattattttatactaagaaaccctgccagggcccacgcaattgacagagaccacaaaaggcttgttcgtctgaggactgaagagagccgacctgccatgcaaaagaaggccttcggggggagagttcacagagcacagtgcgagcgagtggcgaggtgatgmggcttgaaacagtgagcaagggcaacagaggatcgctttgaaatgtagttttctgctgctctcaaggttcatttcatttctagaaaaaaatcccataagggagtttttgtaaatcgaaatatcagtaatttcgttggaaaaaaaatagctattctcaagcctcaaaatggacagctatgtgtagtgagacccccccacagctcagacgcgatcccccttgtttccgtggaggccgcccgctaccccgacacatcccaaaaggtgtttccagcacaggtggcccacgtcctccactctggcagccgctgtgcttgccagtggcacataagctgcactcacggcagacacacygtctggatttgggtaactcraccagggacacacaaacttgcaaggaggagtgagaccggcgtccatgggaggcagcacgtgacagcagtgasccactgggacctgagagaggaggtggcttcctgagaatcgctggcaaccrgcacctgggagcccgctttgggggagaccccgatctgtgyccccagagccagtccactgcctggactggttgtggagaaactccattgtcctactggctggggcagggcgtggggttgcagggcagaaggagcaagggacaggagtgtggatcgtggttcagatggtgcccctggggcccaagctggaaagggcaggwtgaggagccaggggcagggtgggcctggggcctggcggaggatggagagctggagtgcagagcctgctggaccagggcagggccgccttgggtccccctgtgaggcagccgagcaagcgagctttgagaagacagtgataggagtggggcaagcacgggcagccctttctgaagaggagcacagagtctgggaggctgcagcgggagttggaggactagagcagtggggctgctgggaagcaggggtcacggtgagcacagggcagcccccagagggtggccacggcagcatggaagaaggtggggagctggcgccccctcrcccaggagtcagtggacagtggacggggggccgaggccagcaggaatagaagccgggcagtggcctggacctgaggggaggacggagcagcaggcccaaggaaaggctgcacctgcagtcaaggaggccacgggagaagaagtggcctggggcagcctcagggcgctgagggacgtgctgagagacgggagatggggggcttycagggaggaggggtggcaaacagagtggctggggctgggaggactgacttttcctggaactccctgggtgagctgggtgttcaaggtgagtgtcttggcctggacaagggcggcgtgccctggctttaatggcaggggccggaggtacttcttctcagagggctctggggaccttcaggctggagggggaaggacttgatctcaagtcagccataggacaggtttgttttcctggagcctggtggttttcttgttttgccgtatttgaaccctgaacttaaacatcatggagtggtggcagaaactttgtcagaaaaccggctcttcatagggaaagaactgaaaccctgatcccagcttcacaccacgcatgattagttcagatgtcatagacctgagcctagacgcaaaactgatcaaactggaaggagacctagtagaaacttttcccaaccttgatggggagggggaggcaagatttcttaggtcgccaaaatcatcggctagataccaaaaacccaaaacatgatatttccacaaactgaaacacttctgctctttcaaaggcaccattaagaaaattaaaaagcaagctacagaatggaaggaaatattcacaatgcgtatatcttacaaaccgcttgtatccaaaatgtagagctcgttcctataactcaatagtaaaaagacaagccgcccacttaaaaatacggtcaaaaggtttgaacaggtacctcacaaaaaaaggcatggggatggccagtaagtgtggaaaagatgctcaagatggctggtcatcaggtaaatgcaaatcaaaactgcggcaagcagccccttcatacctgtggggatggccggagtgaaacaggccgggtgctggagcagatgcggtgtccctggacctctgtgtgctgcctgttggaatctgaatcacacgtgggaaaacaggcaggcagtttcctacaaagacaaatacccaccaaccctgtgacccagcaatgcttctccgtatttgcccaagacatgaaagcaagcaacacgacgagtcgtcatcttacggtcacagtcaccaaacagtggaaacaaccaagctatcaacaggggaacggccgcgcaaactggggcccctgcacacgctaccgtgcaaactggggcccctgcactgctactccgcagtgacaaggaacggaccgctggcgcctgcagcagcttgggggagccccagaggcacggtgcctagacaaagaggccacccccatgactccactgatgggaaattcagagtcagcaaagtgaatcgactgtgagagaaagcagaccagggctgggaggctgcagagatggatggtgctgtggcttcatcagggcgtggactctgtgggtgtttacgtgagtcaccgcttccagctttaagactgttgagacaagatggcaccttccagtgtggctgccacaagccacacgtggctcccgagcacttgaaacgtggctgggtccgaccaggacatgccatagatgcagagcatggaatttcagacacttggtctgaagaaaggacctacggtgtcttattaatatgtttatatcgattataagttgaaaggatggtttttataatggtttaatcgaatactaaaattaattccacccatttatttttatccatgttaatgtggctactaggaaattgtaaatttcacatgtggctcccatcatggtacatttctgctggagtatcctggcgtatgtggttcctcgttgtatttcttggaaatcactggtacgaatctgatgaaagggcaatggtttggaactgaaatggttgagtttgtatgaagctttattctacagtcaagccagtgtttagaagaaaacagtatttgcttttccatcttcctccggaagacaaggtttgcctttaggtgyggcatccgggttggccccagggccccgtgggggctgcacctcggctcctggcccrgcgtctstgtcccatccccaggctgcaggaaatgaaaggttgaaaaatcggaagataatttatggtcaggtgaggtagagggagcagctctgtaggttctgccctcagggctccgtggggtggccagtgtgactgtgtgagtgtggagtgtggccggggtgagtgtgagtgtgggctgtggccggggttagcttagtgtagggtgtgaatgggggatgtgggtgtgtgcagtgggtgaggtgagtgtggggtatgagtgtgaggtgtgggaaaggtgacaggtgtgagtgtgagatgcgggtgtgtgtgtgggaggtggggtgtgggtgggtgtgaggcatgaagtgtgggtgtgtggggtgtgggtggggtgtgcgtgtaagtgggtgtgaggtagatgggtgtgagtgcgggaggtaggcatgagtttgtgtaaggtgagggggtgtgggtgggtataggttgtgaggggggtgtgggtgtgaggtgggtgtggggtgtggaatgtgggtgtgagtagtgtgcagtgcaggtgtgagtgtagttgggcgtgagtagtgaggtgaggtgtgggcgtgagtgggtgtgagtagtgtaggtgcgagcgtcaggtgtgaaaagtgagatgtgggtgtgagtaatgtgaggtgtgggtgggagtagtgtgaattgggggcgagtagtagtgaggtgcaggtgtgagtagttgggtgagctgcaggtgtgagtgggtgtattgtgaagtgcgggtgtgtgtgtgtgaggtgtggaggtgagtagtgagatgcagatataggtatgggtgaggtgtgtgtgggtgtgaatagtgtgaggtgcaggtatgggtgggtgtgagtagcgtgaggcatgggtgtgaatagttgtgtgatgtgcggatgtgagtgttaccagttgtgtgatgtgcggatgtgagtgagagtaattgtgtgcggtgcgggtgtgattgcagcagggatagagcttcacttctgctcgccctgctggaygcttcttcgcggagggcacgcgtgtgcggtctggcctgggaccatgtgaccagggctgggcrggtgtgacctgccctgacggtgagggccgccctctcctggtgtctggagggcgggtgcgcggtggggcgggctctgcatggtgtgctcctggcggtgagctgggctatgcaggaggtgaggtcgctcctgtgaggtctctggatccatcgaggtggtccagcggggaggcgctggcagytggggggcagggcccagcccctcctgcacctgctgctctgctcgttttaaggtttgacaggaaagtggggattttaacactgaaagcacctcaagagatcagaatagtaagagaacgtctgttagatcttaaaccaatgtaacttttgcaactcctacttcactgtaagcaaatcctaccgttcaaatataataatttttattccatttatttaaatttattattatgtaaatactgatctttttaactcgtgggatgcatgtacaagtcactccgtgtttcccatgaaggaaaaagtgaacgcggaaatggtcccagactgtcacctggtgttgaagaagtttggaatcagccaagatcacattccccataggatacaatctgaaaatactrtttggtagagaaagagtgttgcccccagaccttttcatgagattgtgagacgaggggtagaactacagggaagagaagggaggcttgcacaaggacgtggtcccacttggaggccacagcccctgcacaggtgcagacaggcgtgtcccagccctgcastccgagcctgactgcatggtggaattccccgggaaacagcgagaagctgcttggggttggaggtgtgccctgagcagtgggcggggttggggcgtggcctgaagctgtgcagttttccggagctccctgagctcctcctgtgatgcayggcccagcaccccactgcccaggtgcctgggctcggctcctcaattttgtctatgagttcccttcagcacattctttgcactggtgtgctctcaaatatttaaatatacacctgtacccatttacaagctcccattcttaattcarataactccaggtgcattggtgtgccatactatgtattcaaatagtctaaccaattccaaataagtaagtcggcaaatttgtttgtagtcattaagcagattacgcagtttaaagactcagaatttattccactcagcacagtgttttgagcaagactgagctgtcagtgccgtcaaaaaaggccttgctgatggtcatccgggtggcagcccacatccccgtcccggcccagggcccgcctcctccccatgtccgtcctccggccattctcctggcagacgattcctgtcttgctgcctggagggtgtggagttgtacccagctgttcatacaggaagtccctttcgtaggtcagctccctgggcacagggtatcagtagctgccatcctgttcctcccccagagagggaggtgaccagggtgagtttggtgaaggcacggatgacgatgggtgccttctgagagacagccccatgggcttcttctctccaggtggcagagagagtcccacacatcacagcgtttgttcttagaccgttttttgcccygtctcagctgcctatgaactcacctttgattccttatgcagcagcctactgttttcctcttcctctccccaccggggataggctctctgagtggccagtggtggccctggtagcgaactgactgggctggagccatctgagaggacagggccaggtggagaacagccaccaggaaaacggccagaggtgctgcccatcccatccccaagcactgctggtcccgcagaggaggatgtgggcatcrgatgtttgcttgcttgtttagcatcctgtttgtttccatttaatttcagcttgaccctagggaaaaggtgtgtctgttgaggtggggctgaggtttcaagggaaagatcatcgtgtgtggcttctcggctgcagcatgcctggggcagtgcgctgggtaaactaaaccatctstctttgccttctctccaggaaaacgcagcacagttcccttgaccagagttctccaccccagagcggagtgtcgacctcctataaccacccggtcctgggaatgtacgacgccaaagatgacttccctcttaggaaaacaggtcagtgcccaggcatgctgtgggccgggaggtctcctgcackggcaccttccacgccacaagccacgcagggcccaccgctgtcttccacttagagaaggaatcacctgcagatttttaaatattttctcctttcatagagcatcgtttttaaaagatatccctaaacatttccttattatttatttcaaaagaaatgaacctaacgcatgtacaccactgctgaacactcaaactcactttgaaagcacactcagtttagttttctttcggtggtgtgttagattttgccacactgaggggcgtccccgcagtggtcacagggtgaagcaagttcctgttggtgggccatgtgccgtctgagagcaggtgagcctgtggccttcagggatggcgctgggcagtgccagcagcagggccttccaggtccccagagtgggagggaaatctttatgagaaagaaattcgctatgtcctgcaggggatatcccagctgggctcagagttatgtgccacagttctgtcctaagccaagggagaagggcatttaggcacaagcaggtgcctggaccatcttagaagcagggagaggcggctgcagcagtgtctggcaagtcaggacggaccctctgtgactttctcaggggccacggcagtggctttagataatgattagggtggctgtgggcagtgcgctggggtagcaagaagggcaggggccagggagtgccttccagaggctctgcccagagaattggtgagggcaggagctggagcaggtgctgagggcgggcagtgcctcatcccagatgtggccagtggatcctacaaactgcaagacagtgtgggaaatcccaaggygtcctccctagggrgcggctcttggagatgagagcctaggggcaccgcttttttttgctaaacaaattctctgttatccaaaggttttggccagttctgggcggaaacagtgaacrtactcagtcacacaagggcttcttcactggaacaatgaggctttgtgaggggctgctgggagccgtgtcaggccagccacatccctggagcagagggtcatatcaggccagctgtgaccctagaggagtaggccatatcagccagccacatccctggagccgtgggctgtattggtccagctgtgaccctagaggtgtgagctatatcaggtcggccatgtcccaggtggagtgggccatgtcccaggtggagtgggccatatcaggccagccctgttcccaatggagtgggctctattagggtgtgttgaggcggtggtgtcccaggtggagtgggctgtattgggctggccatgtcccaggtggactgggwcatatcagtctggcccatgtcccaggtggagtggaccatatcaggccggccatgttcccaatacacctattagggtttattgaggcggtggtgtccctggagcagtgggccgtattgggtcagccatgtcccaggtggagtgggtcatatcaggctggccacgtcccaggtggagtgggtcgtatcgggctggccatgtcccaggtggagtgggtcgtatggggccggccaagtccctggaggagtgggtcataacaggccagctgtgacctcagaggagtgggcygtatcgggctggtggagaccctgctggagtgggccatatcagcacggccatgtcctctccaagtcaagaaccctgcaaacatgggcgcatttccatttgggccataaacctttattgggaaaagtgaacctagagcttctgctgctttgtttcatgggtgtgagcctgtggttcttactgatgcttctactgagaatggtcctggatttcacctggagagcgccctaaagcttgacagaaagaacggatttagagatcagtattttttccagaaagatgtgcccagtagtatcaggagagaatctgtgggctgattcttacaaatcgccctccaggttccctttctggggactgatgctattattaatcaaattccatcaacaaaaccaaagtccgcggtgagtggtgggccctatgctgggagagagacccggggaatggggaggcaaggaacatgcctacccggaagaaccctgccctagaaactggagcgatgccgagggtggagggtgggagcccggaggtgttgtcatcaagtgctgtgggttggatgtgtgctcattcatgtaatagctctgtgtgccctgaaacaaatgccttccgttcccctggcctccatttcctcatcagcacagtgggtctgcccacacccacatcctcacggctgtggcatgcacccatccccagagtctcctcttgtcctgggagtgatggctgtggcactcagactccagagccatggacccaggagggagcttccagcgagagcaccaagcccagcaagtcggcctcatgtggggacgtgccttcccagaaactccccatttggagcctttccaccaagggccccaggaaaggacagcacacaccacccatcccatcaggccccagagcagttcctcagcagctccacaccccaactcgcaacagaacagcagggatgggggagccctaggagctatttgcactggctcctcccccatcccaaatgtcagcactacctggggatcagcctcctgttctaagaaacagaaccagcttgagtacttcatagcaaggaaggctatcagcatgggagacrgcacactgtcacggccctgccctgctgttcaccatcagagrcctttctcccataggcagggcccgcgccatctctcgtagattccrtggctgttggcttcccatgctgccttgtgtttctctggggatgattggaagcaaagtctccaacaccttctactgtgcttctaaccttgtgatagcaccaccctccaactccctgctttcttgagaacggaagagagaattctgttttcacactccgggaaatgttatttagaatacatagtgctccagaagaacttaattaagatttgattgcattatcagttttttaaaaagtcatcactaccacattaataataataacataaagatttccgagaaaaygtttaaaccacttaagagaatagtgtgtagttacacaccctgtatcacccttgacatctactttcaaacacatgacatcgctcattctaagtaagttatatctgtgcttttctgcagtaattggtaatatgaaacacgtcattaaattttagttatgaagttccttgaatgaactgaaatagtctttaataattgtgatgtagacttaaataattatatgattttgaytttacattaacttatcctgacccggcacacagtttgcccatttctgcatctctaaagggcaattgtatgacctgtgaacatgtgaaaagctttgtcactgtcttgtgaattttgtcgtcaccccatgcattttttgcatgtcctttgctggctctgctgacaggtaacgcctgtaccagctcaaacgtctgacctccctggtgaaagcaatgcagtgactcctattcggagcttgggcatattctgggcattcacatcgcctgcacctgtgggcaggaccaggtgcctgagtttctrcccagctccttcacccgccaccttgggacctggggaagctcttgaacctctctgtgcctcagtttcgtcatctgtgaaatgtacctttaaattgcttctctcctggagctatcatgagatgtgaattaattaatatttgcaaagtccttcgagyaggaccagatcgaggtgttttctgctcttgtttctctacgctgttagggtgtttttgatttttttctccatccaatgactggtaactgccagacccagcatccccccacctccttgcctccatgcctacagttcaggtagaaaccagcaggagccactcacctccacttagagaaggaccacaaggatgggaacaccaagatttatacccaaaatctggccagaagggcccatcttgctctgttggcttttcagggctcatctcctcgctcctggcttgccttcacctgagtgccatctcccaggaggagcctccaccgctgggcttgagagtcagagmcctctacccagggcctcaggtccagctcttcctgccagaggccccgcccctttcctgggagattggcagcaggggtgtctccacttcagaggtcttcacctcccgccagatttcggcccagggtgaggtgcctggtcccttcccatgtctgtgcagcctcaagtgtcaccctgactttgggtttctgcagacttgtgaagccgccaaatgtgtatttttaaatatagtcagaagagacagaactgtgtggatcactgtcatggacataggacgctggatctttcctgcactgtgtgggtgtcagatggcttcaccagaaactgcatttaaacagagcctttgagtccatgttcacgctgaggaatggaggcttttccacttttaaaagcaagcaacgttttgtcattttgatgatgttgagggatcttagttttccccagtaacatcttcatcgtgatcttcttaaagatattagtcaccgtgtattttttataatgactcttaaattttcccctcaygtgactgctgatagatgaaaggaggccaaaacaactaactaactgttgtccagccagcacagttcgttcccatttgtcagcagcttcttgggcctgagcactgaaaaccgtgcactccacagcactccttgtccagcatcctcatgtgtccctgggcacatggtcctagcagcaaacactctccccagcatgtgttggggcccggctgctggcctgggctgtggcactgccatggattgtcctggctcttttaaggaagcaaaatcccagagctcacgtttggtgagaagttggtaacttcagccttgttccggcattctctagcctgcctggtagggcttggtccccacagttgggtgtgaattgggaggaggctgggctggtcctagggaccgaattctgttggcccctgtatggatcatggatctgggcagtcagtcaaaggtcctgggctccctctgcacttgcctccatggtcaggcttgaaaagtgttcatctagctctgccctcctcacctggggccttctgaaaccagtcactcaaggtcacggctgcccatgggaaacatccatccattgcttagatgtgcagatagggtgggttttcctccattttggggrgargctgtcccgcttggtgaggaagagcacagggcctgtggccaggctggcgcccacgacaccatatcctgggcagactagatgacctcccgttgtgtccgcaggtctgcaaggtggggcggtgggcatccacttcatggcttcatggttctttcattagtcaagtcccacagctcatcaataggctcatggctttcgccctgtgtactagtgacctgaataaagttacaagtgtttgttcttatctgtgtgtagagtaggctcagggtactgtgaaataggacagagtgtgttttccaccctcacatycatccctgagtttgggaaggggctctctgtttgcctctgaccattgcttgctgtcccttgttctaatgcagtttgcagaaactgctggagaggggtgggaccaggaagaaatgggcagtgcccacacttcctgctgctgtatgtaaaggtgtaatgtagtacatacttcaggaggtgcagtgtggtgagacttcctgctgctgtatgtgaaggtgtggtacatacggaggtgcagcatggtgagacttcctgctgctgtatgtgaaggtgtggtatatacttcaggaggtgcggtatatacttcaggaggtgcagcgtagtgagacttcctgctgctgtatgtgaaggtgtggtacatacttcaggaggtgcagcgtggtgagacttcctgctgctgtatgtgaaggtgtggtacatacttcaggaggtgcagtgtggtgagacttcctgctgctgtatgtgaaggtgtggtacatacttcaggaggtgcagcgcggtgagacttcctgctgctgtatgtgaaggtgtggtacatacttcaggaggtgcagcgtggtgagacttcctgctgctgtatgtgaaggtgtggtatatacttgaggaggtgcagcgtggtgagacttcctgctgctgtatctgtgtttatgtacctgtgtgtatatctgtgtgtgtacctgtgtgtgtatctgtgtttctatgtatctgtgtgtgtgtctgtgtttctgtgtgtggggtgtgtatctgtgtttctgtatatctgtgtgcgtttctgtgtttgtgtatctgtgtttctgtgtgtgtgtctgtttctgtgtatctgtttctgtatctgtgtttctgtgtatctgtgtgtatatctgtgtatgtacctgtgtgtgtatctatgtttctgtgtgtgtatctgtatgtctgtgtatctgtgtttctgtgtgtgtatctgtgtgtctgtgtgtgtacctgtgtttctgtatgtatctgagttgtcttgttaacaaaartacccattttgcrttttctcctctacctttatttttaattaatattatatggtggccattattccatttttaygtatgaagctcaacgcctttctctcaagtagtctaagacatagatataagttggactgttttctggttaccattttgccagcaactttgagcacctttcctcactgtgttagtatttctgtaggaaaggttcctgaaaatggagctgctggttcagagtatgtatattccaaaacattgagcaaatgataccccctccccagcagcctgagagtccattttccccaccccctccacgagcaggcgggatggtgttgcagttcattctaggcaatgtggccagtggtgaagatggcgagcctgttggtgtttgagtgagcagtgccgtcaccgtcagtcaagggcgggcatggctgtgtgcttgccccctccccaggagcacgtgagcaacgtgcttcaaagtcgagggtggctggtgccccggagctgggcagcggggctgccctgagcaggctctgtcttcagagccaccctgtgcccagcatctggagccacgcagggcacgtgaggcggttccatcagtgctgaatggaggttgytyagcggcagtgcgttcacctgttcttctgtggggcatcgtctttgcttgttcctttgtaagtactgtttatatgttgtttgcaatgctgtgttttcatgtattacagaagttagattccagtctgtcatttgtcttttagaattatctttttatttatttatttatttatttattttgaaacggaacgtcgctctgtcgcccaagtgagacaacctccgcctcctgggttcaggggattctcctgcttcagcctcctgagtagctgggactacaggtgccactaccacacctggctaatttttgtatttttagtagagacgggtttcaccatgttggccacgctggtctcaaactcctgacttcaggtgatccacctgcctcagcctcccaaagtgctgggattacaggcatgagcctccatgcccggccagaattatctttttattttcaccgaagtaaataaacgtacatttacatagacccccatgatgttcatgataggagaacggccgtccctgactgcctgtcccgcctgcgttattacagcgtgtgtcacgttcacagcagaaccagagtccacctggactgcattcacctcgtagaaatttttccggaagttgatcatttttttcatttgcttagtttcacacctgcctgctatcaattcaggcccacatttcagcagacctaggagaccctcctctgcacagcaggccgcctggtgcttctggccccactgcccggtgcgtgtgaacggtctgctctcccggcctggcccccgcctcctctcccgggctccgtggcctcctttctgcggcctcgccaycttggtcatgcacgtcttccagtggctcttggagaagtcgtgcatggagcatgagtttttggagtcctcatttgctggtaaatcactttattctgtcgcactcttggatgatcagttggttggracgggtttcctgcagggttttcaggtcatcgtcttgccctcgatgtggctgttgccaagtacaaaactgttctcaaggccgagcctttgtccccagagctctgaagcagtttgggatcccgcaggtgggggattcttggcctccgtgtccagctcctcttcagctggacaagtaggcctggaattgctgctcatgatttctccaccctgctgattctctcttctcctggcgtttccagtaatttgttgtacgacctttgcactcccatttttcatctttttatccttttattcccccttctgacaattctcaactttttctccagccccttccttctgcactttagtttttgtcctcttgtctttatcctctttaatatttcctttggtgtcactttaggatttcagggcagagcagctggaagcaggtgcctccttctctctgcagttctgcctgcccgccctgtcccacggcgatattgcgtgcattctctgmtgctacatcaatgggttctttcctmgctggcygctggacattgcatcaggcccacaaagaaaccgccctccacactggtgccaggtgcacgcctgtcccctctgtaaacccggcccctaagagttaaagcgttccggctctgagagccgcttcacctgcagctgactctcaggatgtttaagttggaggagccagcctgtgtctccatcagaattgcttctggcagaaggatgaaggcacctgctaggcattgggcactgcgttgaattttaaggttgtgattggaatgttgtatckccttaattagtcatttacttgattggcttcaggagaaacaatcccacctgctccctgttccctaaggagcagacactgcatttggaagtacagttggcatccttcctgccctcacccacgcttggtgggagcaactcttccatgaggcctccggcctgatgctttggttctgtcaatgtacctgcagccctcttaggggtgggatccagtttctgcagttcctccacctggccacatcgtgcctggaatgagtggaaggcccgcgagggcggtgaaggggctgctgcactgagccagtacacgtgcagcctcgaccctcacagtcaccaggtgccggcttacctgcatcttccactttggctgcctttggcagaattattggagttacaggcattgtgcaagctttaagacacatgcatttgaagggctgatattgtaggtcccyatgtcttaagtcaatctatgagatgcccggcctggaagtaatgagggagggcaggaagcaggaaggctggccaccctgaaagcaggcagtgagccggtcctcgtggtatgcggctcccccggctgccttctgccccctagggcttctctgttctccccaggaaggccacttcatgtgccccgggtggtctccagcatcccccttctctcctggtccacgtgctgctgctcaatcccctccccgagccccgcatccaaaaccctgcttgtctgataggttctgcgggggagtcagagtgctgaatagcccacggggcagggacgrgcggagggccccagcctcatgccatgctgtccctggcagtgctggcatggtgtcctggagcctcctggtcagctgcagccaccctgcaggcagagtcgaccagggacgtgcagtcggctagaatcagggagcccaggcaggtgtgcaggctgggaggcagggggtaaacaggtgaggggacagaagaattccagatggtgagaaggctgctgtgaggaagacagggcagtggggctgtgatgggggcagtggggctgtggggggtcagggcagccttgggaggggcgtggagcagaggcctgtggaaggggagaggagggaaggggaggggagtggagggaaggggtggggtgaagcagccaccatgggactctcctcaagagtctcttgcacaaagagtctggagtgcccggcagggctgtggaggatctgccgcctgactgatgacctggtggcagcgtgatgacccccacagggcctgggggaggcggtgcactgggctgcagtaccacagccagtccatggtagcctggagtgaccatgtcatgcccgcctcccgatgccacgtgtcccactctatgtggcagggcagccactgaggaagacctttcacacagggccagggaccctgtgctcttctgtgggcacacacagcccctgcctctcagaagtggctcctgtcccaggcccggggaatccctgcagagcccatgtgggtttcagtggagatctggtggtgagagaagaggtactgttttcttgcctagtcatcagttgggttttttggcttgttttttttggttttgttttgtcttttgaataatggcaagaaacccagcgtggaaatagaagtggagcttgtgaatctacgcttgcctcggtcggttgtgttaggcacagaagtgtgccctsgtcagtagcccgtggagaggccggcttgtggctgaatccgtcatctgtcgtcatccaggtcccccgtgccacagcacagaggcctcgctccctgcagaggcttagagtctggtacctyctcacagcgcctctctggtttctctgggaaggctgttttagggagcttgcttctcccacatccttccaagacctgcagaaaaactgtccctgactcgaagccttttccaaagtggagaaggtcctgggctgtctgcacgtcccaaagagtgaagtcatgttggtccccatcgcccagccacatcagtcctgcttccaggagaaactccgtctcattccttgttgctctggaggcggtgcactgcctgttccagaaagattaagaacagcaggagtgctgattctttaagaagaggtaaaatctccctaatgtgcaaatctccaagtggtagaatcttgaaagtagccaagtaaaacctcagaactcaaaggcttgtgtgacacacgtctccgtggcggtattcttggctctgttctggactctgaaagccgataacctctcccgggtgggtttggggatttctttgactccgrtygctgcctttagatccctagtgcttcccaaggcgggcstcgcgccggaggtttgggttccagatgcagatgagttggggaccacggtgggctgaaaggtgtagattcgcaaatggctctgtccacacaggcagagctgttcacagaaaccgacccacgcccagtaccttcaccctgtggtcagatgaaaggtgaagccggcgcagatgttgggatgggctcygctgagcctccccaggtcggggtggggatagcagcctcacgctctggaggcctcactgactgacacagctggggcgatgcatgggcgagcaagaaagtgtgcaacgtggacaccatcctcacatccctgggcccagcytcacatccctgtcagtctttctctgattttagagcaacacagctatgaagataggggtgtattatctagaagagcattagttacgagacatcgccattaagtgacttcacacctcagcagcctcctgccacgcccagtaaatcagcttgtcagtcctgtttccatctcctggtaaacagtggtggcctgattctgtgaagacagtgccagcgcttgcataatgctgtggccacagaaatttatccaaagcaccagattcgttttattcattatttgggactgatgaatgggatttagaatcccctgcttcgtgagctccctgcgctctcccctgcagcaacacrgcagtgttgagcaaatatttactcaccagagtgcgtatttttaaaaaaccaccaacaggataaccttgagccagtggtgtctgcctggctgtaatgacatctccttttygtgcagcttctgaaccgaatctgaaattacggtccaggctaaagcagaaagtggccgaaagacggagcagccccytgttacgcaggaaagacgggccagtggtcactgctctaaaaaagcgtccgttggatgtcacaggtatgtcggctgagcaggtacacccgccccgctgccctctctgccaggccttcctgccataggcgatttctctcaggagcttctgaaaacccacgtgtctgcctcacgctgtcaacccccagtgtggtcctgttcccatggcgctggaagtgccaggcccaggggaccaggtttgatgactccggcatgtctaagccgggccctgctcctggcattagtgactcagagctggttctaggtgggctsaggtgcacaagggtgccccagcttggcactgcgggagatgcagtcaggagcttgagttgaggctcctctgaaggtgggtcttaaccagtcccaccctagtagtggtgaatcgcrtgctctgccctgttccgctgcccctgagcagtgtctgaaccaccggggcattttaacgtcttcccacgccagagcacccatcaactgagcagggagggaagcaaggagtgaagttgcttcagcttggccctagtgacgtgtcacggttggccccatctagtggtggacacgcagaaggacaagacygagcagacccccatcctgaaggctcacccgcccctcttgagggtacatccccatccagaggaccacccattcccaaccaccaccagggtacacccctcaccccaccactcstgaaatcacagcaccaggataaaggagctgcttgggcatggcctggatagaggggaggcagcggacatgtttgcacaacagaaagtgttcracttgaaggccaaggctcatggtaggtggtctgtgaaaggcacagttccactgagcaggctgttgacctagggaagccggggaggggctcctggtgccatgccccgtgtgtgcgagcattggcatcacacagggactctgcttcagcagtgaggtgagagccagacctacccgcyaaatacagggccctgcctgtttctcgtgccctgtcccctctctacttgaggagttcctaaccacggtgtaagggtctgggtctgaatatttgtggatttctattaaaaagtatctgacatcttcatgcccaggggaactccatatgtgtcatttctgatgtaggtttctttcctctggccattatagtacacacagaccttttctacagccatcaagaaatgttatgatctaaagtttcactaagtctagctgactggggaagattcagttgaaacgaggaatcatgtgagttaaaagctttcaaactccaatgcagccttttttcctatgagcagtgccttgcttggccagctctaatggacacgtgaacctttgcgtttttttgttgtttttttttttaaagtgtgcagtgggtgagacggagtcttcagcaagcttcttctgagtgttaaagctggtgttcctgttgtcacccagtgactactgagtgctgtttttgagtcagcactgggctgggcgcaaaaatagtgagacagagtccttccctggaaggagcttgtgatgtaatttgagcaagcagcacatcacacrtgagaccatccaggagccatgcgtgacagggcgtgatcagtgctgagctcacccaggagtcatgtgtgacagggcctgatcagtgctgagctcacccaggagccatgcgtcacagggcgtgatcagtgctgagctcacccaggagtcatgtgtgacagggcacgatcattgctgagctcacccaggagccatgcggcagggcgtgatcagtgctgagctcacccaggagtcatgtgtgacagggcatgatcagtgctgagctcacccaggagtcatgtgtgacagggcgtgatcaatgctgagctcacccaggagccatgtgtgacagggcttgatcagtgctaagctcacccaggagtcatgtgtgacagggcatgatcagtgccgagctcacccaggagccatgcgtggcagggcgtgatcagtgctgagctcacccaggagccatgcgtggcaggrcgtgatcagtgctgagctgtggcataaagggagcccrtgccgaggcacctaggagttgggagatcagcacaagccactctaagccagcagagctctgcagaaggtggcatttgcactgggacttggcgggtgagtggggctggggcagagaggcagagggttgtgcrtctcctggccggcactggtaccagggagctgccacgatggggaggctgctctgagtggagctgattttcagaagacaggtattaggagttctaggcggggtggtcccacacggaggagtggagccgatttccagaagacaggtattaggcagggtggtcccatatggagcggtggaggcagtcgcggttcttggcagaaagagagccaggtggatactctgctttttctcagtcactaattaattgggtgtctactgtagagcacaaagaagaaaatgcattcccatacgcactctgtccagagtgaatcctgctcactctgcacattcccgcagcmcgtgttctgtgccttcctcacacctgagttctctcactctgcacgccttcccgcagcccatgttctgcgccttcctcacagctgagttctcaccatcttcctgcgccatcctgcatccctctccactcaatttcagccacacgccttttgagcacctccaatggtgttcccgttttgctgatctaagtaatactatgaagattatgcatttatatgaattttcttagacctattcctggaagtagaatgcaaaaaaataaaattaacctcgttgagttaaaagtgggtggaaagttacacatataatttttaccgccccaaaaagttgtccggactccccaggcacatgcgtgagggtatttatctgacgacacagctgggaggcacccattacagggaagatctgctggatcttggtgtgtagctggagacagcttgacatcagagagcaggggtctagggtgggctacggtgggctgcaggtggggcagagatgggagagttggaggggcctggagaaggcgggtcctgctttcttgagtgaaatgcaaacactggctcagcccaggtggcattctcagaatgcccactcacagtgcaaataacatggcctcggcagcgggagaagcctacctctggagttagtgtctggtggaagtgagagggtgagagggccagggaaagaaagaggatggggtagggtcgggacccagtcctgtattcatgctcaatgcccaggacagtgagctgaccccacactcttttgagctccaagagccatggggagcggctggtgtagggcttctgggtggacaccctggtttgcccttgggaggtttagactgccctgctgttgagggcaagatgttcccagggtgttcctggtgggcagcgtggtcaacagaggaggtgcgccttcaccacccagctgggttaactctggtatgcagacgcccatgacagttccctcaagccacgtggcctgggacgagtgatgttgctgctccatgcctccatctcctcttctgggaaacggggtcataatggcaccttcctcaaacagtgactgagagatggatgagctaataaaggcaaagtttggaatcaggtctgccaggttgggggagctgtgggtggctttacctgttcccccaccctcctcatcctcctcactgtggctcggggctatatttgcagagtcaccacctccagcaggcgtggataccacgtgagtcagcatgagtgggcacctgcgtcctcgtgggctccaggaggacgcgggcagcaagcagaccgtggaggaggctttgctggggatggctccgttgaggggctgcttggggaaaacatcccttaacctcccctccagggcccccaccatgtcccttccttctgacctgtatgcgctgcgcatataggttggggcgaggttctgagcacccagagtcgttgctgaacagcagacgcctagagttctcgaggcaaatgggtcacattgtgttttctttggaaagctttaaccagatgatgccattgttaaaatgccgttaaactaaacatatgacaagccaaacaaatccttgtgtgaatatcgagagcctcagcggcctcccacggtggatgtgtgtgcccaaaatagcagcagacccyttcagaggtgaagggatctttggattggacgtggccccttttggaagtcacattcagtcagagcggaacctggtctcattaaccagggtcaagccgcaccgatggttaaagatcctctaagactgtccgagcgtgtgttttccagtagcacggatagatctcaggagacactggctatattttcccctggatgcttgctgctatgtagggaaaatgagaggattcagctcagagtgaacactaatagtaggttgctttattttgaactaagctttttatagtgagcacaggaaagctgaccttttgcttttcaaagtcacttagcttctgcattttctggtcttctgttgttaggtcactaataagtgtttaaggatttatctttttggtgtttaaaattgtcttgaaaatcaaacraggtataaaattggtaacgtacatgtcctagaaaaagtgaagtcagtggcaaaactggaaaatcagaaatcagcatcatactttcytttttgaaaccatggccatgttctttttgttgggacttctgcctgtcgcaagctaacgagcaggtccgtggaaggcaccgggcattcgggccacaggtcagcacggccctccctccgcatggagtaacactcaccagggtatttctgcctccgcagactccgcgtgcagcagcgccccaggctccggacccagctcacccaacaacagctccgggagcgtcagcgcggagaacggtatcgcgcccgccgtccccagcatcccggcggaggtcagtgcgaagcgtttgtcctgtgtcctacggctagagtcggactcgggacggatgagcttgaaatgaccccrctttgcacttgcccttcactcttcaccttccaatttggggtgagggaaagtggcctgtgagccatcctaaaaaggacgcagttggaggttactctcctgccttcctctcatcacagacatctcctttcattatgaacacgctagttccaggcacgtcggggacagccctgagcctggtcctttctcctgacctcttccagagcagatgtcactagatggtgtcccagcacaagcccacgcatggcaggtgctctaggtggacaggatccctgctgcccagctcgctgtggtcgccagtgctctgagggtggctgagaggccgtgggcacgtgggtatagttgctaagtgagacttaacattttttattttgtattgagaaatacacaacacgatgtcggccaacaaactatgtgtcagggccgactggagcgtcacccgtggtcagcatggcagggccggccaaagccacagagcggggaacttttccaggcatcacgggaaccaggcatctcagaccgcagagctcagcacccctggtcccctgccttcatcagaccccaagtggtgccacagtctgggagggacattggcaagctagagaggagtcaggggacgcttggagtccctaggtgggaaagatgtcagagacgcaggagctgagtggcaaggcagggaggagtggcgcccaggctggccgagtcgcacactgaccatactcggaggctttccagggcagcaggtscgaggacctcgctccgtgttccttgagctcctttgcgccccctgcctttatcccacacgtgtcccgagcgccttrtgccaggcccagggacagaaccaggcaggcagcaaggacctgccccacactccacacaatgccccactgacaaggagaggccacccccagagcacggggaagaagagagaggcagagagaggcagtcccgcaggctgagtggtgccctgggcctgggtgggcctgactgcagggcagggktgggaggggtacgctttagcagtgagttttctgatgagttgagctggaaatgctgtgtctgcttcatggggcagagttctactgagtgggaggttctttctgaattctctccaacttacagaaggctataatttattaaatatagttattgactttccttcttaaatatttagaaatgaatcctgcccttccaaaggattggcaaatcttagctgggatacagaggcatgagtgtttagcattttcatttcaaatttcaagaccgtttatgtataaacatttttagagactagaattactgctcagaacgaattttgccctttgtctccaggctgcttaatccccaatttctcttactctttctacttcatacatcgatttcttttattacctgtcttcttcagcctgccaacttcagtacttatttagatgattagaagttttaacagtcctctgtatggctgtggtcatagctgaggtctaccagtaataagccttataatgcaacctagaaattacttcctgccctgaggttaacactggttgcatcttgttgattgtggtcctagatacaygtttttatttaaaatgaggcacttatgtacatggtagttaatattggaacagtgccttgtttgrgtgggtctgcatcattccagttctgtgttaatttttagaaatcrcgatacgtaaatgaagctactggaaattaatagaacatgtagaaggagttacaggaaataccaagaggtgccattgttcatgttccacatcagatgttcattagagtgrgcacgggcagcctttgcatgttggatcacacccaggcgccctttctgggtttcagtatctctagagttggacgggtctgtgagaacrcctgtgcttcatggccaggggctggctctccgttctcacgtggtgcagagtgtagtgagcttgcccgtcagagggggtgtctcgagtggatgrggatgtggggggagcaggggcctcccagcctggctctcagcactgccttttctgttcaccctggggtccctagaaacactactgtaccttgaaggcccccyggacccagggaagcccagtgtgccgggcacctcctcctctacagtgccagggaggcccagagtgccggcacctcctcctctacaggccagggaagcccagtgtgccggcacctcctctacagggaggaggcagggctcagagagtgagaggaagtcgcccaggtgcgtaaggggacagctcctctgtggccgctgctgctgttatttacacgcgtgcctggatgctctgacctcaggcccgyggactttccctctgagcacatgctgagatgcggtccgggggcgccagcctcagaatgcctcccgcagggctcggccccgaggcagcagatgccagaacgccctgcgatttctcaggtggaccagtcggcatctccaaggaacaaattctcagaagcctcctttagttccagaaatgggcttaaaaaaaaccttgcttacaaaggaaatgaaaactttgcaaacattagaacgtctccttattttgttcccaaatgataacacaagcatttcctctacagcataacttactgataattctttaacttttgacaaaaaaaaaattgcctaggaaaaatgttttcctcagtagccctttaatcattccttacacaatgtaatatgtgagcaaatctaaagggagttgcagggtttcctctggggcgaggtgcgccgtgagtttgctcctaagtgagaaggccgggctttctgttctgtaggaacagcctgagtgtaagtgtttgtcaggagaagcgtttcttcctatccccaatggccagtcatatgtctttggggaaatgtctcttcagatccttggcccacttttatactggctgcttcaggttttgctggtgagttgctggagttcccgcatgttctggatactgctcccttgtcggatgaatggcttgcacatgtttccccttcccacaggtcgtctcttcactctggtgattctcttcctttgctgtgcagaagctttttagttgagcagagtcccagttgcctgttttcgtttttgttgcctgtgcttttgaggtcttagccatggatctttcacaatagccaagaggtcgaatcaacctcagtgtccttcagtggatgaatagacagagaaaatgtggtgctgtacacagtggaataccatgcagccatcaaaaaggatagaaccctgacatttgcagcaacatagatggaactagaggccctcatgttaagtgaactaagccaggcacagaaagacaaacatggcattttctcattcatctgggggagctaaaaacgttgctgtcatggaggtagagagtataatgaaatctgttatctattcattattaacgttagcttctggcaaggggatttctatctgccaaaccccactaactagcatgattacaacaacattttattccttctctttgtttgcccattcattcagcagacattccttgagtagctactgtgtaggggatatagtggtgataaactattgtcctttttagcaaaacacgttcattctacaagcaaaaagatgttaaatatcacagtagttcaagtccttggagactgttgctgctgactcttcctgtgtggccttctaatctttactcctggcttgtgtttgctttatccaagcccattctttaaaaggtacatgatctataacctgtttttctaacttaatgtatcataaacaagtgtccaagtaatcagctagatcgttcccaacccccagagcatcccggtgtgcaatgcccctccgttctgttaacaccaaggtgtcggggaagccgcatagctctgccrtgcctgctgggtgctcggccctgcagcggaggcttcatgggcatcaggccatctccttatttcttaacgttacatcccaagagtggagctccagcatcaaaggttagacagattttgaaggcctttgacatagattgccaaattgtcctgcagaaagggtgccactaactgatttgtgattcacccaacagtgttcgccgttcctctaggccaagatggtattaccatgtttcaaargtgtttgccaatttgttgggtttcagaataccttttttgatgaccatgatgtgttttcctgagcgccttccccttcctgagctctgccgtcactggtcctcaccgcgtgcttttctcactgttagttgtttgatttgcaagctctctgtgctgaccctcgtctgcctcatacatggccagtattgtcatcattgcccacctttcgtagaggcagttgttttatgattttctctttatttttaatttttgtgggtacataatgtatatatttgtggggtacatgagatgttttgatacaggcatgcaatttgtaataatcacgtcatgcgaagtgtgggatgtccatcctctccggtgcttatcctttgtgtaacaaacaatccaatcatacccttatagttatttttaaatgtacagttaaatgttatttcctttttgttttctgcctttgatgttatgtctggaaagacattgccaactacaaaaaagcattgtaaactatattatcctagaaactgcaaaacggcattgtaaactatattagcctagatttccttctaactgttctgtggtaaataatcaaactgaatagaaatcaacgagatgatgctggacaaggtgacagaagaagaactcgtatcgggaggaggaaactggagtggtgaattgtgctttcatgttgtggcacgtgttgaaatctcatgctctcattgctgtctcatttgttacatgtacgtttacgctcatatatcagaattcagtgcaggtgttttcatcgttgtttttcttggtgtatattgctgatgtttggccgtgacagactgtgatggtcatcgtgtgttctgtccccagacgagtttggcgcacagacttgtggcacgagaaggctcggccgctccacttcccctctacacatcgccatccttgcccaacatcacgctgggcctgcctgccaccggcccctctgcggtaagtcagsccccgtgggtccgtgtggtgtggggtggtggtgatgggtccttccacccgagcatcctggctgtgctttccagggcacggcgggccagcaggacgccgagagactcacccttcccgccctccagcagaggctctcccttttccccggcacccacctcactccctacctgagcacctcgcccttggagcgggacggaggggcagcgcacagccctcttctgcagcacatggtcttactggagcagccrccggcacaagcacccctcgtcacaggtgagcacaratgggcctgggtgcagccaggctctgaggntgcccacgctctggatggtgccccgccytcgcctgcctttggaggagacaggaatgcaygcctgtcccacccccacagttcccaaacacacatccccatcacgtgatgtagccacygtgactgcagtgaaaatccatgcctcactcccagagtcaggtagatggagtggaaacagaagtcacttcccctttctcaccttttgggagaggccaccggctcttgygatttgggtttctgtctggaccaagctgagccagcgctggaagcccagaaccgactcttgtggtcagtttgtgttagcgaacttttacaaatgtgcactgtctgggggagtggttacatttagaraaatacaatttagaggaaaatgggaacgtccttatgaaattacatagcaacagcaatgtgaaagtgtcacttcagaaatgagggcacaccggccggacacggtgactsacacctgtaatcccagcagtttgggaggccgaggcaggcggatcacgtgaggtcaggagttcaagaccagcctgactaacatggtgaaaccccgtctctactaaaaatacaaaaattagctgggcgtggtggcgcacacctgtaatcccagctacttgggaggctgaggcaggagaattgcttgaaattggaaggcagaggttatagtgacccgagatggtggcactgcactccagcctgggcaacagagcgagactccgtctcaaaaataaataaatgagggagcagctacctacccccttgccgtgcgggtcatcgttgtacatcttcatagctttgtgtttggcttcctggaaacctgttgttgccaattgaaagctgaaataccctcagagctgcacctgtgaaactctggcagtgaacttggtgaaaactcaggggcttggcgtgttgtaggaggctgcgctgcaggatgcgtggggctaggggctggcttgggtgggcttgggcctctggcttgactagtctggtggattttggtgttttcttgttttgtgctgcccatgtgtctctgtttagacagagaggattccttcttattccttctttgcccagaagccaaatggcrcaatctttgttttgtgcctgagcccctttctgtttgtttctccagaagcttgaattcgtgtccctgcctgtccagagcagaggagcccgtggtgtaacgagggagggggcagccctcacagtgcctctctgagctgcggccacagtggcaggcacrcggatctctctggaggaatgtatctgaggttgcgtctgagtctcttggatgctctagatcagctggcacgagtgtgggtagtgaaggacacctgagtttctcgcctgtctttaaawacgtaaaatgtgcctgatcttcaggattcctgggattcacttcgtcagagatgtttgtcacttatcttctttccttctctaaatcagtttattctgcacgattaaatagcatgcgtaatcttgtgtatcaggtttttggaaaacagcctttttgatagaacctggatatcgagtgtgcatgggtctcacctctctgagaaacgcactgaactcggcgttgcttcttccctgtgtgcgctcatccctcttttcctcccaggtgcagcttgctcgttggcatggggacctgcccaccgtgccctgcccaggctctgtgccaccagggggcccatgcatggytgcccagcttgctctggccttgctttacgcctgtgcccagcaagcccctccagtcctatgccgccacctccaaaaccctgcaagccccttctctcctgcayrgcctccccaggttgccagcagctcatcctgcaaaccccctggcagggagcctckgagccagtgtcacgtgtgcagcgtagtgcagccacacagccgcctctgtcccagctttctcctgctccatgaccctgggaagcygcttatgctctgtgtgccttgttttcccatctaggaagtggggatactaagcggtccgcccccgtgagcctgatgagggttaagtgggctgtrcactcatgtgcccctgcaggtgttggcatcattgttgtagtcattgccttgttcttaacctgccacctcccatgctctctcactcccccagccagcccctgtccgtcctcagtgtctcaggggccctcccccagccccgccatgagcagggccctcatttggaacccgctgggattgccccatcttcttgtgggaagaagcctcctgtgcaggttcctcccctccggtctgtcctcctgtatccaccggactctccttgaaggcctggaggcccccacgctgtctagagcagtactggccaggtcaggagccaccagccacggggagctgttaaataaataagtcagaattagaattcagtttctcagtcacatgtgcaccacatccagtgcacggcccacggctgtcccctgaatgttctcattgtcacagaaggtcctggcagggcggcactggcctggagtgaagtcccagcttgtgagcaggaactccagccttcctctagaagcctcgtttctcttccctagtccggtacagcagccaggccagccggctcaatgctggaccagaccgcagccagcccccagagccagggctctttcccagggcccttttccccatcaggtgtggttcgtctgccccctcatcccaggcttccatccctgccccagccctgccttgttgctccttccctggatcacactgcatcttcgtttccatgttctgccctttcctgcagtttttgacgaactcttgcttgagttggtctcctggacagcagtgcctgtgttttcctggcccacagacagacccaccttatcgctggtaatcgtggtgcataggtgtataggatatcaaagctagaacagccctccagccacaaatgctttgaaacagaggcctctgtgggtgaggtcactgtcagagaccagaggggtgagccatggtccagggtctcccagagctgcctcctacacgccacatacctccagtcagcccctttccgcaccgctccgggcagttcctcgccagtcacaggctgggcgtgcctcttctatgtccctgttcatgtgctgctccagtgcggcactccgcacgtggtcactgtggactcagatctttgcagagtgtctggtacatcctcggagattagtctccgcataactagctgaggcggggagtggagctcaggagcccattcccgggtaagaaggaaagtgtctgtgcagagccctgtgctgctgctttagttggacgcaaaactgtgggcatgattgttgcctggacagcccagctaagtcctttatgatgcccgtgtggctgagaagcaggactttgagaaccatgcaatctgctgtcaggacccgagagacagggccccccaagacccaggaggagcttggtagtacaggcatgtggaggagaaggctggagaccagggctgtgccgcaggtgggcctagggaaggcttcccggagcagtggcgtcggagctgagatctcagtaggagcttgcaggcggagagggaagggcacaggtggaggragatgtgtatgcctcgtggaggtggccctgtcacagatctttctagcatcctgaaacagagcatgccaccagcrtcttaaggacaggtggagggagatgtgtatgcctcgtggaggtggccctgtcacagatctttctagcatcctgaaacagagcatgccaccagcgtcttaaggctacgtagccttcctgagctggcagtggagacccactgtcccgctgtcacatgctgagtggagggtgcccctggcttctgtgttagcgatggcatgctactgtttaggcctcatttccccaaaaaacagcgagtcccaggaagggcttgagcacagctggccgtggttcatgtcctataattggcaygcgaggctgtggtcctcagccctggcctggcctcagctccatccccagaagctcaaacagatgctgattggtccaagcgaatccagagcacccacattgttcccttgggcggccgggattgcaaactgtgagttggatctaactcttgcctggtttgcttctcartggaaggattttaaagaattttgcagaaaaagcaatggaatacaccagatggacttctaaggactcaggcaccctgaattgttcatctcatgtgaattcatcacctaaacagaatcccagtgtgtgcagacccgctcttcaaaactgggtccggaacttgagagcaatccagtctttcaccttcttttttcttaaatccccatacctggtggggtgtgtctaagtgatgcatttgcacactcactaattagtttgggtattgctgagcagggtgttctaaacttagaccctggatggctgggtgcattccagcatgctcactcgggaactgtcattgcaattattgtgattgtgtgttagagtatggacttccaggggagctggccactgagcacagttcaggcccagccccaagtgcctccaggaggagcaggagccggcagccatagggacacagccgtccagcaccaggagccagggtcarctcaggagccagggtcagctgttgcccttgcactgggcacagggaagggcttctgccagtgctcagggcagaaagagcagaagctggaaaaaccctggctaagatgcccaggggaggagcccagagcagggggccactgggaccacaggagccaggctctgccccacaccccgcccagcaccacacagccagcccctgcagctgggtcaccgaccacagaattgtgtcctgatggacttatgctcaaaagtccctgacagcatatcctgaagaccacatcatggtctgtcatcagaagctcttgttaatgatctcagggatccaaattggaaaccaccctgccagcaaatagcattgctatgcagaggtcagggcgctgcttttcaaggatamccaggggtagggtgtccctgtgtatggcggccctgggttttgcaccctggaggcagcagagtgaaattctgagtgggcgagataggctgagagagagtgaggggctggtccgtggggagtgcaactggaaaaggaacagggccggtctgcacaggggtctctgctcacaccagttctgaaaatgaagccctgttccaatggggcgtaggcttgtgtccccgtgtgaagctggtggcctgggaaattcctgggcccatgcrgaggatggcgggaggcagagccctggaccagaaggagcctgggagcgctgtgtagcccccactcacaccgctggctcgagtcgcttgttccttaccgtgtgtcacaccaggaagctgaatcctatgaagttggcrtgtccttctcctctgcagagggtcaggcctgggcaggggactgtgcagctcatcaccgcctccacccctgaatggtgtgcacactgaggctttgggggaaaacaacgctaaggaaaatgtatttcaggttcccattgctttccgaggagagacctttccagcaactacgtagcctttgcgtcccctgaaagcarctttgtgtgactgacttccttatttcctccgtgaagtagttcaatcccacgtaatacacacgtcaacaattgaaaaattctgaaatgccttcttttttttattttttttttgagacagagtctcgtttgtcgcccaggctgaagtgcagtggcattatctgggctcactgcaaccttgcctcccaggttcaagcaattcttctgcctcagcctcctgagtagctgcgattacaggcatgtgccaccatacatggctgatttttgtatttttagtagagacggggttttgccatgttggccagtctgacctcaggtgatccacccacctcggcctctcaaagtgctaggattacagccaccaccgcgcccagcctgaaatgccttctttaggatggtttacctttttctttttttacgttttcagggaatgattctgaatggatttttagttattcactgtaatttaatagccaagcattgatgataaaatttaagataacatgtctttccggaaagttgtggggttgggtgaaaagggatggtggtttagagaacactagtgaataacttttgaaaaggtagtgaagagcagccttgctggggtcttgctgggtttagtctgtctggatgtgtcctttgtgtttgcatatcacgtagtatttcttaaatttagaaatagcccctgcraagggacttgagaagcactaagcagcatggctctcactgggaggcttggactccactaaacctgatgacacacccagctgccctgcgagccctggcatcagtgtcctgggggagggacaggacaggagctgccacttgccggcagggccaccttggtatccctggaggtcccgtagcccttgcagcaggcatgtagccccgcctggcagcaggaacagcaggctgcctcaggcggatgccgagttccaaagagtmccccaccagggcctccaagagctggtgtggttacttcctttgtcatttcacccggtcagatgcccttgagcrggtcagggtcatttttatcctgagcagcattgtttagtttagtgtttaccccactcaggttaccagaggaacagatattcacagagcaggacagagggttcgttagatccttttgcccacaaaaccatggaaaaatgttaaacgacctaaaccaacaatttatatatatctcgatgaamgcatgcagaaggaaaaaatgtacttcactaggttgcattgtaaatcaagatacagatgccaattaaagcaagatcatctatcaaaatggrttcttttaatcaaaacatacagggttggtgaagtgggcatcctccactcgctggcagggattagccagatcttttcagaaaggggttttgacaatatgcataaggactttttaaaatgtttacgccatctttgtgcatamaatcagtgctcgaagagaccttaaaacgatgtcaaccctaaggacaattgtttttctcacaactcaggctgtctttggaaatatgtggaggctcccagaaccgtggcagccttcctcagcacactggtggccctctctcccctcccaccgtgctgttcagaccaaaacccacttttctagggcctgtggcccccaggaacaattgtgtggtagccactctggggaagggcttgctctttgaaacctgccacacaggactcctgacgtttcctgtgtcgacctgattttcatagaaaattgcctccaaattatggttcctatagtcccaamgcaccagctcacrgcccccagcctcagctggaagggrcccagttagcgagccagctctggggcaccagggcagaaygcctgggctggcgggcacagggcrcagttgtctccatcacttactcaatagccctctctccctcctctcttcttcctcttcccctctgctgtttcttcctccaattatcttcagactggtatctttcaggcctgggagcactgcccctccacgcacagtccttggttggtgcagaccgggtgtccccctccatccacaagctgcggcagcaccgcccactggggcggacccagtcggccccgctgccccagaacgcccaggctctgcagcacctggtcatccagcagcagcatcagcagtttctggagaaacacaagcagcagttccagcagcagcaactgcagatgaacaaggtgggtttgccggctcagcgctcccaggccccagggcggctgtgtgctgtgcgcttcagcctcaggcttcagcactggcccctttctgaccttaagggaggccaggaggcagaaagagggaaccraggaggcacatgctctggcccacagcacagagctgggcaggggcaggggcagaagggatgctgctgggagcttgggctcaggaacagttcacctgcagggagtgggacgcgcagggccagtgccctctcccaccagcccgtgtgagttccgttggaccagtgccctctcccaccagcccatgtgagttccmctggaccacgtcctgcctgtggtgcatcagtgccagcgaatggaatagtctacttgggcaacacttttttcttgggtttcctaaggccatttagtaaacatacctttaaataaactagcaacccacagtgcccatctcccaggccatccggcacttgcagcctgcctgagtgcatgagcagcgtacagggtaagcagcgtacagggccggggggcccgggtgcagttgtacaggtgcagaactccagcaggaagtcgaagggacactgtcagagctggttctgggccccggccagcccacagaggtctgcataacctacagacatcttgaaagtcactcagataagtccattttcaggaggaggtagtaggcaaggctagcactgtgatgctcgtgaagaggaaaactaacatgctgattacgtgttgatcaaatgctggcatttgacatagagcatctttaaggtaagagatgagatgagctgctatgaacatagtccagcagttcctcaaaaggttggacacagccaccacatggccccacagctctgcggccagagatgaaagcacacatctacacgtaaactcactcaggcattcacagcaacctgagtccctgtttcaggccattcctgcactgctgtagagaaatacctcagactgcgtgattcataagaaaagaggtctgattggcttctggttctgcaggctgtagaggaagcgtggtgttggcctctgcttctggggagtcctcgaggaaacattcaaytgtggtaggcgaagggggagcgggcrcatcacttggcaagagcaggagcaaggggtggggagaggggccacacacttctaaccgaccagacctcaccagaacccactcattacagtgaggacagcaccaacagacggtgttcagccgttcatgccaaatccacccacatgatccagccrcctcctgccaggtcccacctccagtattgggggctaggcttcagcaggagatgtgggcagggacacagatccaaaccgtatcagtcgtaataaccgtatcagtcgtgatagccacattacatgggaacagcccaggtgtccatcctgtgatgcgcggccacacgccggcacaccggaatgtcacataacatggaatgtcatataacgcggccacacgccagcacaccagaatgtcacataacgtggaatgtcatataacgcagccacacgccagcacaccggaatgtcacataacatggaatgtcatataacgcggccacacgccrgcacaccagaatgtcatataacgcggccgcacgccagcacaccggaatgtcacataacgtggaatgtcatataacgcggccacacgccagcacaccagaatgtcacataacatggaatgtcatataacgcagccacacgccagcacaccagaatgtcacataacatggaatgtcatataacgcggccacacgccggcacaccggaatgtcatataacgtggaatgatgtgcggccacatgccggcacgccggaatgtcatataacgtggaatgacgtgcggccacatgccggcacactggaatgtcatataacgtggaatgacgcacggccacacgccggcacgccggaatgtcatataacgtggccacacgccggaatgtcattcagccataaagtggaatgacactgacaagcggcagcacgggaagccttggaagcaggatgccaggcacgagaggccgcgtgtggtatgatttcatgcacataaaacgtccccaacagacagactcacagagacaggacacagactcgtgggagccaggcctgggctgctgcgggcagatggggagcatttctggggaacagcgcctcttcttagggatggtgaaaatattccaaaattagatatggtgatgactgcacagctctgtaaatatactaaaaacaacaaatgatatcatttaaaagcgtgaattggatggtatgtgaattatatcccagtaaagctgttacaaggaagaaagaggatgagttgatgggaggggaacgtggagaaacctttggcagatttggcgacagacrgaatcatttctccgtttattgtctctcctgtgaaagtgcccccctcactccaccccacccccgttgcttccctggatttcaggaccggtcctgggttgtccacctgtccggaggctcagggtcttctgtggttttcctgagggtgaaaaattggggttaggactggggaggagatagactttcctagcacacgtagacaggagttggaaagtgaaataccaggatcccagcaagagcagaggtaaagccgtggggagagacccctacaccaccaacactgctgcctcttcccgcagccctgacctcctgataccattagcccctcctgcctgcctggtcccaatttccttctctcaagccccacagttccagcccagaagaggagtcagctcagccctggcgcagtggtcraaggctttgattgcgtggtgtccggtccagtggggctgagtcggggaaggcccctgggagatggcagccggctgtggcccaaatccatcctagtgtgtgagccatcatggggctgcaggctcaggattgaggagatgggccccttggggccttgctccagggtggcagccacgtcagaccagatgcccagcacaggccacagcctggcccctgctgcccactggacaccacaaaataggctcaccacccccaccccacatgcccctccacccccaagccctcatcagcggacagcagggaacgcatcagaaatggatggggcacccagcaaatcccctcattgggacgggaagggcacaggctgtgggcgtgtcgggcgcctgccaggcatctttactcccaggtgtcaaaagcactttcacatccgtcttcctaatgccaacttaggtttgttaattttattatgtcattatctgagtgatggggtaggaggtttgaggaagacaggaaacacctattcacatgccgtatactcttgaaggatttagaaaccgggtactctcactggagtttgttctctgattgatttacgggagtgaatgacagttgattgaaacgtttagacagtgttttcccaggatgcccaggaagacaagaatcttgcccagggccgcctaacactgacgtcccggcccttcctcttggaggatgacgtccccaggggcttgttccctgagggcatctgcccagctctggcagctgtgaaccctcctgtcccactgcgctgctccagcctacattggggttgcagctggggccggcttggtctgcccctccttcagcctgtaccttagagggcagttgttttggaaacatcactgtgaataaaaaagaaagagaggcggcccgtgcctagccctggtgttccctgcagccatatgtagccactctagttttcccgaggcctgcagcctgcagagctgccccttttggctgagaaaactccaccaggtggacaggatcgaccccgagctggctctgctctcctctccccagcctgtggtcgggatggtggcagatgttttccaactgtgtcagcttctgttgcccgtgccttgtatgcagtggtgtttataagggtttgctgcatgaaggaactttctggagaacgcacaccatcagagggcgagtggaccttggaactctgcaggtgaaactggccctccgtgttcgctggccacgtccggacttggcctcagttatgtctggtttgcgagcagtgggtgatgtgtgtccaggcgaaatacctctttctattaaaagaggacgttcgttggaaggtgtcctccacccctacagcaagaagccttgcttctcaaggtggttcttcccatggtttctggactctgcacaagaacctgcctcctgcagagcggagggcctcgggtgtgtttccctttaacttgacatcctcggttttgaatatgaaaacttggactcatattttgggtggtctaattacgagtgtgtccgattgttttaaaatactggcagtttaccagttcggttttggccgtgaactccagcctgactttttaaaaatgtaattattccaaatatggaggtgcatttgttcttcctgaattgatgaaaggggctctcagtgtccccaaggccttcgggctgcacagagctgcttcaattgtttgcccgcgtccggctcrcctcccaaagccagctctgcagtgcagccccagcccacagcccagccagtgagactcagaactgaatgtcaaaggagagagagagagagaagcaggctttgtttgcagccatggcccagggaggtgacccacaggcgcctgcgtcagtgccaaggcaaggggcctggcctgcgtcacagagggctctgacgtggcaccactgccaaagtgacatcctcctcaggccctgcctgagagccctcgccggaggcccacggtgtggagatgatccctcctccaggccgaggggcgtgcggcagcgggggacacttcagaggcttcatcctcrtgaaagggagraaaaagacctgggaatgttgtcactaaaggacactaaagagatgcggcccctggcagcacacgccatcygcagccagccggggaagggccatccaagagcccttggaacagtggrgaggtctcctgatgcasagcacggtagacgcggctgccgaaagcctcaggcaggcaggttgcagtggccttggggcccctgaaacagccccccaggaagagaggctgacccccgctatgacccccrctacctccaccgccattcatctgtgcataggggaaggacgtttgagattttcttacagagttcttgaagtttttctttaagtttgaaatttaaagctgggcatggtggctcacacctgtaatcccagcactctgggaggccaaggtgggtggatcgttttggctcaagagttcgagaccagcctgggcaacctggtgaaatcccgtctctacaaaaattagccaggcaaggtggtgcatgcttgtactccccagctactcaggaggctgaggtgggaggactgcctaatgcatgactgcactccagcctgggcaacagagcaagaccctgtctcaaaaaaaaaaaaaaagaaatttaaaggaaagcatcagaagaaaagtcttggagcttctgtgtccaccgagtcctccctgggccgtctcctttaaaaggcaaacagacaaacccttttcctcgatcagcctggcttcctgggagtggccatttgctgcaggaacccctcccctccaccctcagctgccttgtcctccaccccaccctagagaagggacctgcctctgtgtcctctatggggttgctgccctccatcacttttatccacttcagaatggcccctgggytgctaaagaaaggcagscacaccacttcggtcattgctgggatggggcagccccacagggtcccctctaaggtcctagccttcctcccccacccctccccctatttcccttccccgcccccccatttccctcccccaccttcctccttctccccttgccctttcctggcattgtacccacccttctgctggccctctggtctcctctccttgtctstgtgtgcctgtgcctatgtgtatttgtgtatctgtgtatctgtctcttcatgtgtatatgtatctgcatgtctgtctatttgtgcatctgtctgtgtctgtgtgtgtgtgtctgtgtgcgtctgtgtgtgcctctgcgggtatatgtatctgtgtgtgtatgtatctgtatgtgagcctctgtggcctccctgcttcccgacaccctaccactggtccctgaggcctcatccctgtttcttcagctccccagctctgcgtagctcctctgtgctcccagctttgactttattccacctgcgtactgctccagtcctgatctgtctcccaaatcccagactcgaatctgcactttcttgctggatttctcagggccccaccggatgctgggattcagcctctctgagctgccctctacccacctccccgtcccggggccagcacctcctctgtggtggcccttctctggcacttggccaggagtcctggtgcctcctgctcactctcctgtccacgggtggtccccactgccttctctggcacttggccaggagtcctggtgcctcctgctcactctcctgtccacgggtggtccccactgccgctggacccagcctctgtgccagcctctgcccggccctgctgcctctgtgcagtcgcttctctgcaggcattcccctgccctcgcgctgactcattagcaccttcctgtggcacaggcaggaccatgcacccctcggagagacccgcagcctctcctgcccatccactgatgagcaaagcccacattgtgaggagccctctgaggccctgaacacctcctcagccctgagctcccatctccgtgtcctcagcccttaggtctggtccccgcaccctcagccctgagctctgagctcccatctctgcgttctcagccctgagctccgttccccttagctccagttcccgcgccctcagcccttagctctggtccccacaccctcagctctgagctctggtccccgcgccctcagccctgagctcyggtccccgcacccttagccctgagctcctgtccccatgtcctcagcctgtggtctgagccctgtctcctcatccttagcctgttgcttttccttccacacctgcagcctccaggacattcttgcttcctgaaggcycgtcctggctgctgctctccctcctcccgaatccctcctgctcctcatccagggcattgtcctcagcgctctgtgccaccttcttagggaattgttctgctttcagattctttgttctttgctctccctccggtgcaccgagtgataagggccccgctctcaagaaacctcccatacaccactcagtcagtcacatcccgttayacatcagactgcaccgggccctgggggagctgcaggaactgagcgtatgggtgccctcttgatgagtgtcctgaaagccaagacttggatgccatcttcgaggtcccctgtgaaacagcgctgcttcacccggcgcccctgctgcacctggcacccctgctcacagcgacagcggtaccgccaggctccctgttctccctgccccccacagggcctctcaggctctcagtgtgcaggaagaagatgggactgagaaaccagaagcaatcacagacctcaaaatcatcaagtgaaactagtgttgaaacacatgctttttttggtcaaccactgagaaacctgtcagagcaaatggggacaatgttgctagattccttagttgaacttgtttctccccrgctttgtgaaagtctaaccggaaacagtcgcatgtatttacagcgtacggcgtgatgatttgatacttgtatgcgttgtgaaatgatcgccacaagggacctcatccatgcccccttggcctcacggggctctcattgtgtctgtggtaaggtccgtgaatatcggggccaccaaactgtgcatcaggtcccggaacttattcctctcccaacggcacgctcacccgtggacagcacgttcctgttcccgacgcgcggccacccaccgctgcactctcctccctgcgagtttggctttctgaagctgagttccttacgtgccacgccgcctactggttcccacactgccgatggccggcccgccccgacacccacgctgcctgcacccggctggacctggctccatttccctgtgccaggttgaaagcttttctgaagaaaagctgccttcggtttagagataaacaatggatctgcgttttcttcactcggcttttactgccgtactttaaactgctcttagaaagaaagttaagggatgatcaatcataaaacaaaccccccgcccaatctgaagtctctgatgttccacagtgaggcacagcagggctctggaggctgaaaactcaccatgttgtgtgtgtgtgagtctgcgtctcagccctgctgcgtggggaccggtgtcgtctgatacggctgacccctgggagcaagcggacactgagtgcccaccaacccgtgccccgtagttcaggctgctggagaggccgcctcgcgtgagtgtggagcagcaygcagtgctctaagggtgttgaaatgcaagggctcgggggatttcaggtgtcagtcttccttgcacacctcagtttccttctggaaacagtcggatgcggtgccgagatccatcctccacgcgctgtagctcctctctctgccaggaactcggcttgtcccaccgtccctcgaatctgcccttcaggccgttccccacggggacagatgaatcgagcatccggagagacccctcgatctgggactttgggaytgtgggacgttctttcacagtctgcagaggaatgcagctcagtcagtgccttcttctgagaaactccctgtgcgcccttcctagtctaactccagacccccgccctctctcctgagcttttttttttttttttttttttgccacttcccgcatccctctctcccctcttgttctcaactccagcctttgctctgctcacattcatcccttttctggctcccagatgtgatggggcagctccattgcccaaaacgaaggagttgtcctggccaccctctcttkcctctccatatgcagtctgtccctgggcctagagctgcttcctttttggtgtcatggaaacctgttctttctcccatgccttagccagacgtggggctggcctcaccctttcaacctctggcytgtctgcagcagggcatgcttctagaacgtgcacctgcttgttttcagcccagagtgcccttcccacagccccacctcgtctccggcaccctgtgttcctgttctctggccttccacgctgcagccctgctggcttcccacagctcccagagcgcattgaggtcagccatacaccctgttccactttgccccactacgcggacaccccttgcatttgccccatccttttagtgaatgtgcgatgagcaatgcctgtgccacgtggatgagtcagaagtggtccctaccctcctgggaactgcagactgyaggaaagatggatacatgaatggcaaccacagaaaagccagaggactggggtcggggggtgctggaggagggcacattgccctatcaggaagatcagctgaccctggaaaaggtgacatgcacgggaggctcacaaagcctcttggagtggctggaggccgaggaaggaaggcaagcagcgggctggaggcgagtgtggcatgagggatgcagagccagcggcgtggtcgggagcagggtggcagggaggctgcaggggcaacatggccacacgatggagggrctcttcagcagaggcaggatggcagaagagcacttgggggacattcagcaggggagtgaccaggtccactggcccgtttgaaagcgtgccctcactgctacatgaagaagattgcaaagcgttgacgctggaggtgggggcctcccrggagccatgctgtcatccaggcaggagaggccaggtggggcaaagcaggaaaggcaggaggtcgaggctggagagaagcagcaccgtccagaggcgtttctcgtgagcaatgcatgggcagtgcttggcggacagaattgggagcttggggtgtgactggacagctggccagagagaggtcccaatagccaagaacaggtcctagagaagggagaggcttggaagaagctgccctgcgttcggcattggacctgctgtgctggggctcatgggcactctaggctaagctgaggcgtctggcaggccattaggtctggaggtaaagagcgagtttgggctcagcaccacctttgggagtcgctgatacttggaatccagaatggggaaatgagccgaggagcaggcccaggacaaaccaagacggaggagcaggcggggagcaggagaggagcacctgccgcctgttccgcactgagaggccggggagggagaccgagaagcgtccgtgagatccaacaggaaaagaggtcgggggcatctagggagtcccacaggagggaggatgttgcggttcttggggccccatagcggggcaggtcatggagcacccatggaatcctgcaagaaaggaggtcatggtgtccctgagatcctgcagaaggggaggccgtggcatccctgggattcagcaggaagggaggtcctggagtgttcccaggatccggcaggagggaggtcatggcacatcggtgggatcctgcaggaggggaggccgtggcgtgttggtgggattgggcagtgagcattgtggacgtggttgtcttccgctgagtgggtggtgggctgtttctcttagcagttgtggctgtgaggtcagcattggcctctccccttcacactcaagctctcctctgcagactctgttgacacctgcagcttcttttctgtttctcggtgcctgacacagaagaggtgcttagtaaaccccaaatgttagtcagcctccttccctgggccaggtcaccttgaccctgggctggggtcctactgggcattattttcttaggcactcaggcaccccagtgcctgttgggagataaaggtgcctgctggcctgtggcagggtgataaggtgccctgagtccctgattgtctgccccagagggtggggtttgcagcatcccttctcctgtcagatgagctcagaggacccagctctctgtgyttcatgtgttacctccgccttgcagatcatccccaagccaagcgagccagcccggcagccggagagccacccggaggagacggaggaggagctccgtgagcaccaggctctgctggacgagccctacctggaccggctgccggggcagaaggaggcgcaygcacaggccggcgtgcaggtgaagcaggagcccattgagagcgatgaggaagaggcagagcccccacgggaggtggagccgggccagcgccagcccagtgagcaggagctgctcttcagacaggtgaccgcaggcggggagggcaccagaaggctggcacgcacagccaccctcggtccccaggtggcatcttctgtggtgatcacgggggctgcagggcatccttgcgcggtcactgtccagtgtctcacctgtcttgtcctggccagtgagggaggttgatgtggcttccattttgtcccagccgttcctagggatacgagatgtttgccccctgtgggtggttacgtaactgctttccagccatgcgcaggccccagagaatggatttccttcctgtctgtaggctgtaaatgaacacagaatccatgtgttagtgagatacagcatgctttttaaagaagtgaaggaactagaggtattaattgatcaaaaaggcaggcagggcctgatcagaagtcaagaccttttgtgacccagaggtgctaatgagcagccctgcagatccagacagacgggtgcgattgtggcacccagagccagtaaggcttcagggcactgacacccagtaaccaaactcacaggagactgatgaagaaggccagtgaatgactggttaatttccattgaaacattaaacttctgagtcagcagaaatacctaaggcatttgggcagccagctggagccccgtatctgcagctagagtgccctcaggaaagtggcttcctccctgtaggcaggaagccagtccgaggaaccacagctctgtaggatttgattctatcctccagcagcagagctgctgcctcggctgcaggagccactggctcgttccctcccttctctctggactccatgccggccgtgccgttgagcacctccccagcttcctgactgccagctgtgtggccagacgctgcatctccacccccagcagcaccttggaagccaggagcaggacgccctgcagtaaactgttccccttaattctcagctacagttcttaaatgcttgccactgaatgaatcagtgtggggccttgtacctggagcacctagacccaagcctgccacacacgggatcagtgctcagtggtctccagaggcttctgggtcaggagcccttctccaccgagcttcccccagtggctggcattgggtgctatttctccttcttgttcagaggggggcctgtctctaatttctgggccttcttaattagcaccccgggcactaaacactacaaagcccagcagaactaacgcttggcaaagacagagagagaaagccccgggcctctctggcacacacacggtgcttcatggtgaacactcgtccacaggtcctgtccgacaggcccagggtgggggcctcttcctgtggtcgggccttgtaagttgatgaagatctgaaattcaktgtgctattattakgctgataagaaatgggaaactatttacattaataatttttagggctagtttctcatagatcagcctttactttgagaaaaagaggcttgttatattccaagcatgagatgattattagaaacacttattttctgttctctctggagagtaataggcagaaccccttatcagggaaacgtcgtagtacacggagcaatttgccgaggtaaacataaggcrgggcacctccagcccgcgtcggggaggattgcttattaaccacttaaccgcgtggggcccacggcaatcccagctgaatttggtcagcagcagactgggggcctgtgggtgctggctcctgctccagctcctgctgcagctcctcccactgtctcagggcttccttcttctctgctccctcctggctctgattccttttgtgtgtgtgtgtgtgagacagagtctcactctgttgcccaggctagagtgcagtggtgccatctcagctcactacagcctccgcctcctgggctcaagcaattattctgcctcagcctcccaagtagctgggattacaggcacccaccatcacgcctggctaattttttgtttgtttgtttgttttgtttgtttgtttttttggagagatggggtttcaccattttggccaggctggtctcgaactccttacctcaggtgatccacccgcctcagcctccccaagtgctgggattacaggcatgagccaccacgcccagcctgattcctaaaggcaggacagatcggagcctggccgggtagctctggtttcccccagtgctggcagcacagggctgggctctgccttcatacaggagctgggatgtaggtacctggttttccatgttcacaggatttgttcatcaaaactaagacaggattggcgcagagctcccagcaaggaggcgcccggctttctttgtgcctcggcctgggtggcaggttgctgtgctctccctcagctgctgtctggggagaggcttggcagctgtgacctcatctctgccctgctycctccactccactctgcctcgtatgggggtttgcacctcagcctgttcccagaatccctcagggtgtcccaggcccctggctgagtgccccccccacacacagagcccagcccagctccatctcatcagagaggcacatccccaccagcaggcctgctcyaggccccaaaggtcctgggtgcccagaagctgatgggctgttactgcttttagcctgcacgagggtgtgtgggatgtgagaccagggaggggagcggctgcagatgaagcccagttggcactttcaagtctgagagccgatggtgctttctcgcccaagtttggcatgcagattcaatgctgttggtcagaactaagacccacaaacccaacaagggggttgggcttcgtgcccactcaccgtatgtgtgtggtatggcagagtggacgctgtggtccccacatctacatggccttcgcatatcccccagtgaaaccagcgagggccaggctgccgccccagcaagagcttctctccacacctgccaggccctactcccctgcacctgctccaggctgctcctggctcagcacctcctcagagaagccctccttgataccccatactgggccaggcctccctgggaccccctgactcaacctgtgttatcctgttaacgtarcccatggcaggatcccacgtggacagcctgccttccctagagagaccgtcctgggaggcagagcctgtgctggcctcgttcttggctctgggcccactcaggcttcagggcactcacagggaaggcctctccacgcagctggcctcccggcatccttgtggcccatgtatggcctgtgcgtggacgggagacttgcaagagagggcaacccctagccctgcagcccaggggcgggagacatccgcaacygccaacacggccgtttcttccccgcagcaagccctcctgctggagcagcagcggatccaccagctgaggaactaccaggcgtccatggaggccgccggcatccccgtgtccttcggcggccacaggcctctgtcccgggcgcagtcctcacccgcgtctgccaccttccccgtgtctgtgcaggagccccccaccaagccgaggttcacgacaggtaacacgtggcctttgtgcagcctgagggtgcaacgcgggccacagtgggcacagcgcggggggctcttcccggcccagctctgcagaggctgaggaggggctgggcaggcacgagggccacgctggatggtggggaccacacaggtctgtcacagaggccctctccccgccctacaccccacaccttcagttctgtcatgctggggacctgtcacgggctcacttgcccactttcctgtcccagagacccatggtctcctccaagaacagtccacagcccatgcccgtggggccatgagaacctacagcttctggtccggctcaggaatcatgagcccacgcttctccgcttactccctcacacttcgcccacgtccacagcgttgacgctgaggctccagtgacagggctgtgaatggctggcggggggctgtgattacacgagagcagagcccgggacccctgggacacgctgtgggagccacacgtcctctgtctgtgccatccctcataccatcctcaccccggggaggcgatctgccagcaggggtccttggttttccctcacaagaaggaggcaagtaaggcgtccaccacggctgaggaggcaggaggggccgggccctggacttgtctgcctggagctagccagagccggggaggagactgctgtcctgggccgccccgccacccagccacccctgcaggggagaggagggaaggagggctggcttctggcagggcttgcctctgagacaagcacagaggcaggagcgctcttcatgttgttatgatctaatatttcttgttaatgacgcactaagaaaaatgttctgtaaatacagcacggcttcattcttcagatgattctcatcacgtggcttagtgttctgcagtctgygaggttctcactctcaggtcttagaaggatgctattcatattcagagacaaatttccagagtaggtatccagcaagtaaaatgctgcttctcagaaagaaaaccrtggaaggtcacaggagcagccagatgacccactccacaagtcctgggcagctgactgcaataagtgtgttcttgaaagaatgcagctcagacaagggagaccccagtcaccgccaccaaggagaatcctcccactaagctggcccaccctggctggtcccaggagacttgcagggagtcccgcttcgttggtgtcctttcttagtttgtcttgattactttttaaacaaatttataaaacagtacatgttcattgtaaagaaaaacatgatagaaacccacaggaaatgccgtttgcccgtaatsccactccccagtggtggcaggttgttagtatttgctttaaaccttccagatctatttctgtgcatagccagatggacagatagacacaaacataatttgtttcacagagacgggactctgttgtgtctgatgctttctgttagtacctcacactctcagccatcttcccgtgtccgtgcacagcgacgcagtgcgttcctttagccacgtggtctcctggctggctctgccaccctcagctgtgtgggctttgccgcttctccatctctctacgctccagcttttctgtctgtaaaggcagtaaagcaggtgtctgcctcgtaagttccagccgtgtgcttagtaaatattagcgcacgtgaccttatcatgatgattccactgtaggggcagtccccattccttgtatccgtgagcaactggttgtttctgcacacacacttacgtatttcacggggcagtgtccgtcattgcctatgtgtctgtgttgccattacaaactcccaagcacakccatgcccacacacagtgtactgattgtgagtcctagtttcattgactcctgtaagcctgcacctaccctgatgctttttttttttttttaccagaagtcccatcccacagcactgttgtgcaagtacctccagaattcctcaagtgcaggagactgactcctgttagcctgactcacaagaggctgagccaggaagtatgggaactaatatgcaccaagtgtatcctgtagctggaccctgcaaacactggaccaccttgaatctcagctycccttggctggggatgctgcctgtgttcccagtaayaggaacacaagtggggagggccgcatcctgggccagcacactgaagcaatagagcaggtctgtctgggcagcttgcccaggctcttcaccgtgcgcccygcccttatcagcctggatgaacccacattagcacaggtgcccctggccagtgacctgcctgcggaaggcgtctgttcacccagcctggccttccctttgttaagtcctggaagaccaggtgtgtgcagcacagacatgtcccggcagggcctcggggcagccctcctgccaggtgtcaccaggggccaaggcctggtgagaaggggccggggcagagctgtgccccrgagggccacctggccttccctcgcatctctagcctctgcagacaggtcagatactctccccttcacagcggtcccacgtatgctgactgagacagggtggcatccaacacgggttcaggcacattgcctttcctgctgcagagccycaggctgccsgcccagttggttctrgggcccccaccaggagcctcttctgtggctgccgcaccctgrrggcccgtccatgctgagctcagtgctgtggtgagcacatggctggcctcttttcacagtcagargttaagtagacctgtgtacatgggttttgcgtgtgttttctagcatatgtgttccagtccctctggaagtttctaaaggcagagctcgaatctggtgtttctttggaatctcaagtaccttggacagttctccgtccagcagaactggagttactattggtccaggaccaggcagactttgagggtagggggctagagtygcctccttctagaagtcagcaccgtcctccccagcacaagtcccacatagagctcacccctgcaaggtccagccacccagggcagacctcctcatcactgttttctcctcagcctgctgcagcagggcagctgcgcacgtccctgcctgggtcctggggcgytactgtgagcatgagtgacaggcaggccctcccacccgcctggcctctgcattcgtccacgttctctgggcctggccagtcaaggagtcttggcaaacgtggtatttttctaaagaaccgtcccagcttccgtctccttctagggaagtggtggttccgccaccacccgggggcagcctgccagtgggtggtcggctcgcccctggatgtgcgctgatcttggcccctctgccccgccccaggcctcgtgtatgacacgctgatgctgaagcaccagtgcacctgcgggagtagcagcagccaccccgagcacgccgggaggatccagagcatctggtcccgcctgcaggagacgggcctccggggcaaatgcgaggtaacgccgrccggggcaggtgggcagctgcggctttgggcaccattagaggggaccctcgtgggcccgcgtgattcagggtgttggttttgcaggtggttctttgggcttacagccccgggggaagggccacaagcatcttcactgtctgcatttgggcgggcagctatctgctgagaagcccggggctgtctccctggagtcccgtaccctccctgcaggaagctgctgcctctgtctgtgacctttcctgatrtttcgctcccacctcccacctagcaggctcttctcaaggtccagggctgttgctttctgcctccgggtcacttccccaaggaaaccagttcccaccatgctcccccagggctgccaggaaggagccacggggagatccgattatatctcagatcaggcctgttggctttttgttaaaataattttctctttttttaagattttgaaaagcttcttcgagaacacagggagacctcaggcccttggggccctcctcagagttaaggtgctggcgaggcagtgggtcgtgaagggaatggagctgcaggcagggccctggcctggtttgaattcagctcccttatgtggctgagtcacacgaggaggcttcggggatgctgcagctctggctgtgcctcagtttccctggccgccaggcgatggcagcggcctcacttgttctcatacaaggagggcccggccccgcctcctgataggaaccagagccctgccccgaatctggctgcagtggactcccaggcccaaggaggcaagaaggatcagccgattaacacctgagggcaggacgggggccgcactttggtgaggctgtcccagctggtgctcttcaccctggaggcagctgtcacaggggatcttgagctcttgacagggaggagggtgtggccaggccctgctgatagcgagggcaggaagagaagagactcccgtctgggagctggtgaccttggacaaatttccatttctttgtctgtagagaggggctggcaacactgtgcagggtcgcacaaggccccacccatgccagggcccaccagtagrgacctgctrtgtccactccccacaccaggaatcccaccatcctacagatagcgcacagggtggacaggaacatccacacccacccctccaacagtcctggacacccracagcccagggcccaagtggctgtggcagagatgagtgagcacgtggagctggcgtggcacggagggcctctggtctcctggcttagtttctgcagggtcccgccctgcaggttcgcctgccctcctttagaagctgggatatttgtgaacttttaatctgtgcytcatcttaccccccgtttcctttaccagttttattggtgatacataattttcaggggggaattctctaaaagtcaggcccaggaccctctcctgcagtgccctctgggaggagggaggaggaaggcggggaggagccactgtagaggctcttggcacctgcttcagggatctggtcaggacggctgtgccactggagggcagcattgcccagcagacactggctgcaggaaactccttccccacgtcccttccctccacaggaccagacagctgtcctgctgccccttctggggactgcccaaggcctcctgaggcttccagagctccataacctgcttccttgtccctcccctacatgtgcccccacccccaggaggttccrctgaggccaggggattgggagagggtctctcagccagaaaagcaaagcaaatgcaagcaagggagggaggagtgagaaagcaaagaccctggaagaaacagcccgctcctccgcccgccctcagctcctccgcccgccctcggctcctctgcctgtcctcagcaccatgggtgaaggtgccagccacgactgggccaggggctggcagagggtccccaggtgttggggctgtgggacaagacctgagcctggcaggatctcagggagaggagagctggagaaagacaggtggctgggagacagccacagaggcggtggaggccatactccctggacagcagtgccttgctcccacacgtggggcagctctccagtgcgggtgcccctccaggttcagagcgagcagtgtgctaactcagcccagggggacgtgacgtcacccaccagacttccagtgccagcctgccaggggtcactggcctcctgagatggccgagcagaggggccatgggtacggggcatggttagagtgggtacccgataggagaagatggggtggatggggctgtgacttccccagtccgcggaccacttggaggccacagcaagaccgaagcccaggcccgagggcagggcctcagagtcagcaccccttctctgggtagacgactgcctggaggcctggggggtgaggccctcccctcacactgctgagttggcttcgcgtggtgaggaaggatgagagtgggctgggagatactttctgcaagcttgggaccctgtcgatactggcaggccggcccagcaagacgtggctcccagtgcagctgtctcgctccctgcctcactccagagcaggccttgggaagctgcctcacacgttctgagcagtcgggggtcctctgagtatagccatgtgtgtgtgcgggccccgccctcctgcagaggcttcccgggagccagaacagctcctggccaatttgcttgcccagcttggtttgtcctgcctccaggcacggtgtccaggaaggagaggagaagtgggtgggctggaagtcagatgccacagagaccagggccaccactgggatttgcaccctgccccaagcctgtgtttgctgtaaggagcaaagactccttctgtcttatcctaggaattaaagggagacagaaataacgaggtcagcctcccaagaaagcaggaaggggccaccatcaccaccgctcccagagtggctctggaaaagcctctcaggtgctcagtctgagccgtcacaatattgcacgctacagcctgagccatcgcggtgtcccgcacgcacagcccgagcccttgcggtgtcgcgcacctgcagccccagccgtcgcggtgtcgcagagcttttggggctttgatcctgtgtcttttctgtgtccatttcatgtgtttgtaaggagagggtttttctacttttcttctttgccttattctaacatcaactttaatttgtgaatttcatttgtggtctaacgtcagatctctctttctgcaattcagtcycttatccagtgggtcgcttttgagtggggaggacacacatggctaccctgccgttctttcacccaaagtccacactacatgacctgcctcttggcaccgcagggcacagcctgtggtcccctacggggaccttcccaagcgtgggctgcctaggcccgtctgtccagagggaacttggccctggccacagctgcctgtgcctgtacacacatgtgggcttcctgaagtcattagaaatgagaagccctggccaggtgcggtggctcactcctgtaataccagcactttgggaggccgtggcgggtggatcacatgaggtcaggagttcaagaccagcctggaacaacatggcaaaactccatgtctgataaaaatacaaaaattagccaggtgtgatggtgggcacctataatcccagctactcaggaggctgaggcaggagaatcacttgaacccgggagatggaggttacagtgagccaagattgcgccattgcactccagcctgggcaacgagcgaaactccgtttcaaaaaaaataaaataaaataaattagaagcccccgcagccgcccagggccccaactgcaccctgacccctacccagagagtacgtccctcctgcctggctttccagggacatgtgacttatgtccccaaagtagaagcagcactaggytatgtggatgggaccatagagtcgttttttaccaycggaagccgtgtcacatcttttctttgttaaacaagagaccttcatagaggaagcccggttttgtggaattgttgttcatgagaagagaacccgyagagcatccgtccctgcccagcgcacctgccctctggaggtctctcccctgtgggcggggactgagttcttggctccgccccttcttcctccaccctgcatggacaggacccccaggtgcaatgcgtcctgcaggaaggctgtgtgctacggctcctggtggtctgagaggagccccaggtgctgggctggcatagagagccctcgagcttcgcccaccacaggtctcacatacagggtggacaccgaggcctgcaggagctcagcggatgctggggcagggctgcagtcgggagggagagagcagatcctgctcaggcctgggggaagcargtaacagccacaaccggggccacctgagtggcgtctgactcatcctgtggtggcctaaccctctgagagccatttccatgtgaaatgttaactcgaatctcatgtccaaagccatcgtcccctttaaaaggctaaataaatgtagctcaactaaagaacactaattttcctgtgaatttctggagaaaatctgaattagcccagggatctcaatctgaagaatttccaaacctcagagagacgcagccggatgccagctagccatccaggacagatgccagaccctggcagctgtggccccgggcggtccaaggaaggctgcttcatcctggggctcagagactccgggagcgcggctggggtttcccttgaacgtgagggagctcagcagctcacctctattttaagaccagaccctggcagctggaaagcaaagtaataatttgatgccaagtcattcgtgcgacagtgaagggtaatgcattgaaggctggaattatcttttaaagtgttttttcaaagctataattaagtgtaagccctctaaaatatttcttaaatattttaaaatatcacgttgggtgatgttgcttcttcttttgcagtaaccaaataacatgcttgtttttgtatcaaattaagtttccttttggrcaatggtttcagttggagtttctgtytgtggagctgaagcagcagcttctgcagaacgtgtgagtgtcctctcgcctgtccccacagtgcatccgcggacgcaaggccaccctggaggagctacagacggtgcactcrgaagcccacaccctcctgtatggcacgaaccccctcaaccggcagaaactggacagtaagaaacttctaggtatttcaggaccttcctttcctcccatattgggtttgaagtcccctgaggttgtgtttccagctctcaaccccttgtgtctggggcacctgtgggtgtcgcctgccaggttataaggtaaagggcctgaaagggaacctttcaccctctgttcacaagccactggttgttgatgaacgtgccaggtagcaggtgtgtttgtgtaaaaactgggctgagaaccgttggtttagaagcatcttgaatcagagtttaggtttgagaggctgattaggaacacagccagcatgctgcccgccctgccctgcagggagcctgaagttgttttgagctccgctttaaggcccatcagagcaagaccaggaggaggcctagggagtgtccactgcttaggggtgaaaggctgctggtgtcttggctctggctgaaagcacctgcacaggtggtggaggggaattttagcctcatggagagaactttctaatgggcatcctctgcccggggagctggtgagaggctttccacagggatcttcagcagaggcaggtgaactcccagccagctccatggggcttccagtgttcccaggccacagaacccagacgtggggccgggggcttccagggcgcagaacccagaccccgggccgggggcttccagggcacagaacgtggaccccgggccgggggcttccagggcacagaacgtggacccggggccgggggcttccagggcacagaacgtggacccggggccgggggcttccagggcacagaacgtggacccagggctgggggctcccaggacacagaacccagaccctgggcggggagcgtccagggcacagaacacagacccggggccgggggctcccagggcacagaacccagacccggggccgggggtgtccagggcacagaacccggacccggggccgggggctcccaggacacagaacccagacccagggtcgggggcttccagggcacagaacccagaccgagggccaggggatcccagggcacagaacacggacctggggatgggggatcccagggctccctttgttcctcgataacgtctttccctgcctcccagccaccctgaaccaggacagtcactgcccactggttttcttccccatcttctgtgcctttgccctgggaagagcatattggctcttccctgagcaggaccctaggaaggcagagagggagaactaggaaccatgaacgcaggggttgcaggggcaaggagagggtgggccgtgcctggctcgttgactgcatttggcagggcacacgttgcaggaggtgtcctccgtgccaggcctgygcccggcagactcagcctcacagagacctgcactcctagtccttcatgcgttcactcactcrctcgctcacgccttcatccactcgccgagggcaccttctgtactggatgccctgtaggtacagacggggtcacagaccatggagccagtagggctgtgaggacacgcatgggctctggcctggggtggcggtcacgctgcttccggagtcccccctgccctgtggtatggaggcttctaaaaggacagaagcctcaagtttggggaaagtgagaagggagtgaacagcagtaggaagcaggtgggccggggtgtggctgagcaggttcacgaggtggatcctgagctagtgccggggacaagggccaccgacccaccccacagactccgacagctcaggctcagcaacwgcagaggctatggactcagggaggcactcagtcaagggcctgggccaaagctggtggaaaggcctctgggccccgactccctacacagcggcttcgcctgctgctgctctagaaggggtacagcacccttccaccgtccctctggaagggacggtggaagacaggggcttcctggactggagacagctgctctagatgagggcatggatgccaagcccctacccctccccactgggctgccagcatgctgacctttaccgtccaagcagacaggagacccctctgtggatttgaccagccccaaagaagctgacatcaggggttcccaacaaatagcccctgagatcccttatgctggcactcacggctaatcaccccctgtgggcccagagcttccacccagccgttggcacttcccccttaggagcggacaaccaaggaggacccagggcccgaggaacggctggacagggacctggagctggagccacacaggggaargaggctgggggcagacagtgtgaggcactaacccagctgccattagcaccctcagagaggatgccacatccacrtaacgtggacaagttcagtggaaaaggggaaagcacagaacgttcagagaagacaaaaattaaacacctgaccgcagaaaaagaaaatcctcctcagactggaagatacggtgatgtcatctcccagaaactggagcaaaacgtgacagctctgggaaactgggaagtgagatgatggagaagaaggccaaagctcactgcagtgtgcagggtccaaacagcaggagttcccagggaaggcagaggccaggaggaggtgtctggaattcagaaggccccaggccaaaggcagagtctctgggctgcagggacccaccaggggtaagaaagaccctcttagggagaaacagcagagcctcagaatgcagggacaggtgagagccagggcacctgcagactccatggggcctgcrgccatgccagttttaagggcgcctcattgccctcctgaagtttgtgtcccgccaaactgccgggtgagtaggaaggtggcacagaggcattccaggcatgcaagggccagagctttcaccctccagctgttcttcctcaggaagccaccggaggacacgctgtcccagggcaaaagaacattgggaggcccatcatggaggccggcctctactgggtggtctgtgagagggtggcggccaggaagtctgagatcgccctgcagggagaagctgatgcagctacccctaggaagggggcacgcgctccttggggagaagatggcgcatggattgtggagtacctagcggaggcggggagcaccgctggggctggggaagggagccctagagggcaagggcggcagagagggcaggcggctttctgtccgggagctgggtggacaaaggccrtgcatcgaggcactgaggctrgagtgtgctgtccctcaggattctccagtccttaccaggaaacgtcactgcctccccatgtaacacctcagcttctggccgggttctccagcatgggaggggctgcctgtgggccccatgaggggacaagatctttgcctcgatgtcaccggggctgccacagcaggggcttcagcaggcgtgggagttgctgagcrgcctcaaagcatcagctcatcaggccgtgtcctgcacacacgcagttctgtgcgcccacctccacgcctttcagaatggcggctgctcctgacacyttcatccattttcaaaggaccggctgttggtccatcccctrccaccttcagtcttycaaacctgtggaattcagtgggcggaggatggaggcaggaccagctccaccagcagaaggatgaaggcaggcttagctccaccaccttgcttaggtttctaagctagtttcaaacaaagtttaagagagatgatcaaaaaggaagacccctttcttgtttttggtttctttattgaagtgtctctgcagcatccctttgcmccattcctgttctccgaaggcaaccattctagtcagtttcttttgtttacaggaaggttgatcattctatttcttgttctttcctggaaagcttygtgctttaaaatctgttcacattcctgtgaggatgcctctcccattaccttctcacaactcaagatcgatttttgaatttccgacaattgtcctaacccagaaacttcattaycatcagtctaagtatttcagacatggtaatagctgatgattatcttgagttttgtgaacataaccctaatgaggtgtttaaacactactgtgtgattttttttctttcctcttttaatggaatccacaagccgctaagccgtgtgcaagggccttcatatttcctttctgatgtggtgagatgccacacataaggcgtggctgaattggctygtgggcctgaggcaggctggcygctgccctaggcgtcactgaaagtcacgtggctcatctgctcatgtcagctggcagggtgctgcatcygggcagagctgggcccctggcgagtgggtgccggtgatgctcagggtagggtgcggcaggaaaatgacttggcacagcgagggcctcctcccagccagggagcaggagcagcagcgagaggatggctggagccgagccttccctgccccaggcacagaacgcctgtctgccagccyrcrgcaaacagacaagtagtaaggctggtcgtttgcagagcttcaggccctgtcaccaggctggaacgtttygtggcctgggcttggtgattgtggctccaaaccacaggaggccgctgggctcctcacaactgtcaccaaaactctgcctataactccattcctatacgcatgcatttggatgcataatcgtgtactttttctttgttgttttggtctttgctagataatgagcaaactcaaaacagtcggatgacttgtggttttaatgtagacatggttggctatgatttcaaagagattcagtctcttgcagatacctggacacgtgtgtctactgtgaattcatatagctgagcgcgtgcattatttggaaaacgagctccctagtttctggcagtgtctttcccgtgcgttggagtagtcagtgatggaaggacgtggcccacggagccactcccagccccagctactcagccactcaccaaggccatgaccgcccttccaaggcagcacccgcccactgtggtgaggttggcattaggtgaccccactacagacgacgggcagcaagcaggacagcaggtggcttggcaccttggcacccacgccctcctcctttttcagtctcgttccacctgcgcactagctctcttgcccaccacatcccgccagctcctgcccagccccagcacctcccaaaggggtccggcgtgcaggcygcttccccrcatggtcagccccacrtccactacttgctgtcaccaaggcacagaggagagcagggccaacatgcctgcggggatgagggctgaccaccatgaggttcaggcgagaagtgttagctgatgttgtcccatgtgccacgctgacatgtggacacgggaaccagggtcaggagccacgactccaggcagtggygggtccgtgagccatggacacggaggaagtaggcccaggacagcgcccaggaaggggaggcatgctggtgctgctgccctcagtgggcgtgagggccaggacccagaggccgaggcatgcctgctgagcgctgcagggagagccagggccgactgaagcccctgctggctcaatgccttgtacagcccaggcagggaggagggacaaggcgggcacagaccctgcccttggagccaggccaggtggagaggagcgcgggctccctccgacayaggctggctcctccgagcacgtaggsctttgtctggaaaacgtcacagcatctgcatggcgcctgcgcccctcagctggccgggccctcctagcagatgggggccgggcctatcctccctttgcctggggggcctgggagcccctgagccccttctgaaagtggctgcagctgctgccccctgcctcctgcctyctgccctgctccctgttggcatggcagctccccagccccgggccgtggacgtggccattctacaagcctccggccttgatgcagatctgtgacctccacagagtgagaagagcctgagtcagctctgtgcatcgggcctcacactagggcctggctgtggctgtctgtgggacatgtgggtgtctgtggggggtgctggtgtccgtgtggatgtccgtggggggtgctggtgtccgtggggtggggtgggtgtctgtggggggtgctggcgtccatggggggggtgggcatcagtgggggatgctggcatccatgggaggtgctggcatccgtggggggtgcaggtgttcgtggggggtgcaggtgttcgtggggggtgtaggcgtctgtggggggcgtgggcatccgtggggggtactggcgtccatggggggtgtgggtgtccatgggggcggggcggggggcgggcatccatggggagggtgcagtcatccgtggtggggtgatgggggtgcagtcgtccgtggtggggtgatggtgcaggcgtctgtggggaggttgcaggtgtcggggggggttgcaggcatctgtcggtggggtgtgggcgtccgtaggggtgcgggcatccgtgggctaaggcaagcaggcctctgtttagcttctcgtctgtgccagccactctcctgcagcttggggccatcgcagttgctcttcccagccaggcacgctgttccctgaggaagggttcctctcgtgctaaccgggccggcaagccctccaggcaagaggcagacaggccctaatggacctatggccaactccttcctatggcccccggcagccagccctaggagcgtggaccagagcacacagagtggaggctactgttctggagcaggctgagaatgggagaggagmcccacagcggggggtacagcccagctgaggccagaaagtggggtcccacgytggataaaggagcctgttacatcargccagtctccctggagcatgtgagatgtcactccagctccagcccaggaaggggccgggggctgcggagagtgagggattggggcccaggcagccgctaggaatggtaggtcccgcccctggttagtgggggtctcttgtcctccacagatgggttttaagctggtgacgtgcattcagccagcactgggtcaaacaggaaaaagacagcacccctgtcctgggagcactttcactgccggagcaggcgcgggtgccagagcagtggggtgggggtttcgagggccccgatttccatgggaggaggcctggcgtgcagctgcagygtccttggagccctcagtcagctgtacacgctccgcctgtgtcgcagggaggggctgtcgctgcatacattcccgaggatctcagggtctaagaggcctcaggacccatgtttaatcccgggacttgccccttgtttgccatgggagggggctgctagacaagccctaggagctcactgaggagccaggctcggggtcctggagcaggatttgctgttagatacagcccctcaggggcacgggctgcaggcagacgcccaccaggggtacctcgtgctccccagtggcttggtgcctctcctgggcccctgacaggctgatgccacaacaatttgaggtgtccccaccagggtctgtgacccagctcagccctcacaggagtcaaggcacctctaagggccagacactgaccctgcagcagggccacagggtgtcacaagggggagcagtggcccctcgttgtcccacaaatgcccaagtgccactgaagaccccggagngcgcccagggcctgtcgagcaccttggccgcgtgcccttggcctctctgaccntctccctcccccccacaggctcgctcgcctccgtgttcgtccggctcccttgcggtggtgttggggtaagtgttcctttaatgtgtaaataatgtcctgtttcttctcgagtcccagtggtcacagaaatcgcagccttgcttccctcaaagtgaataattgctgccaggtgttttccatacrcaggggctgcccatgtgcggcttcaaaggccgtgtgagccgagagcgttttgatcgccgactcgggcacctttctctggggaaggttgtctggcgcaggtggctggggctctggggtgcagtggctctcgctttaagaaacaggatcctgtatgcagccagcatctcatccccttcgaagtctgyggcagtaatctgctcacatcaggccacgagtatggtgcgggtaggatgcgtgcttctgtattctgtacctagtttccacccgaagctacaggtggggctcccagtgcagtgaccgtgatactcatgggccacgtggagtctgtagggctactcgctgggctgtgctggcttctgtgagctgatgatatggacctggcctgggcatatgaatcactggtctgtgccrgcttctacgaactgatgatatggacctggcctgggcatatgaatcactgggctgtgctggcttctacgagctgatgatatggacctggcctgggcgcataagttcacaaggactttccagtctgggcatctgcccatccgtccacacaggaagggtcaggtcttgcartcaaacttctcaataacaaaagagttctcccctggcccctgacctccttgatgcagcctgggcaggggtggcaatagcgmgggcggccatgagaagctgaggcggagcgtccgagcagatccgggccatcatggtcctgcagtgccgcgaatcaccacagacggttacaggcagggaggacgggagccggtggacagcaggagccgctgcagccgaaacggtgcrgtgtgtgtgtaatcactgatcgcagggtgaagctcaaggtctggattctgttatggaaatgaaacaaaattgttttcttcctgagtttttataaaaatcactgctttgaaaattatcccgtcagaaagagaataaacggcatttattcataccaccaccaagccctcctagagttattttattttgtattgtaaataggctgcaatctcttaatttggggcatgtttttggccagacttgaaaaggattgaatttgcactgccctgcagccagcacgcctgtgcaaggcagaatttatcatttgcaaatgaaagctaagtgcagactcagagctgagggggtgagcccagcagcccctcccaagtgttaaatccagatctgaggcacagcagatgagagctgcaccctcacgtctgggtgtgcagatgctgatggaaaagctccccacgtggacgcgggcagagagggtagcctgttggcatgggcagggaacagtgcaggccgtggggcttcctgaggtacagccaccggcaggatgtgttttcttcccattgttttccaaaaggaagaagacagacaggaggccggtgcagacccctgccctggtgtgggatgcacctgctgtcgctggcacagatgcagctctcctgagcctcatgtctcctccagagccaggaggggccagcctcctggggtgtcaggaggagcaaagtagacctcgggagccgaagtgtgggcacacagcaggtgctcttgtcagggagggcagagcaggtgagcagagccagccaccttccccgaaagcagctgcaaactctcccggaggcagaacagtggggcttggaacacggaaaactcaccactcctcggcgctgggaaatgggagctgtaaagtgctttgacctctttttcaaaccagatcagctcctgcgttgctcctctccagtgaccgcaagtttcaactgggtgaggagctggtgtccctgctcggcctcgcccagcggagtccyggcctgctctcgtacgcccggctccccgcggctcctctgagcttcccaaaggcctcccagccctgccagccctcggcatgtcccttttagactccatgggattatccgtgggaagctttctccatgtttccccccgcctttttcctgtctttattgcgaaagagagagaaaaggagaggagagaagcgagagagagagaaagaaaggaaaagaaaacaaaaaaaaaaagaaacgaaacacagagtgagccatttgctccttcctgcattagcagttgcggccgcctgccctgagccaggctattgctcagtggtggcgctgcacgcctgagccaggctccctgcaagaggcctggagctccaggctggtccctgggagctggagccgtggtcctgaagcaggcgaaggagggtctcttgagttctctggggactggggtcctgcagtttggctggggctttgtccttcactctgtgcaagactccagaagcttctgaaccccagggtcccatgggagggggcacagacacaggcacctggtagaccgagcagctccttggcaccccaggtgtgcagaatccccagaagacccttcagaacacgggtgtagtacaccctccgctccctgcagtgttggcctaatcccaaagcctagttcattgtatgttggagagaaaccatctctgggtgctgtccccacaggggcagcctcggggcctggcctgtctgggaccccgcctctgctggctgacacagagcaggtggcagaatcttgccctgcccagctctcactcctgcgatgtcaccttggatttttttttttttttttttcctctttggagacagagcttcagtctgttacccagactggagtgcagcggtgcattcatggctaactgcagcctcgacctcctgggctcaagtgatcttcccgcctcagcgtcctgagttgtggggactacaggcccaggccaccacatctggctaatttttgtttgtttgtttttgagacggagtctggctctgtcgcccaggctggagtgcagtggcgcgatctcggctcactgcaagctccgcctcccgggttcacgccattctcctgccctagcctcccgtgtagctgggactacaggcgcccaccacggcacctggctaatttttttttttttttttgtatttttagtagagacggggtttcaccgtgttagccaggatggtctcgatctcctgaccttgtgatccgcccacctcagcctcccaaagtgctgggattacaggcatgagccactgcgcccggcccacatctggctaattttttgaaaagaaaaccatcaccgaatacacttcaggaaatgtcttcagccccttgaaaatgcattttaactcaccttgctttgatgatgaagcttcaagaccgcctggaaagaaatcctccctccccacataatgagcggtgtctatcaagtggcaagtctgcctggtggtggacaggagccctcgagggcctggtctggggaagggagaggcagggtggacacgcctggctcctgcttaggagccccaaagcactcggcgctcagaggggctcagtttgagaaggaggcgtcctgcaatggacctgcaatcgccctggtcagcaccgtgtggaagctgagcaacctatgacacggcttctaagacctccaccgggctgggcacccccaagtccccggtgtgttaccccacagcagcttgcaggcaagggacacacttggggacagatgctcaggttccctggggccagcccaagsgctgtgtatttcatcttaacacctccctcccctggccagactcccataggagactgctctgtgcagaactggctgtccaggtctctgtctgtcgactttcctcctgaattgagccagggctgtaagaaatttctggtgtgcctaaataaataaatgagccaacacacaatcggggattgttgacgtgtttgtgtgaaacacgttttctgtctgaagtggaaaaggccagcgggctgacttgctggtgtccaggcagagccgtgtaccgtcactagggcagagcagggcagctctcctcacccgcccacacggccagtcccgcttagctacgctggtcaacatgtggagcttccagttaaactcggcacaggagaaagtcactattggaagagactggtcgtgattccccttacatttcattttgctgctaattatttgacaggtcgactatcccttatccgaaatgcttggggccagaagtatttcagagtttggtgtttttcagattttggaatatttgcattgtacttaccagttcagcatccctaatccaaaaatctgaaatccagaatgctccagagtgcatttcctttgagcgtcacgtaagcgctcaaaaagtttccagttttttttttttcctttttggagacagagcctcactgtgttacccagactggagtgcagaggtgcattcatggctcactgcggcctcgacctcctgggctcaagtgatcttcccgcctcagcctacaaaatgcttttgtagtatttcggatttcagattctcagatcagagatactcaagctgaataactctcttaactacagttccagttaaaaaaaaaaaaaaaaaaaaggaaatagatcaccttgacatcattacttttagatggaagtatactgaagcaattgagggaaaggaggatgcctcagaacaggtcaggacacatgcatctttcttctggtaaattctcttgtattttcctgtttaaactttttggcatgtcttaaaaagattgaaggctgaacgtgggctgcagctgccctggctctggtaggccctggggtttcagaagcagagcccacggaacctsagctgctctgcccagccagggctggtgatgacggtggcctgggagggtgacctcactgtggggtgttgtttccacaggtggacagtgacaccatatggaacgaggtgcactcggcgggggcagcccgcctggctgtgggctgcgtggtagagctggtcttcaagrtggccacaggggagctgaaggtcagtcggggcctggacagtggtggccctccaggaggcctgycatagattcccagtgtggggaggggccgcccactccgtctccctctcatcaggctgggaggcggctgtgatggggaggcgtggaccccactctgtcagcacagcctcgctattgaatcaaagagacattgcccacatttgtgatagggtatgtgcatagtacagagattctcaatgatttgggtcttaagaaccctttatactcttaaaaatttatactcttaaaaaaaaaaaaaaagctccaaagagcttctgtttacatgagttatatccacaatattgactctattagagattacaactgagaaattttcaaaatgtttattaatttaaaaatagcgaccgggcacagtggctcacacctgtaatcccagcactttgggaggccaaggcagggggatcacctgaggtcaggagttcaagagcagcttggctaacttggcgaaactccttctctactgaaatacaaaaattagctgggcatggtggcgcatgcctataatcccagctacttgggaggctgaggctggcgaatcgcttgaacctgggaggtggaggttgcggcgagccgagtcacgccattgcactccagcctgggtgacagagtgagactccgtctcaaaaaaaactaaaaaattaaaaagtaataaaaaaataaaaatagcactaatgtcttgcctgtggacagcagctggttctcacacctgcccggcgtcattcttgggacatgttgaagtacatgaaggaatcctggccccacacagatacgtaattggaaatgggagcaggattttaatagacttttcagaggtattctaattgtgggtattctttgacagtataccaaaaattcagcaagtggtagtgtcttgaaaattagctgcagtgtggatctgaamtcaaatcgtggcctcctccccctccgttttgtttaactgaaccattagcccttcttggagatcaaatcgatccttcgttcatgggtgattggtagcaccgtgcgttggtcatttggaaacttagcttcacggagttacatggatcttccatattctgacccatacagtatcaaaaaagtcattaatttttgaaaccattaatatcacccccatctcaccagaagtcttataagtagtgagagagccagcaggctcacaggggcagagccgtgtgttccaaacttgtaattttcactggaaagctcacagtttctcacgcttccttcccgtctctttactcgggatgttaaaaggacgtgtttgagggcggagatctactaaaatgtctgaatactgcttcatcgagcacattgttaagagaagctgctcacacacacacacacgccctggtgctgttccctgcccgccgtctaccctccggtgcttcagcaccatcggcgcaggtgtcagggcagtgaaaagagtacatagagcctcaggactacgtggactacagaccctcagcaggggtcgggaccgaggggtctgcagcctacactcggaagcactgagtgcagaaacgcagggaggccagggcctcttgagagcgtttgccgccacctcatgggctgccctcgccccttcctgagcctggtccytgcggcgtccggctcaccccgtccatggcattgtcactcatggttggccggcactttttttgaggcttcattacagaccttgaccacacagtgtcctgttgctggtgagaccaggagaggactggaatccatttttatggcagcaactacagagtggtttgcagatggatttttgacgcagaagtgatggggcagaggacagcgtttctgcccagtgtgagaggagctgtttcgtgggctgcccacttgcccgccatcctgagagctgaactgcagtaaggacagaggcagtcacgtgaaggccaagctgggacacaacgtctctgccccgcggccaagtccttgagtggggccccttctgcttcatcttcctccagtggccacctagcrggtcctggtcccgagccgacggggagtgagcacatcctttccacatcaccccgacccctgagccaagggcaccaygcctcaccgacagttctgagagtgggcagggcacccacctgttatcctagtgactgcgtttcgggggaaccattagtagcccccagacctctttaggagaagggcccaggcttcccggaaaggctcccagctggccctgcatcctgtccccatcactgtggccagggtgcagcaagaaactgtcctcctgtgtagcccaactctgctaaaagttgagtgtgcaaccattttcccgtggctacaaagtgtgtcttttgttgctctctcctggctgtctggtgtcacctgcagaatggctttgctgtggtccgcccccctggacaccatgcggaggagagcacgcccatgtgagtacacgccgcagccccgcacagcaggggaacccaggtcttccttccctcccttagggctgggtgggtgtgtgagtgactgcggggagctgggctgctgtttgctggccacccaggatgtgccgcatgccggcttggctccagctcctgggtgtggagtgcagatgccaargtctgcgagcatcactgctcggttatgacggagacagatcagaggaaaggatgggaaagggtctgtggaggttagtccagagaagcctctggttgttgagtagttgtcaacacttgggagaggaaacaccactcaccctcaagtgagtcactgcagcacttgcttgtctagaggactcaggtcattttgcgcatggccttttagctgcctgccgaatgcctggtactgacgcagcaagccacagagccaygtccatgcaggcagctatcctgatgctgtttcgggtctttcagagactgccgacggtccatacagctgaggatctgggcagggtggcgagtgtggggtgtgggtcctcccggatccatccctgtgtgtccagagccagtggcaggacagacccgcagctgtctgtggagtgccttgcagcctgggtggtgaatgaatgatctatcccgtcaaagagcatgctgtctcctgggacggtagccgctctagtgaggaggggtggtgctagaaagagcgtctccccatgctctggagatggagaaggcgtgcctgatcttgccagcttcggtgaggaggaggtggcatagggctctgccttggagagttggagcagcagtttgtcagatggcaacgcaagaacaagtgcagatacaagttcactatcaggctgtggccaggaagcagtcagaacaagacagaaccgcaggggcccgggaaagggcctccctgtcacccctgggaagtcaggcgtccacggaggggccggcaggacgtgagagatagtcagatccgcgtgttagagcagaatctccttcacgtacagggaggagactgtacgtgagagatagtcagatccacatgttagagcagagtctccttcrtgtgcagggaagagattgtacgtgagagacagtcagatccgcgtgttagagcagattctccttcatgtacggggaggagactgtacgtgagagatagtcagatccgcgtgttagagcagattctccttcatgtacagggaggagactgtacgtgcgagatagtcagatccgcgtgttagagcagagtctccttcgtgtacagggaagagactacgtgcgagatagtcagatccgcgtgttagagcagagtctccttcatgtgcagggaggagactgtacgtgagagatagtcagatccgcgtgttagagcagagtctccttcgtgtacagggaagagactgtacgtgcgagatagtcagatccgcgtgttagagcagagtctccttcgtgtacagggaagagactacgtgcgagatagtcagatccgcgtgttagagcagagtctccttcatgtgcagggaggagactgtacgtgagagatagtcagatccgcgtgttagagcagagtctccttcgtgtacagggaagagactgtacgtgcgagatagtcagatccgcgtgttagagcagagtctccttcgtgtacagggaggagactgtacgtgagagatagtcagatccgcatgttagagcagagtctccttcgtgtacagggaggagattgtacgtgagagatagtcagatccgcgtgttagagcagagtctccttcatgtacagggaggagattgtacgtgagagatagtcagatccgcgtgttagagcagagtgtccttcgtgtacagggaggagattgtaaccgccagggagggatgcttgttggaatctttgtagctttacctgaaaaccacgtgtttgctccacatcccagaacagtcacttgggcaccaggcttcctgtttgtttcatttctctgaagtttcttttctaatttgaacctgagttgttggatattccaaataataaacctcagaggagacaaacgaattgtgttttgttgcagctcttcgctgtgctccccgtgagccgctgcaggagctcagcgtctaggatgtcctggggcgtgtgggcttccccatgccagcccggattctgaaaacaaaacaactagtgtttctccgtttctgtggtcattcggacaaagggaatttgagatcaagaaggttttcgttgttatttgaatcactttcatagcttgttttcttggtctcttgagtaagactctctaaaattaaaggtaatttatgtattggaatataggaaggtcagcaggaagcaactgagatgaacggctgccatgtctcctggggcgtggcggcagctcctgagaggaagggttccaggtgaagatgagggaaatgttggtaacatgtgaaatagggttccctaccagaggagcgtgggggacctccaagcaggagagtgtgtgtgtgtgtgtgtgtgtgtgtgtgtgtctgtctgtctcagtatggaactgtggatgtgtgtgataggtatatgcttatgtgtatatgtgtgtgtgtgcttgtatgtgtctgtggtttgtgtgtgtgtgagtgtttctgtatggggtgttcatgtgtatctgtgcatgtgtgtctacgtggggggggtgggtatgggcgtatctgtggggcatatatgtgtgtagggcgtttgcatggtgtgtgtgtctctatctgtggggtgtggggtgtgtgtggggtgtgtgtctgtgtggagtgtgtgtggggtgtgtgtctgtggtgtatgggcgtatctgtggggcatgtatgtgtgtagggcgtgttgcatggtgtgtgtgtctgtgtgggagggtgtgtctctgtggtgtgtgtgtctgtgtggggtgtacgtgtgtctctgtctgtggtgtgtgtgtctgtggggggtgtgtgtgtgtctctgtctgtggtgtgtgtgtctgtgtggggtgtgtgcatgtccgtgtcggttagccgaccctatggcattggctaagattccccagtggcttgtttgggagctgtgtgtgtgtgtgtgtgtgtgtgcgcgcgcacgcgtgtgagtgtgtctgcatgtggggtgtgtacgtgtctgtctgttaaccgattctccggcatcactgagggttccctgcgacgtattcaggagctctgcactcacagagacctcttaggtctgcgtggaccccgagtggctctctggcgggccgtggagaaactggccaccgcccacctgcgcttcgtctccagcgtcagttctctcccgcaggggcttttgctacttcaactccgtggccgtggcagccaagcttctgcagcagaggttgagcgtgagcaagatcctcatcgtggactgggtaagcagagccgccttggccagcgcagctcaggttgctcctttgccgtccccgagcggacagcagcgtgtggacagaggagctgggctcttggatgtgggaagcttaggtttctggaaacggtctcaaagatgcggagaagtaaagccccaaacctgctacaagtcattgtacagcttccgtcagccgaccctggcgaatggggtcctggcgtgtctaaaaatgtgcctgtgggtgacggcagcggccagggccaccctcgacgagatcttcttggaagacaggtgttggggaggaggctgtgtccacatctactttgcgtgtgtggcctgggagcctgggaggaccctcaccctggtcgaaggcggcagtctgcttctcagtcaccccagtgaagcccgtgccttcctgctgctgtgtgggcacctggtcctgctggaatggggggtgccactgcccccaaaagagtcatctctttttaaataatgctatatgatgtccgaatctgaattccacgaataggtatactcattcttataccggaaattaatattcaagatattcatcttattactctttttaaagccagatatatacatatttagtgttctctttggtatttatgatttatttcataatttttaagggaaaaaagcaggccctgtcaggtagggttatgatttgaattggagaagtccttctgagtttgggtaaagaaacaatatggcacagccaggacagccatgctgtttcggagaggcaggtcaggggatgcggcagagcagcgggtcccccacacccaaggacctgcgagccgggagccctccctcagctcctcctaagggagcaggtaggagtgcctgggaagagagcagtgtgaggtcgctgayggctaaagactggggacccatccccaaaagagtgaagcgctaggacacgcagacaggctgygtagacccygtgtggcgtgctccctgcgcgctgagctgtgatattgcccatgtacacaccaygcggacagggtcatctcagtgtgaagccacrtgtcgggaaagcctccatgtgcgtcttcacagcgattacctactctgtggggtggaaggttcttgtccatcgctcctcacctgtagctgcccttccgccttttctgtgatgagcacagataacggagcagcaagttctcgtgctgggaacatcagggctgcatrctgtcttctcaggcacacagctgttctcagcggggccaccccctcgcccgcccatcctggtgaccacctgccctgtggcccggggcagaacagccacggtcagtaaagccccaggctgcctgtgctctctgctgcatctgacctgtgggttttgtgattaagaaacggtgcttgccatttgggcacaggggcctggaccccgtactgtgtgtgcctgtcactcacggacacctgggacttgtctcctgccgaacgccctgcctggcatggaattggcacctcccacgtgcctgcaagcgggcaggccacagccagtgacctccttcctgacagaggctgaggaagtggctcacttgtcagagacacggcaggtgtaggaaattgatcagatggcttcrtctgggaaatggtggcctctaggcctggctgaactccagccccatcsgctgctggagtcaggattgtgccatggcgctaagggcgagggaaacagtgctgcagacgcgaacattggcccttagaacccctgcgaccctgcaccacgtagccctgacccacacagccccagaatcgcgcctgccgggtacgggcccagctggagggtaatgtcattcctgagcaggagccgttgtcactaagcacaactggggttggggacggccctcaggggaggccaccctccaatacctgcctcagccctgaagtagttgtccctgctctttaaggacgtgcaccatggaaacgggacccagcaggctttctacagcgacccyagcgtcctgtacatgtccctccaccgctacgacgatgggaacttcttcccaggcagcggggctcctgatgaggtaggtggggtatataagggcctctggggggaaagggggactgcggggagccgctgtgggggcacggggcagacggtccacagctgcccggcagcagtgagtgcggccttcgtgctcacttaagcccagacagtaacttcagtcagacgtcagcctgcatcgtatcgcgtgtgcacaggtggcctgtgttttgtctgaagtacaaatgagaggctggatattgtttctggttcccatccaggcagacagaggtgtttgtgaaggaggaggtgtgtggtgcccgttttcctccgggcagggcccaggccactgtcttccacaggacaccctccrrcaaggggctctgtccactgtcctttgcccggcgcggggctgcatggcggccccaggaacggcaggcccagcggctccttgacaacgccccaggtccccgttcagagcctgcccactctgaacagaggctccaacagcagggctttcatccaggaagacgctccgtctgcctctggatattatttttttagaggaagtaggaaatgacaggctcatcggagacactttctgcccagagagacccaggtctgattccctgatgtaacacacggcacacaacacagggcggcgggtccgcagaaatgtcagtgcagggccttggtgtgccaagggcagggtcggcgagagcctacagcagccaggaaaagggcccccttgctgatgtcagtgtgcccctgtcagtggggccccttcacrcgcgtcttaatgaatatgcaccaggagatcaggacacgtgggctctccccaggggcccaccaaggccgagcccatcccggtgccacctgcatcaggcgttcctgtcagacaggtcccgctcggggtccatgacgtgtgtttctctccttctggccacaggtgggcacagggcccggcgtgggtttcaacgtcaacatggctttcaccggcggcctggacccccccatgggagacgctgagtacttggcggccttcaggtgagcctcccggcttcacatgacacctgaagtagcagcttttcctctgtgcacacattccaggaagcacttgttggagatgagcgtgtctgaaactggtctgtggctgaacggggctgtggggtccggaggagctgtctcagttcattcttcagtgccargcgtggaatcttggcgactatcttcttaccatcagctcttagtgctcccttttgtgcatgaaataaaaccaggagctcactttgggtcgatggtgagagagtgatggagacagaggcagggacttttgtgcagagtgttatgttcatgagaaacgaaggcaaagacctgcagggtctcatgatctcctaattcttcttccgcaaacctcctgtgatgtgatgtccaatggaaataagtatttcttctttatttattcctaaaaatcaaaggcagttgtcgccctccctcccatttccttcgtgtggctgtgacccttcagcatttagccgcagggcgccgtttaragacgcagtgtttgcttttgtcatcaagcggttccttctcctttggtctaggccagattggggtcattcctgtgacccaaaatgggatgctgagcagcgcaggttttcttgtcatcgttttaaaatggcagcttcacctgccgtggtggagtgacgggcgtccagggcagcagcccacagcccacatcggttcccagagccacgtgaggagaagggttttattagcgtggctgagcctgacatgccgtgtctctgttagaaaacgctgtcagtatggtgtcaaagccccatacagtcttcagcgcttttctctttctctgtctccatggtcttgttctgatttacatacatataaaacgcacgtgtgcagacgtgtctttgtgacgtgtgtgcatgtgtctgtgtatggatgtgagtgcacgtctgcatatgtgtgtgtccacgtgcgtgtgtgtgtttgtgtgggtcggtgttcatctgtgtgtgtgtgtctgtgtgggtgggtgttcgttcatctgtgtgtgtgtctgtgtgggtgggtgttcatctgtgtgcatgtctctcagtgcttgtgcaggtgtctacagccatgtgcatgtctgcaggtgtgtgtccatgcctatgtgtgttacacacatctgtgtgggtgtggatgcatgtctgtgtgcatgcagtatacgtgtgtgtgcatatctctgaggacacacccatgtgcttgtctttgcatgcacatgtctttgtgtgtatatcgctgtgtgtgcacatctgtatatgagtacacacgtgtgcttgtgtgtctttgcatgcacgtctttgtgtgtatatctctgtgtgtgtgtgcacatctgtatatgagtacacacacgtgtgcttgtgtgtctttgcatgcacatgtcttcgtgtgcacctgagtatgcacgtctccggcaggtgaggcccttcacaaggacaygtgtaaacgtcttgtgtggactctaccacatgctttctggggacggtgaataagtcacgagacccctctcagtgtctgctcactcttctctaactggggtccgttgccctccttggaaaggttgttgagatctggtaacataaaggccctggcccaggacacgtgggcccccctccccaggcactcagtggttcccagagggaacagaccccatctgacggagcccaggctgcttggctgctccggcagtgagcccgggctgtgccggtgggagttcatctgctcctcagtggacctgccctgatctgtacctgaaccacttttcccctgatctcatcggtttgattttgatgtttcttcttactcttgatcagatttaatgtaatgttgacagatgccctgcctaatttaagagagaaggacgtcccccaatgtgtaccacttccgaaaatgagctcatatgaaatcggacccctggcgtgggcgtgtcaccatctgctcatggaatgtgctcccgttgcccctcacttagttgtcaccccagagaactggccccccttggaggcttctctgaaagcaaagtctctggccaccataagaggtgtgcatgctgcctgatggacttcctgcctgagtgaacactggtgccacccgggggacccagggcccactgtggccaaattcccgtgcagagagagaaggcagggctttcctggtggacggggagaaagggggtgctgccctctttcaggtcagtggtcccaggccaggttttgatggagccaccctcaccccataggcgtttctcagtgktgccttcggctcttgggtcctggggtgaaaccctcaccccgtggcatccctgctggcgggcaagcccaggcccaaagcagcaatgggcgtctgccgtcagggtcactccccctccccaggccccggccggcccagccagcctttaggatgaacgtgcctttctgagttgctcttggcgtgtgctttaatctcctgccaagtgtgtccgtgataataccttatcaagtgaactttttaaagcttaaatagcatctttgaaaaggaaaattgtttcagggttttttttttattgattttaatgtaaaatagcactttgaagtttacaatttatggttccctgggcatccgatgatggggaagaagggtcagaaattggttttcccctttcttctgctcttctcccccacsggggccccccggggacaatgcatgccttccaggcagcaccttgttattcagacccgttgcctgccacattgcattttcaggggatcaagcctaagacgaagaaaagataagaaaattgcccctaatgaaatccagaagcagccggcactttctcctcaggcccggagactcgtaggagaaaagggaaccttaattcaaaccagtcccggtgccagacgcggctttgaagttgctgagtaaagtctgagccgctgggggtgggggcttgtagggagatgacgatgacgatgaagatggtgctctgtaacccatccctcacctgtgcgcggggacatggggactcttccgtcagggatgagcgccacatccagatgcccgtggttcgtagcttagattccactgtgatattacgaagtttatcaaagatgtctctgaaactggatcttctcaagcaataactgtgatagcttcacgaattggcattagccttgaaattgagcaactgggcaaagctatttcactttccccaaactttcaagtaagacgggaaggctgaggctcttgaatgttcgttccttccgtaagctgtgttgctgtgttgctgctgttgctgccttttgtagacaggtgtgttttaggagtcgcrgcgcctgatgtctgctgttttcaccattgctgagtggcacccgctgcacacaccacgctggtccctgggtttcttgcctgaggaagtcagggttatgaagttttcatacagaccgtgccaccttcttttctaaaagcaattatgtctctttaagtgcatccaagtattttcctatgtagaaatttatctgagaagcaaaaagaagcaaaagcatataagctacagcctcagagctgagagagctcgtcctgcgccagccttcgctcgcctgtggggccggccctgtaagaagcgaacagtggagccggcacagtgcctgccctggaggatagcgggggactgggaggacaagctctaggcaggcccggtaagacctcaggggacctgcccacttggtggggccaaggaagtttctggaggaggcaagcccccagctgagtcctggaagaacgagcctggcacgggacattatgggagaagggccgtcccgaaggaacagagcccgatggtgcaaacccgctcacctgggctgcatccacagagccagaccttggccctgatggcaggggctctatcggggcctctgactgtggaatgaagaagcatcacggccagctctgcatgttggacaggcccgtcttgtggcagcttaggtgacagacttggacctggcaaagagcattccagggtaggatctgggggccagtggacaagcccagaaaacagcggcagagattgggacagggccacaggctggtgaggtggggccatctcaaagaggttgaagtgagatgggattgaggggagtaggggctgattttgggggagagggcacttggtgaggtctcgaggtgctggcttagaggaggctgaagggtgctgggcagagatccagcgggagaaggttcagrtgggggtggatgagggttcagtggggacgcttttgcttcagtctgttttcaggaaaaagtgagaaagtgtccatccaagtgggtggttgggagcatctccacctggaggccccttagtagggagagccagtgaggagccagtttgtgtggacgatgccccagggcatttattggggcagaacggcagccagaaactcaagcatggcgtgccagccctgagcccagttcccacggagtccccagaggcttgccggctgtgggtggccacaggactgcagcctcttggccccataagctcggtttgctctgaggcttgtgttgacrgaaggtgtggtgagttttgtttagggtcctactaggggaatgaactggaaggtcatttctttccagatgttgaaacccagctgttaagtgaattattgcatttagatgcagttgtggcttttgaggatggtatgtacaggccataatttgatggtatgtggtggtttagagctagacgtgccccgtgacacagccccttgcgcagagcacagctgggaggctgcacgagcgatggcctttcsaggaagcagagtggccggcaccctgcctgctgtcccggtccagctctgttccccctgggaagccgaggggcgtggccaacacccgcctgctgttccaacccaacccagctctgttcccctgggaagcccaggagagtggcccggcacccgcctgctactgctatcccggcccagctttgtttccccggaagctgaggggagtggctggcacccgcctgctactgctatcctggcccagctttgtctcccaggaagccaaggagagttcgctggcackcgcctgctactgctatcccagcccagctctgtttcccaggaagctgaggggagtggctggcacccgcctgctgtcccaacccagctctgtctccctgggaagccgaggaaagtggccagcacccacctgctatcccggcccagctttgtttcccgggaaaccaaggggagtggctggcacctgtctgctgtcccagcccagctytattccctgggaagctgaggggagatgtcgtcttcaggctgcaggtgcaggttggctgatgaccgagtgaagggtgcagtgctgtgtcggtaacgaaggtgccagagaagccacattgaggccacgggaaggggatgcgtggcaccccacggcttcacacgggacctccctaaatgcagaggccaccgcgaggagaagccgctctctccccttagcaccacgtttccctctgtacgtgcctcacgggcacaggcaccctctgggcaccacagtcatggcttccctgggcttgccggccccaggggtgcaccttacaggcatttgtccaccttctctaaagatcccctctttccacccatttctcctgcctcttgagctgacgatcagtggacgatcagtgggcctactgccttgggaaactgcgagcccacccctctctcccctcaggttgccccaagaaaggccaaaagtgacctcatggaaatactctccttaaagtgatggcttgagaggcccacggcaaacatctcaatcttatttttttagagactgagttctttttttttttttttttttttttttttttgagacggagtctcattctgtcgcccaggctggagtgcagtggcgcgatctcggctcactgcaagctcctcctcccaggttcatgccattctcctgcctcagcttcctgagtagctgggactacaggcacccgccaccacgcccagctaactttttgtattttttagtagagaccgggtttcaccgtgttagccaggatggtctcgatctcctgacctcatgatccgcctgcctcggcctcccaaagtgctgggattacatgtgtgagccaccgtgcccggccgagactgagttctttattaaaagtttaattctgggaataaaatgtgagtccagtttcccattttttgcagcatctattaaacagggacattccttcagcttcctcttgtaggaaagtcgtggagggtaagcacagtcctgaagacacagggagtgccatgctcagcttcctttttacaggcaaagaagtcatgtcccatggaggagaagggacgtttcttagtcgcgccacaaacgggtgctgaaggtgcactcatgcacctcacgttctgaccttcttatgtctagcaggtgtttgggatcacaacctagagggtgttgagcccagtaaaatgaaaatgagtgtgtgggcacgtgcatccgactgtgccccacgcagcctcacgtgtggccgacgtgccagtgcccacgagcctgggctcatctttcccattttgttttgactggctttgaggcaacaccacacaccaagcctagacagcagagactctcttggtatgaacttcatttaacggcgattttcacaggacttctttttggagggggattagaagtaaaatagctcagcagcacttcaaagtggggaagtaaagcctccacgtgcgctcgctgcaaagcagcagtcagagtgcctcgccaaggacacagcgtccacacaaaacgcctgtggttctcattgaaaaaggtcttggctttaaaatccacaccaaaagcatggctggaaatgtgtttttctgtccaaagaaaaaggttttatgacaagaactttattaaaataattagaagcgagtctccttgggatgatgtggacagttgaaagcagagggcggccccctcagtcctgcggcccccctcagtcctgtggccccctcagtcctgcttccccactcagtcctgctgcccccctcagtcctgctgctcccctcagtcctgctgcccccctcagtcctgcggccccctcagtcctgcggcccccctcagtcctgctgcccattaggttggtcagagccatggaggaagcctcggaatgtcggtcagaaaggactgtggggccagtgccttccagtgtccagggcagggccctgggtccagcaagagtcaaaggactcctggattccaaggcattctctccatcctgccactgactagactgatttctcccctcccagccctgcggcgggagtgccgacaccaactccacgcacgctctgaggccagtgcggtgtttcctgtgttgtacaccatgtttgcgaaatcgccatgctttgtggtggggtcccagtaggtgagaagaaacctctcactctgggaccagaatcatgcatggaagaatgttacagaagttgtatggacaggaccagagcagaggtttgggcaactccagctggtgggccaagtcctgccgcctgtgctcttggcacagtgttatcagagcacagggacgctcgcacgccgatgcactgtctgtcctgtcttgggcaccacaagggcagcatcacgtggtcctggcagagaccgtgtggcccacagactgaggtcaggtgcctcctatctgacccgtggcaggaagctcgctgcccctgtctagattcaccttgtttcctcagcccctaacgatggccctcggggcacagctcctgtgtccttggaaagcactttctacagctgccgcagaggcaggtctaggggaaattgtgtggactggctctcttcagaaaaaagaacagaagcagactgctcagaagccacccagggtctcctgtgactcccatctaagttccagaagtgagtttcttggcgggcaaggtgcctaggtgtggatttgacgcatgtttggagggcagagtttgtcagcactgacttgaacaggctgaagccacacagtcccacgcatcactcttctcccgtctgagcttgctcatgggacgcggggcaccaggatcaggcaccgcgtgctcccagcattgagatgggccctcccgttgcctcagcgtccctgatgggactcatgactgctggccctctagagagtagcccgcgggatcttcacctggtgtttaagcccttgggggttgtgtccctccaccaccagaaatcagaggaacttttcaataagattctgatctgcggtcatccccgaaaaggggtcacattgaattttcagcatttttgtttcttctggtcaaagttgatactttcagtgacatcagtggggaatttcatttgtaataaaagctgaatgaaaaagttttagggccagccctgctgccgtctgccgtgatgtttctggaaggtccttggtggtgggaagggacactgggcccggtgagtgcatttttggctgcccccagggaggggcctctgaaaatccatatgaagggaggcgcccatcgggtgatgcacttggcccacacgcgtgtgctggggaggccgtggggacacagaagtgtgcttcggtgcaggacaggctgggctgagcagctccaggaagtaggcggtggtgaaaccctaaaacatggacctactcacacaagggcttggtgaggggacccccagagctcacagcacaagtgggaatcgtgcaaactaggcttcatggtggaaataccaggagacttttaaaagttcgtagaaaatgcatattttgaaaaaaactgcatgggtttcaaaatgtttctgcaccaaaataaattcgcactaacgtgttatatctggacaggatctagtttgaggcaccaaggataaaacgtcagtttgaaaagagcccttctcagagcaacgtgaattctgctaaaactgaagccagaacaaacagcaagtttacagtgaagcttgggtaggaagagtggtgaaatcattgatactttatgaaaagtttatggggacaatgccccaaagaaatcagcagtttacaaatggatgactcattttaagaaggaatgtgcaatggtgttgaagatgaagcccccagctgcagaccatccacatcaatttgtgaggaaaaaattcatccagttcatgccctaattgtagaggacccacaattaacagcagaagcaacagttgacaccatgggcgtctcaaccggctcagcttacacaactctgcctgcagaattaaagttgagcagactttccagtcagtgggcaccaaaaccacagcrtccagatcagctgccgacaggagcagagctttcggtggaaatgttcaacaggtggactcagggtcctgagtgtcataacaggagatggagcacggctttcccaggaccatcctgaagacaaggcacaaccacagcaccggctaccgagagccagaggtggcccagtcacagcagtagcaggctggtcaagcaggagtaaaggtcatgacagcaggtttggggaatgcccaaggcatgttgcctgttctggaggaccaaagaatgataacacctgcttattgtgagagtgttttgagaaagttcctcagcactttcacagaaaatcactgggagagtttcccccgagagtctttttttgttttctgaggtggagttttgctcttatcagccaggccggagttcagtggcatgatcttgactcactgcaacctctgcctcctgggttcaagcgattctctcacgtcagcctcccgagtagctgggattataggtgcatgccaccacacccggatttttgtatttttagtggagatggggtttcaccatgttggccaggctggtctcaaactcctgacctcaggtgatctgcccacctcagcctcccaaagtgctgggattactggcgtgagccaccgtgcccagcacccctccctccgccgccaccaagagtcctccacaacaatgcttctgctcactccattaaactagaaaacctttgcaagagctttgaagagaaaccattaggcatccaccttccagtcctgagttggctgcttcttctttcctaatcttagaaaaacctgtaaagggcacttatttttcttcatttaatgtaaaaaaaaaaaaaaaaaacaacagagactgcattgacatggttagattcccaggacactcagtcctttcgggagggactaaatggctgcggtcaccattgcaaaagtgtcttggacttgatggagcttgagaaataaagtttatattttttatcttttaattcaatttttccacgaactttttgaagcccctttttaaaggctccacttctgttccaccgtcctcacctgcacaggccccttgcacctgggccgtcattgcaggaagacaccagaccacctgtctcatgaggtccttgctgtccgccaggaaagggaggccctgattctgctcccctcacccacagagggagtgaaggagactttgaaagtcagtggtggtgattaactcaggatcgaaggcggcagcytaaaggagacatgaaactgctgaacttccctactcacggagagcacacatatggattcatagcatacgcatggattcatagcacacactgataagatcattagactaaagactgataagttcttttgtgttaaggagtgctttttcccctttccaaatagaatactttccttatttccctaatataatttaaagaatttctcagtggttctgtcttttccagtgaattctcttacatttgtcatcagttttccctttaaagattcttaagtgtcttgtgttgtaattcccttacacctgtgtgtgttggtgttccagggtgagtaaggaacacgtgggctcccccagcagggctggcaagggctctccgccctctcggccacactcagtcccagcactaggggcagtgggtgactgcacgtgtcttcagtgggagctgtggaaagtgcattgtcgcagcaagagcagcctgatggggcgagtggagctgacccagtctcagaagagaggatgggcagggaggaccaggacagagaggacgggacagggccagggtgggtgggcacggggccaaggaggggtgttagtgggacagggagctggcttcactcccccaggttaatgcagcttgtcccatgggggttacagaaattatacagaaaacagcataccaagaaacagcaatgctctcactctcactaagcaagtgcagtggggcttgctggcttgcaccgtgactccctctcaccaagcaagtgymgtggggcttgctggcttgcaccgtgactccctctcaccmagcaagtgcagtggggcttgctggcttgcaccgtgactcmctctcaccaagcaagtgcagtggggcttgctggcttgcaccgtgactcmctctcaccaagcaagtgcagtggggcttgctggcttgcaccgtgactccctctcaccaagcaagtgcagtggggcttgctggcttgcaccgtgactccctctcaccaagcaagtgcagtggggcttgctggcttgcaccgtgactccctctcaccaagcaagtgcagtggggcttgctggcttgcaccgtgactccctctcaccaagcaagtgcagtggggcttgctggcttgcaccgtgactccctctcaccaagcaagtgcagtggggcttgctggcttgcaccgtgactccctctcaccaagcaagtgcagtggggcttgctggcttgcaccgtgactccctctcaccaagcaagtgcagtggggcttgctggcttgcaccgtgactccctctcaccaagcragtgtcgtggggcttgctggcttgcactgtgaagatgtgaaatgagcctggatcacacgtgggttgattcccttctaattaagcgtggtcgccagattccagcctgctgtgtggagccctcagcccrccagtggccgagggggtgcggggcaggcattatcaatgccagagggaaccttggggttttgtgaccgtcccgtccctctttcagctgacccagtaacgccttctcctgtcctttgcagaacggtggtcatgccgatcgccagcgagtttgccccggatgtggtgctggtgtcatcaggcttcgatgccgtggagggccaccccacccctcttgggggctacaacctctccgccagatgtaagtggttctgcatatgactgaggagccggttctgctcatgtccatgatccgctgtgttccgcgtgtcaggtcccctttttaataacgagataaggaagggcacctttttactaatgaccaaggttctgaccgtactgggaaccagtccatttgggaggccccagagagcccagagcaggcagcgggagctcagacccaggcacctcgggcactctttgcccaggaagggcctagggcacacgaggctccctctctgggatgcgggtgcctagggacctgcaggccacctccaggggcaggtcctggtcccaccaagagctgagatgtgccccatgccrcttctctggcaggcggtgctccttggaactgtaaagggaagttgctgggggcacagttgagttcagagttggatgagggagcccaggatgtgtgtgtcctctcaggatcagcgttaggggccatgctgtcaggatgggaggagggactgcccagcagtgctcctgctgtgcctcagcaactcacaaggagatgaaaacctggcgcacacaaaggcctggccgcctcccccaccctggagtccccgaggatcctggagagcctcccgaggcccaagcatcctgtggccttggtcctagccctggtgatgccctcaaggccccagcgtccacagtgtatggccctccccactcctgtcggcacaggcggccaaggaggggcccgtctctcaggtccttgcgtggggagggtgtggctcacccaggagacctgaggcagccctcggtggctgtgctcccctggggcctcccacagtccaccaggccgtgcagcctagtggccagcaaagtgaccagacagagggcaaagagcttccactgtgcccaacgccccacagcacccggcccggagcaccgcggccaccacatcctcagcttcctcctcagtccgcacagctgcctcgaagcccctgtcactgtttccatcagatgggatgaaccgaggctttgggaagttacggcctcgccagcccatgatcggggccactaattagcggcgcgtggttccgggctctctaatcagcaccggcctggcctggctgagggtggtgattaccctcatccaccaggcattccctcctggggtgagtgatgtgggtgcagtggcgggactgtggctcttgatcaaagccaaacgctcagacctggacgtgggagaacgcttcaggagcacatgcagcctgtgcacatgtgtacacatacatgtttggagcatgtcagataaccagagcccgctgggccacggccacaagagcatggccatagcccctctgcgggggccgaagggcaggtggcctgcagcctctgggtggggctggctgccctcgtcccctaaagcagatgatttgctgattaaaaatcaaagcattgaagccataattcctcctctcaaacagatcaaagaggaaatccaaagccgaaactcttcagcgaatttattaaacgaaacccggcctggccatgtgtctcgacaccccagcccccagtcttcttacgatgccatgagacgcgtttctgggctgtgctggctgcggtcctcccccgttcacactgcagtctcccgtttcccgttgcaggcttcgggtacctgacgaagcagctgatgggcctggctggyggccggattgtcctggccctcgagggaggccacgacctgaccgccatttgcgacgcctcggaagcatgtgtttctgccttgctgggaaacgaggtaggaagaccccagagaccccacaggatgctccacactgacaggctcggggttgtggcctggctgcccgagagccccagagcatgaaaaagccagtgggtctctgaccacgtggatgcttgcagctccgccttgcacctgccccccacccccgcatagctctaaatgtggcagaaccgtgacgatggctggaagaggtgcagggggcaggactggaaggagccctcttgtcgtgagaagatggctcagggtcctctgcggtgcgactgcaccctttcagttcagggtccctctctccattacgtggagcacactgtgaccagaggttttctttttctttctctcttcgtttcctctgtggacagtcagcttctctagggagtcctcatgtgggtttcggtcagtggccccaaggcaggctggggctcttctgcccagcaggcctgtctgctgctctgagcccccagggacagggctccctgctgtgtccctaccaacaccgccggagggagtcagagacgctgtggtctgtacagctggcctctgagacctgggcagagaaaaagaatgttccacgggctcggggtgagagcgccacctgcagcgttccattccagcatgacgctggggcccgggcctccctkctcccagcagggcctccaccaggcgtgggccagtgagatgggaggaggaggcagtgccacagctaccaatgtcatatccacctccaagagtgtctgaagtgtgtgacacaaagtggaggggtacctttcattctgagtttcccacacctgctcttcctgagcctctgaacccgtctacagggttttgggtgtgagtccagatccccaagacacgactcagtcggtggcttccccacgcagagctctgcctggctgcctgcgctgggtgtccagtgcaggtccggagaacagccagctggcacgtgggggactcaagggccatgtgtccagatcacttgaccacaggaagcggagggcagggcagtgcctgaggctccagcacaccagatgcagaggccttgccagggggcagggtgggagtctgcctcctgtgccctctgggactgccctccccagcccggcagtcctgaggacagtctcagtagagtcggggtgacagggcactttagtgggggtgtcctggtgctcagcggtttgcaggaaacctgcattttcacccccatttgatgctcagcccccactctgggggacttctctggaagcagcatcctcattttcagctcaaggaaaaggcagcactctaccatccgacctcacctgtctttacaaaaaaatctccccagtcccttatgtttggggaaccagtgggacagcagctcagatgccctcgggtcagtgctggcttttgcctgcctgtgggtgctccagaccaaggtgctggtcccaggccctctgttcaccagacaggcggtcacacacttacaggtgccttgcacgcccctgggttctggtgtctgatggctcttactgacaggcgctctggcctggcattgtggggcgggcagagggatggcagggactgcagccatcccaggacactctgtgcaagcctcccccgatggaaagctggccctgctcactccaggacggtccgggtgccgtgcaactaagggcagcgcccagaggcactcgaggtcacgagcggtggggaaacgtcaggccgcacaggaggccacggacccctgtagttaagcacggcgctcgcggggtctggtgtgcaggcatcgttcgcattgttctggaaaatgcagagggagggtccactctctggcccactgtctgtgagtggcctcagcatgcgcagtgggcctcgaggtggccagcacacagggcacctcgcagaggacgcctcctgcacatgggcgtgggtgctggaattctcattgtgagcgttagaacaaaagggtgtcttcttcccagtgcaaaccccattatgagaggaaccccactggtcacagccagttcccacctccaccacctctgccgtctgtccctgggaagcaggttgctttccaaacggttggtaactcgctgctaactgggtgctgctttagccgaggaagccgtacgttcctgacctgggtctgctcttgagagcagggtcttattgtgagcagtcaagacccccacctttctagggccccaggccgccacagcaccagaaccttcctccctccccttctgttgaggccgatgtgaggggcagcatcagagacggcggaggtgggacctgggactgcaggtcccgcctccagccaggggcactccagtcaggggtctccccctgcgccagaagtgggagcagcacagggcatcctccgggcccctcccccgcccccagcagggctgctgccatggctttcccagaaaggccagcactgtaatcctaaattttgaaagattcactctgagacaaacctgctttattttccaggaaaggtctcattcagacacaggcctgaaggccaagcacaccagcaatatctccaggtgacacaaactgcccggcacagcaaggggagcttttccaggccagggaagccagggcggtgcgcgtcagctgtgtgttcctccagcccttgccattagagggagaggggcagcttccttagaacctacgaggctccgtctctctgcagtgactcctgatctaagggccgtgggtgaggcctgcagatgatcggcagggctcagtgccttgccccggtgaccatgcgcagccgctgagggaggcccaggaccggcagcgctgagcctcggctcacccaaaggctgccatggggcccatggggccttgacccagacttgggaagccagggagctggcggtcagggaagtgggcactggccagtggtctcccagacaggagggaggttcggtggcttgaagaagtagaggacgccaagggcagggtgaccctgggggtcagtgagagcccagaagtgcaggcacctcacgggaggacagttgggctctcgcaggtgtgggggaggctgggctggccaagccaagagcacgaggcagaaggggaaaggggagagagggacgcatggccaggcctgaggtggtctgttgggccccactgaaacccctggatcttctgaggggtgggcgcatacgtccccttgcacacctccgccgacagctgacagtgctgccttaaagaccagggctggccgggcgcagtggctcacgcctgtaatcccagcactttgggaggccgaggcgggcggatcacgaggtcaggagatcgagaccatcctggctaacatggtgaaaccccgtctctactaaaaatacaaaaaaaaaattagtcgggggcagtggcgggcgcctgtagtcccagctactcgggaggctgaggcaggagaatggcgtgaacccgggaggcggagcctgcagtgagccgagatcgcgccaccacactccagcctgggcgagagagcgagactccgcctaaaaaaaaaaacaaaaaaagactgcagggccacggcccggcttgggaggatgggggatgggaacggttccatgacccactacagagcaagacccctgggtgcgtgaccccgggacagcagacctggagtatgcgagaccccatgtgtgccaagccccaagggcacaagacttagccggaggagcgacagcaggcaatggccaaggtcagggccttggcggggtcaggaccttgcatcgccaaggggagccccttgggacctgcagcctgggccatcgcaggggcctgcgccagccagaggggtgccgagaggggacatgggcagtggctgcaggtaccaggacacgccctgccttctggccatctttgctggtcagggatggtgttcatgttaacataaatcacaagtagatcaaagatccaggtggcatccctgcagcgggtgagctggccagcgacaggctggataaaagaccgggctgctgtttaaaatgtccaaagcactttacaggtcctttcttcacatcaaacagtcttttccccctttttgctccagttaaaaggcaactgacgtatatattctaccatcccgaagccttatggttcttctggctagttattttaaataacartagggaacttcgctttcagccgtggcctgttcttgcttcctgatgcgtgtttgcgcttctaacaagaaaatgttcttttacttaaacaygtcaaaaaggaggaagcrctagttttatcaaggtctctttaaaagtctctttaatgcacaagagttggcctgggccccgcccctctgcccggcagcctttgatgaaggttgatatacagtgtgccaggcgatctggcacacacaggcggggccgccagctgtgacggcagtggcctgcggggaccctgttgctgcagaagtggctgagttatagggtgtgcgggacaggaagcgcagaggggccttggcgtccccgctatcagagcgacccctctgtcttcagcgcgtaggtctggaggcctgtgctgttcccagcaaccattttatttaatagtttccatgttcagttatctgcaactgccagtgactatgggcagtgaaaagttccctacgagtgttgcatgttgcagtgtagatgggccgtggagtcgtgtgggcgcagcaccgagtcgggcctccagccaacttccatcaaagaccctgcaccagacggccacggggatctgtggcccaggcccgtgcccccgggaggttaggaaaggaccgtctctcctgtctgagaccatgcccaaagcaggtttttgcttgggccaattttctactttagtcatggggcatttcagggttaaaatgccaccatctcatttaacccactccaggattcgtggaagacattcgtggagcaggagggtggtgtcgtgtggaaaaggttttcccccgggagtttagcttattagttatgtcctgatgctttgtgaaaggtgtggttgtgaaacagctctaacaaagtaacgaaaaccaagtgtgtgtgagggactgagttggattaacctgagagctggctgcctgcttccagtcactcttcctctcacactgacaccccacatggccaccctcttgtacacacacaccacacataggcaccacagtctcacatgcacgtgcatccttgctcatgcacaccacacatgcacacccacgcaagcaccagtcacacgtgcacacacgtgcaccctctcatgcacgcacacaccacacatacgcacacccacacaggcaccagtcacacgtgcacacaccacacaccctcttgtgcatgcacacaccacacacacgcacacccacacaggtaccacagtctcacacatcacatgcaccacacaggtatgccctcttgtgcatgcacacaccacacatctgcacacccacagaagcaccagtctcacatctgcacgtgcatactcatgaatgcaccacacagtctcacgtgcacacacacaccacacacgcacacataccccacaagcacatgctgtcacgcacattcatacacatgaatgcttacacacaccacacactcacactcagtcacactccccccgtgccaacggtgaatgttttatctgcatgcagccgattgtggcgcgcacagggtccacgtcgtgtgtcccgcttgctcctctttccatccgggctgccaaagccttcctggccgactttcagcaagacagagcccagcctcgtggccttcagagttgaaggagctgtggccacacacagcggggccgtccctctgggccctgttacctgggtgttgggatgtaagggacatctcagcgctcccccttccctggggccccctctgtaaaggagcctgcgtgcatcccacacgggcccgggccggggcaggtgcgggctgctccgggtttgcttgtgacagacagagttacgctgaacttccgggcaagtccccaatacacctaggtggccgtgtctccggtaaacgtccaggaggggagatggcccaggatgtgtttgttcacctttaggagataacatcaagcggctttttaagggttaaaactgtcttcagcagtggcgtgaccagacctcagcagcacttggcattgttgcccttgacctttgccagctggacgggggtaaaactggcccctctgcagggctccagggtcccttcctcatgaccgccacggcagagcagccccgcatctgcctattggccacctgggctttccctccttgtgaagttcatgtcaacccgtttttctattggattgtcttttccctatttgttcttagtgskgtgaattagacagatggacagagggagagaaggagagagcggtggtgtgaagcaggttctccacacattggtgaccagcctgtgtgagtccagggagacaacacccacacacacattctgtgcagcagatttactacttacagacaggcagcaggggacggcagaagcccagggcaccatgagccagtcccccaaggctcagaaatgccccagtggatggagtcccatcagtgcgctcctctaggaaacagcctgtcctgaattttgtaccccgagtgccatgtgacacactgagctgaagcactgaagggtgccctgtttccaccggcggaggactgggacagagccaggctggccagcccgtgtccttcacatctcaggctgtgttgcccagcacagtccacggtcactctcgagaactacgagtgtgacggacgtgggtggatccaagggcccccggagagctctcctgcaggctggtgggtgggtccaaggtcccccagaggactgtcctgcaggctggtaggtgggtccaaggccccccagaggactgtcctgcaggctggtggatgggtccaaggcccccaggagagctgtgctccaggctggtgggtggtagctggctccctaggagtgttctccctgtcctctggaggagtggaggtaggatcaggataatctgttccttgactgggagaactctcctaggccgcaggtttactttgggtgaaaattttaaattacagattcagtgactttaatggttataggtctattgaagtttcctattccttcttaattttgagaagttacattttaccagaaatgtctccatttcaaccagaatttcttcagatttcttggcaagagttaagtgtccccagtttcctgcctttcacgtctctgctctgcctgtagccggggccccctttcatccctggggttgtccctgtgtacccccccgaacttgggtttcctccgtcagtcctgccggagcctgtcagtttactcaagcacttccgagaatcagttttcaactgcagcatccttttttcttttcagaatttgtctgctttcccatctatcttctttccttcttgctttaggaccactgtgttctctggctaacttcttacattggatatttatttttagtctttcctgatgtgtgcagttagggctgtaaatggctccaacatggcatccagccgcatctcacatcgtgataggtagcacttttcattactttttaattctcagcatttcctgatgtctgttatgatttcttctttgagccatgagttggtgtgttttctaatttccaaacataaggactcatggttctctttttgctatcaatttctaacaaattgcactgtggtaagaaaaggaagtgtggttggcatttatttttttgtggcgacttgctttacgggccagtgcgtggtcagcctgcagagacattccacatgtgtttgggataatgtgtcctctccgtctgtttcccagagttctgtttgtgttcattaaacagaacttgctaattgtattgttcacgctttggttttcctgaccgacgattgtctgctggatctgagaaagacatggcaaagtctcccacgatggtgggacacacatattcttgtcttctttccattgcacccatttttacttagacattttaaagctgctttactaaatatagacatttgacatcattatgccctttcgtgatgaattgaagtcttatcacaataacctgtatatccagtaatggcctttcccttacatcttttgtgccagatattggagctgtgaccccagctgccctttggccaggtttgcctgcctagcgtcagttttcctttgggacttttagccttcccctgaagtttcagatgtgtctcctataaacagcaaaagcctgggcaatatattattttcacgtcctatcctgtggtctgtgctttaagtggaaacgtgggtcatttgctgttagtttgatcccttttttcagatgccttcttagcatcttattcattgtttgtccccagtttctgtggctctttcctttttctcttttctcgccttctcttggggtaattgagggtttcctgcattccatttgttccctctactgagtccaaagatatgcaacctattttcttgtttttcattcgtcatctttaacaattggagcatgtattgtcaacacagtcagcatcctcactcccacctccatgcaaaccaaagcccggactgggccagccccaattagggtgccagagtagacacagagcacccaggtgggtatccttccactgcaaaactacttgtttatcagacactgaaatttaaccagggccgtgaatggttttgtttgtttttgttttactaaatctggcagccctagcctcagtgccccatcccaggttatatcactgactggtgtttcatttccttctttcttttgtttgatttcactgataagacaccattattattgctctatgtcatccctgttcatccaggctttcctgtacttatgtcattttcttggctcatcattccttctcatttctcacactgtcttctaggattattttcatactgccttaagtataatacatccactagagtgtcccttgggaaaacactcatgtggtcaacttccccagctcgcgtttgtgaggaggcaggtctttatctcacccttgttcttggatgatagtttcactggataaacaattctgggttgacaaggatttgctcttgacacattgattggcttaagattttaagccactgtctgcttgcctccattgctgttaaggagttggtgtgtggctaatggctacctctttgaagattctgttttctctagcagcttttagaattttctttttgtttttgatgttctgcagttttactctgatgtacctaggtgtgcattcctgggtttttttgcccctggcttgggtctcacatcttccatgtcacgttcataaatctctggttgtttcatcatacagaaatgtcatttatttttaatacatactcactatatttactttttataatttataactgatcatttcagtaactgcgatctttaaggatctaatcaattaaaacttattaaaagttaataaactttttatttttggatagtctgagatttacagaaacattgtagagatcgtgtacaagttcctcatatcccccctcagaaaacgtcttctactgtgaacatcttacttcgatatgagtcgtttgtcacaacttagaaaccaatgctggtccatgactattaactccagaatgtatttggatgtcaccagctttaccacaactgccctttctccattttagggtcccgtccaggatcacacgtcacatttagtcatttcgtgtcttttttctcagtctttcatggtttttcaaggagcactggccagagattttgcagactgcccttcagttcatgtttgagtttcttctcctggttctgtgctttggggaggaagatcataggatcgaaatgccattcgcttgtcagatgtgctgccagcacggctcactgaccttgatcatttgctgagagtgatgtttgccgggtccttccaccatcgggttacgcttttaccgcctttccaaatgtattatttggaagaaagtcacagtgcagtgcacactcagggggacagagttggagaggccttaagccccacctcctggagaggggagtagatacgtgcrttatttgaaatgctcaaggagttgtctctgctcccctgtgtgtgtatttcgttatttattcatatcccggtgaactcctgtgtatctgtctttcttacactttgggtcatgcttcaataccacggtgttgattttgctgcccagctggttcctgctctggccctggggcacctttcagactgrccctgcatgtcctgtgatggccccgtcccttgaccttcaggcaygtcctgatttcccagcaccacgaggtgctccaggctctcgtgtcttgtattttccccgccccagccttggaccgagctgttctccaaggagcctgcttcccttcattggagaatgggattgggaacctcgctcatcatccctcctgacccaggctcgtgctgactcacttccgtgttgtttggggtttttgtgtttgggaactcatgcttcctggaagttaaccggctgtgctcatttgaagcctgctgtgggtatgtgtgcctccaaagaggccctgctgtggtttctgcctggcgccctggcctggcggagctgccactgtcgatagtagctgtccactcccagtgtctagaagcaggcaaattctcagggtcactttgtcttttcacctctacccagaagccagagttaaaacccaaacgctccttcccatggcctctgtttgacacgtcgtcgtgcgtctgtcctcgctcacccgtcctgtcctgacagtggtctttccagccccagcaaggctggctccaggacacctggggacatgggtgctttggccttctgactcaggtccagctttgttccagacccagcaggtttcccctggttttgtgggctcttccagttatttaaaggttcttgaactgttgtatttctatatttttataatccatttcaacctttttttttttttttttgagacagggtctcactctgttgcccaggctggagtgcggtggcacaatcttggctcactacagcctccgcctcctggattcaagtgattctcatgcctcagcctcccgagtagctgggactacaggtgcccaccgccatacctggctaagttttgtatttttagtagagacagagtttcaccacgttgcccaggctggtctggaacgcctgacctcaagtgatccacccgcctcggcctcccaaagtactgggattacaggcgtgagccaccacgcccggccagtcaaccatttttaattgttgtgttgcaaatgctttgccctgttgccctgtcattgacttgtaaacttcttccctgcttttatctgctgccagtacttagggaaaaactcggtgtgaaggattccctctgagagatctgactacttcttccatttcatctcccccgaccccaccttccgctgccctggaagaaaaccaagatcaggggatattcagacattcttacttattaataaaagacaaaggaaagaaaagtgatgaagtaagcgtcactccccctcatggaaccctgtggcgtcgatggcagataccaagttcacgtgcaggtgccagccccactcctggggactgtctttcttcctgctacttgtaggaacccacaaatatcttatagcgtcctaaaaaaaaatccacttttacaaaaaaattataaatwccacggcacatttggctttttaaagttatttttttctactctgtgggcaaatgcaccccacaagggtctctgtgctcaggaaacagttgcagtctcggaacacccgtctaacgcacgtgtggattatattggcagtctttatattcttatgcattttcttccagcttgatcctctcccagaaaaggttttacagcaaagacccaatgcaaacgctgtccgttccatggagaaagtcatggagatccacagtaagttgcctggctgggtgctcacaggggacacgcccctgggggtgggactgcaccacaccccatccctgtccccctatacccccagctcttctccatcccactgccggctgcttccccaggcctgcagcagaaggccttgctttcagctgcatttcttgagctggtagagactcacatttaaccccgactggatttcccccggcctgctgggatggttccatcagcccaatttgtaagtctagagaatcaaggcccagacagtctcagtgtggagtcacttgctctaggtccccagctagcagcgggggccatggctgtgagcctgtaccctggggactccggcctcttccctggaccagagaagcccacrtcctgacctcaaagaacccttggccctgcagagaggcagggtgtaggccctctgagttctggcaccgaccctcaagcagcaggtcctgggtgcaagggcgtggcacgcagcctatctcagaggcgcctcccacaccctgtcattgtcgcaagcccagcttgtcttgcctttgagatgacccagatggttgagactgtccacagaagcaggggtagtccagagctcagctccccgtttccctgtgtgagggagtcctggcttcagagccctgaagctgaccctgggccaggcccagccctccacatacacccccttgcgcctgacgcagtacccctccacccccagcctctgtgagggcccaggcagaagacccctcagccccagcgacaatcccccagctcacctgctcccagagataggaaggctcaacccagcaggctggcagccccctgccctggccacccagggcagaaaggggcccgtgagcgtggaaagccaggcctacaggagcctccctctgcagtcctaggtgggcctgctcctggagggactcgagccactcacaatggggaaacatttccagagattttttgggtctttgtgagtttgtagccatgcagtcttctgcttcgtgtctcttcaaagacgggtgcttttaaaatcataagggatcaatctggtttgaggctcagggtcccgcaggaccttcccgggcctcagtgcatcctgctaagttgtagtcactgagcgactttcctcaccccaccaccccaggcaagtactggcgctgcctgcagcgcacaacctccacagcggggcgttctctgatcgaggctcagacttgcgagaacgaagaagccgagacggtcaccgccatggcctcgctgtccgtgggcgtgaagcccgccgaaaagaggtgagcacctgccctgccgcccgcctgcaggctcacccagccccmctgtgcccactgacacactattcagggtcagaacctttatggcacatgccctgcccaacagactagagacaggccagtgtggccccctccttccagtgccaaagccccttagagacgcatgaggagcattagatcctgaacagatggacccggggctgccaggccagggctaggctggcrggtggggcagcacacagcctttaacccacgttctgttctctcctctctgtggtgcacctgccccacgcccccatctccttctcttgcgggatccacagaccagatgaggagcccatggaagaggagccgcccctgtagcactccctcgaagctgctgttctcttgtctgtctgtctctgtcttgaagctcagccaagaaactttcccgtgtcaygcctgcgtcccaccgtggggctctcttggagcacccagggacacccagcgtgcaacagccacgggaagcctttctgccgcccaggcccacaggtctcgagacgcacatgcacgcctgggcgtggcagcctcacagggaacacgggacagacgccggcgacgcgcagacacacggacacgcggaagccaagcacactctggcgggtcccgcaagggacgccgtggaagaaaggagcctgtggcaacaggcggccgagctgccgaattcagttgacacgaggcacagaaaacaaatatcaaagatctaataatacaaaacaaacttgattaaaactggtgcttaaagtttattacccacaactccacagtctctgtgtaaaccactcgactcatcttgtagcttatttttttttaaagaggacgttttctacggctgtggcccgcctctgtgaaccatagcggtgtgcggcggggggtctgcacccgggtgggggacagagggacctttaaagaaaacaaaactggacagaaacaggaatgtgagctgggggagctggcttgagtttctcaaaagccatcggaagatgcgagtttgtgcctttttttttattgctctggtggatttttgtggctgggttttctgaagtctgaggaacaatgccttaagaaaaaacaaacagcaggaatcggtgggacagtttcctgtggccagccgagcctggcagtgctggcaccgcgagctggcctgaygcctcaagcacgggcaccagccgtcatctccggggccaggggctgcagcccggcggtccctgttttgctttattgctgtttaagaaaaatggaggtagttccaaaaaagtggcaaatcccgttggaggttttgaagtccaacaaattttaaacgaatccaaagtgttctcacacgtcacatacgattgagcatctccatctggtcgtgaagcatgtggtaggcacacttgcagtgttacgatcggaatgctttttattaaaagcaagtagcatgaagtattgcttaaattttaggtataaataaatatatatatgtataatatatattccaatgtattccaagctaagaaacttacttgattcttatgaaatcttgataaaatatttataatgcatttatagaaaaagtatatatatatatataaaatgaatgcagattgcgaaggtccctgcaaatggatggcttgtgaatttgctctcaaggtgcttatggaaagggatcctgattgattgaaattcatgttttctcaagctccagattggctagatttcagatcgccaacacattcgccactgggcaactaccctacaagtttgtactttcattttaattattttctaacagaaccgctcccgtctccaagccttcatgcacatatgtacctaatgagtttttatagcaaagaatataaatttgctgttgatttttgtatgaattttttcacaaaaagatcctgaataagcattgttttatgaattttacatttttcctcaccatttagcaattttctgaatggtaataatgtctaaatctttttcctttctgaattcttgcttgtacatttttttttacctttcaaaggtttttaattatttttgtttttatttttgtacgatgagttttctgcagcgtacagaattgttgctgtcagattctattttcagaaagtgagaggagggaccgtaggtcttttcggagtgacaccaacgattgtgtctttcctggtctgtcctaggagctgtataaagaagcccaggggctctttttaactttcaacactagtagtattacgaggggtggtgtrtttttcccctccgtggcaagggcagggagggttgcttaggatgcccggccaccctgggaggcttgccagatgccgggggcagtcagcattaatgaaactcatgtttaaacttctctgaccacatcgtcaggatagaattctaacttgagttttccaaagaccttttgagcatgtcagcaatgcatggggcacacgtggggctctttacccacttgggtttttccactgcagccacgtggccagccctggattttggagcctgtggctgcaaggaacccagggacccttgttgcctggtgaacctgcagggagggtatgattgcctgaccaggacagccagtctttactctttttctcttcaacagtaactgacagtcacgttttactggtaacttattttccagcacatgaagccaccagtttcattccaaagtgtatattgggttcagacttgggggcagaagttcagacacaccgtgctcaggagggacccagagccgagtttcggagtttggtaaagtttacagggtagcttctgaaattaactcaaacttttgaccaaatgagtgcagattcttggattcacttggtcactgggctgctgatggtcagctctgagacagtggtttgagagcaggcagaacggtcttgggacttgtttgactttcccctccctggtggccactctttgctctgaagcccagattggcaagaggagctggtccattccccattcatggcacagagcagtggcagggcccagctagcaggctcttctggcctccttggcctcattctctgcatagccctctggggatcctgccacctgccctcttaccccgccgtggcttatggggaggaatgcatcatctcactttttttttttaagcagatgatgggataacatggactgctcagtggccaggttatcagtggggggacttaattctaatctcattcaaatggagacgccctctgcaaaggcctggcagggggaggcaygtttcatctgtcagctcactccagcttcacaaatgtgctgagagcattactgtgtagccttttctttgaagacacactcggctcttctccacagcaagcgtccagggcagatggcagaggatctgcctcggcgtctgcaggcgggaccacgtcagggagggttccttcatgtgttctccctgtgggtccttggacctttagcctttttcttcctttgcaaaggccttgggggcactggctgggagtcagcaagcgagcactttatatccctttgagggaaaccctgatgacgccactgggcctcttggcgtctgccctgccctcgcggcttcccgccgtgccgcagcgtgcccacgtgcccacgccccaccagcaggcggctgtcccggaggccgtggcccgctgggactggccgcccctccccagcgtcccagggctctggttctggagggccactttgtcaaggtgtttcagtttttctttacttcttttgaaaatctgtttgcaaggggaaggaccatttcgtaatggtctgacacaaaagcaagtttgatttttgcagcactagcaatggactttgttgtttttctttttgatcagaacattccttctttactggtcacagccacgtgctcattccattcttctttttgtagactttgggcccacgtgttttatgggcattgatacatatataaatatatagatataaatatatatgaatatatttttttaagtttcctacacctggaggttgcatggactgtacgaccggcatgactttatattgtatacagattttgcacgccaaactcggcagctttggggaagaagaaaaatgcctttctgttcccctctcatgacatttgcagatacaaaagatggaaatttttctgtaaaacaaaaccttgaaggagaggagggcggggaagtttgcgtcttattgaacttattcttaagaaattgtactttttattgtaagaaaaataaaaaggactacttaaacatttgtcatattaagaaaaaaagtttatctagcacttgtgacataccaataatagagtttattgtatttatgtggaaacagtgttttagggaaactactcagaattcacagtgaactgcctgtctctctcgagttgatttggaggaattttgttttgttttgttttgtttgtttccttttatctccttccacgggccaggcgagcgccgcccgccctcactggycttgtgacggtttawtctgattgagaactgggcggactygaaagagtccccttttccgcacagctgtgttgactttttaattacttttaggtgatgtatggctaagatttcactttaagcagtcgtgaactgtgcgagcactgtggtttacaattatactttgcatcgaaaggaaaccatttcttcattgtaacgaagctgagcgkgttcttagctcggcctcactttgtctctggcattgattaaaagtctgctattgaaagaaaaagaaagcgaacagtttttgtttgttttttttgccgtgtgtgctccatagtggaggcgctattttccaattgatgagaatgacaaacatatataatctatctatctatctatctatctatctatctatacagggggcttgaaccttactcacccaagagcttcttacggaatgtggtagaaaaccaagttgtaacgacactgtaacctacctgatgcctgttcgcgcccgccgtgagctgcgcactggccgtggccaccattcacctctgtaatttaatccgtttctcttggattgtctggacgtgcccgatggttctttcttttgctcagtggagttggaggttttgtgtttggttttctcattcttgtcttgttttgtgtgggtggattttcaccgaccaatgatatcstcttctgacggtcaccttctttccacttcactggagtccagtattctgtaccacatcacgcaacgtgttatcttgtggtgtaaataaagactgcgttacttgccctcccagctctggtttctgcccgtgcgctctcttcctcattggctctcgcatgtctgggaccctgtgggccgaatggccagtgccctgggtcccatccggatggctgcatgggaatcactggaccccatggggacggcccctagacccagaccagcggcaggcccgtccccctctgcctgcataatcaggtcccataggagtgtcttcattttaaatgtccagtaatttaaatctttacattatcttctcccccaaaacacttaccaagccatagagagctggaaataatcttggagagaacaaggccaaagagagaggcccagggcccaggcttagccacctgcccacagccgggcaaacacacctctgagactggagtccaaacaccagccacagctcctgaccctcagcagcgccccttcccaggctcccgcatccagtgactaatcagttgggtgccgggcagcgtaagcaccaggccaccttggcccaacttaggacaactcaaggcctgctggcttcccggaargtgcctgagcccctccctaggctgactgccttccctcctcccctgtcacagctgccaacccaaggacacctcaaccaccttgcacactgaagcccacccagtctgcatcccagaaacccagcccacggcacccaggttgcccttgagcccccgaaagaggcctctggagcagagggccctgctggccccaaggcatagccctgtggcaaggggggctcagtcggccccagtataagaagaggtacttggagcctgaagccactgaggctggagtggttttgttattgttactgattcagttggcatgtttactggttatagtatattagttatctattgcttgcaacagattccctcaaaacttagcagcttcaaatagcagacatttattaccttggagtttctgaaggtccggagtctgggtgcatctcagcagggtccctgtctcgtcttccctgggggtccagtcaaatgctcagccagggttcctctgggggcccagctgctgggggaccaggctgggggttggcctccaggcacatgcctgtggctgtaggtggccaccttccctcgcctgatgggcctctccacagggccgcctcgaggccttgccgtcagcgtctcccacagcacgtgatctaggagcaagtggagaatgcaccaggagacacagccagtctttttatagcctcatctccatgggcatagaagccagtgcaggaggccagcccacactcacgggagaggcttcctctgctcaaggcccaaggaccctcaggctcagatcctgcagcgcctccctgggtttgtccatctcatgtgctagagtagaaagttggaagctggtctactcctctagcccaagagatgaagacatcattgctccccaataagcagatggaatgaaggattcctgggttgtcttctccgcccatttgttctccgcccatttgtttcattactggggctgtgaactagaaagctttaaaatctattttgggatgctaatcctttatccaccataaatttctagtatcttctggtctttagattctcctctctctgtctctgaaaaagtcagacacatacaaaaggggactagttctgaggccctgtgtgctcatcaacctgcctcaacagctgtaaacactcccaaatgtgtttagtctaccccctcctcaccacaaacaggagtgttaggaggcagaagcaaatcccagacatcttatcatttcatctgtaaatatctcagtagatttctctcaaagatagactcttttcttagacaacacagtatcttatcatgctgtcaaagtgagcagtttcgtatcatgatcaaatattcagccaatgttgagatttccccattgtttcagattgtcttcaggttttttttgttgctgttttggttttttttgttttgttttgttttggtttggtttttttcttgcaatgtatttgcagaagaaatccggccatttatgcatttgtacatccgctgtgtcctagccctttcctctgacaagtaaaggagggacaggagggtgggcctagagcactggccagttcaggctcacacccctagcaggagcccctcagaggtggggcccactcttcttccacgaggccactgggcccattatttcactgggggtttgaaggcggcaatgctttcttgccatcccattttgacaaatgcaatacttcaacgcgttcacattcaccacaagcaagcaactgttaccaagtttctaggcccaacacctttgtttagaaaaaagtaaacacgtaaaggttagaattacagattgaaaagggtttccactcagcgtcccattgatacgagatcctttagccaataatttatggatggtattattattattattattattttagacagagtctcaccctgtcgcccaggctggagcgcaatggcacagtctcggctcactgcaacctccacctcctgggttcaagtgattctcctgcctcagcctcccgagtagctgggactacaggcgcacgccaccatgctcggcttttttgtatttttagtagagatggtgtttcaccatgttggccaggctggtctcaaactcctgatctcaggtgatctgcccatcttggccccccaaagtgctgggattacaggcatgagccactgcacccagccaaggatggtaatattatatggtactatatatatatgagactttaatataaatatatactatacttatactatatatatgagacttgaataatatatgagacttgaaggtttatttttaaatgcactcaaaatttctatttaaaaggaactctctggccaattaaacttgttgatttgatttcaaatgcaagaacatttctctgatagtgatggaaaataaattcatatgaaaatgtgggaaaaaagaagtgtggcattgtaattcgtgcaagtcttgggatttatgtacaaaaactaaaatgctgcggtgttctcagtttcttaaaagtttttgtctgatatctgagtgtacaaaaaaatggaaattcgggtttgcaagtaaatcgtgctataatttcaacacatgctgtcttttacatcagattctcaggaagcgcaggtcataatgcagcttgggaggacccaggaagtggttccacttaaacttctggggtgcagttgtagggagttgtatgtccctgacacactcttagtttcaatctggatgcagctgctctttgaagtcacactgagtccctaatatgtacttggggcctcagactaatgtgttacagtgttgaagttattagtaaagcccctttggaaagtaaacaactcccagtaatgggcagttagatatatgacaaaatgacagatgatggcaaagctaatgtctgcgtgggtgacacacatctaccgagccaaccacagatattcgcagggccaggggccagggttcaagtggagaccgccatatgcccaagtatgtggacacagatcaagctccaaaagtgttatgcagaaatgtgggctcctcaccaccttgacaaatccacctccctaaagacgcaggaggccaggctggagccgcggctctcagcctcccaggggccctcggcagcctctgccaccgcctctctcttcctactcctgctggggggaccacagcccaccccctgcctagctgcttctcgggccttctcacctggcaccagaacccagaatggctccttaagggttctccccagatgctgcacatagcatttctgcttaagaccccctggggcttgtggccacagcagctgcaagcaaggccaggatgtgcagtcttccacaggtgcccacctgtccaagtggagacagcagctctgctgttacagaagaaagggagggtgggtactgagagacaccagagtctctgccacagaaccaagaacacctgcaaaccttaccaacacatgaggaaccactgtacccaggtacctcacaacccccagggccttcctatgaggtccacactctacctgaaagacatctgtgccagtgggaaggcggagggtcagggatggtgctgcctggactctctgggtaggcacagccaactaatgataccagcaagggtggccggcccttacaaccacattctagccaatcggaggttctcttctttcctagaagcaatcgtgggagccttccccagagaagaaggtggtacacacaggtccaaggtgagtatcatgaccagaaggaagtcaccaaacgatgccagaccaggagctggcactgtgctgtctggctagtgaattactggaggactaaggataaaatttacacaggtaccaggagaattctacaagtaatggctgcgtgcacagctgcgaagctgatgagatgctgttcaagcggaatcactagaaatacaaaaagacatttcgaagagatgttaggccaggcgcatacaggagcatacagcagaaataaaaaataatcacacggatgaacatcgtggattctcctacaagctccaggtgggaagggctgctgaagagggaacggatgaagcgtcacagtgggcagctctctaagcggcgcctctctaacttggtcccagctggcagcgacttggcaggagccaccaggtgtgccgtgcaatggagagctggccagccaaacccagaggccctcatgcctctttagaaaggcaagaagaaactgcagatattccgtatgagtccgttctcacactgctataaagaaatacctgagactgggcaactgataaagagaagatgtttaattggtttacagttccccaggctgtacaggaagcatgaggctggcatctgttcggcctccggggaggcctcaggaaacgtccagttatggcagaaggggaagcaggtacgtcttccatggctggagcaggagcaagagatgggaaaggggccacacactttgaaacagccagatccatgagagctcattcattcactccacagtaccgagcggggatggagctaagccattcacggaactcggcccccgtgatctgatcacctcccaccaggtcccagctccaacactggagatgacaattcaatgtgagatttggcaggggcacagacgcaaaccatattctattcacaaaccagttaccaggaaattcattctaaatctagacttcctctgtattgtaccatcacaaaaccgagttttagtcaaagccaagtttggtgggcaggtggaggaggttcccatgatactaggaagtttgttccagtagtcccaagaaccatgcaaatcaaaaaagctgcgacaggaaaataggtttgttatatcgtctgttttaggaagacgtgtcttcatgcaaagtgtaagctctgcgtgcactggagggtggctccccactgccagtgacagtcatgaagaaggaacatacgattcggggctaacaaactcctc

SEQ ID NO: 95036 - DNA, 75194 bp, Homo sapiens
  misc_feature (1)...(75194): n = A,T,C or G
tatttttagcagagatacggtttcaccatgttggccaggatggtctcgatctcctgaccttatgatccgcccaccttggcctcccaaagtgctgggattacaggcgtgagccactgcacctggcccatattaccttctacattttttaaattttaaaatatttaattgacaaataaaaactgtgtatattcaacatatacaacatgattggatatatattctatactgattaccacagttgaatgaattaacacatctatcaccactcagttatgtgtgtgtgcatgtgtgcatggtgaggacacttaaaatctgctctcttaccaaattataggagacaatatattattaactatagtcactaggctgtatattagatccccagaacatattcatcttacaacttaaagtttgttctttttgactaccatctctccttttcccctccaccacatcccctggcaagcactgttctcctctctgcttctgtgagttttactctttagattctacagataagtaagattatacaatgtttgcctttctgtatttggattatttcacttagtgtatgtaatgtcttccacatttatctatgttgtcacaaatggcagggtttccttcttttttatggctgaataatattccatggtatatataccacattttctttatctattcatctgtcaatggatacttaagttgtcttcataccttggctcttgtgaatattgctgcaatgaacatgagttccacatttttctcgaatctgtttatttctccacatctatgctaactctaccctagtccaagccattgccatctctcacctgggctatttcagtagtatcctagccagttttcctctatcttttgttgctctcctccaacatattcctcaaactttagctaaaacaattattacaaaataatcatgccctttcccatcttgaataattaataccaaagccatgagaagagaggctgagcagtgtcagaacccaaccagtgtgaggagagtgttcatataaggcagtgagggtgagtcactgtgtattggaaccctttgagaatgagatgtgtgtccctgccagagaacagcctggaataggttggaacctgagtggagtaaacagagcatctgctcaggtgagcaatccagtataaggtagcggggcaatcacacaggggatgatggggagcatcagcaatagaagattggttatgtatacatactcattcagtgataacgagaaccagtttccttactgtcagacagaagagctacatttatggaaagaaaaaactaaaataaatctgacacctgtgatattacattgcaattggaaatattggtgtaaactcacagttttatacatatgtaaatgtggaggtgtatatgtgtgagtatgtgtgtatatgtatatacatatacatatattctctacctttgtccaccgagaagacctggaagcaacagcagccccagattatgatgaatgcctaggacctagatcttgccatgtaaataccattcttccaaagaaccaaggcttcttagagaaatggctagtataatggctgagccaggaaaagtcctggatgagcctcgaacatcttattgtgcactaaaataagcatacccaaagaatggtgggattgtcaaaacgacacataagccagcttgaaagaattcccactggtccaatctagaactacttaaacatctaaataaatggtaataatggattttaacccatagaataaaaaatccatgaatgcataataatataaatcaatgaataaattggaagtttgatgaggaatagaatatgttcatagagtctcaaagcacctccaataaaggacttattacaaaaggagaaatgtaacattgccatagaaaagcctctcagacatctctataatgaagccatctaagttaaaactaccaacaatgagacgaatcaaaatttgcagcctgcaatggatagaccatagggtcagttctgttagattcttcccaaatacataacctaaatctaatcgtgaggaaacatcagacaaactgacacagaaagacatctacaaaataattggcctatattcttcacaagtgtcaaagtcttaaaagtcaaggaaaaactgaagaactgtttccaactgagggagcctgaaatatcaggacactaaattgaaacaagtagttgccaggtagatctttgtaccgcaaatatgttattgggacaattggcaagacctaaatggggtctgaggattagatggtaataagatatcagtgttaatttctggattttgatgattgtgttttggttatgaaggagaatgtccttgtttgttaaaaaacataaaccagttttgggagacaacgggacaagaagttaacaacttactcacaaatggttgaggaaacaaaattacttgttctatacatttaacattcttgtaactttgaaattcttttccatttttttctttttttttgagacggagtcttgctctgttgcctaagctggagtgcagtggcctgatctctgctcactgcaagctccgcctctcaggttcatgccattctcctgtctcagcctcctgagtaactgggactacaggagcccaccaccacgcctggctaattttttgtattttttgtagagatggggtttcactgtgttagccaggatggtctcaatctcctgacctcgtgatccgcctgcctcagcctcccaaagtgctgggattacaggtatgagccaccgcgcctggctcagtttttttaaattaaataattcaatactgtaatgacattccgttgtttaaacacttctgtggcttcccattgctcataggaaaaggcccaaactccttaaaataaactacatcttgtccctgtctgcttttacattcccattttgttgactctctccttttggcttgctacattctggtgatctttttgttcctttaacacccatgctcttttgaagtacaagaactatgcacttgctgttcaatctgactataatattgcctaattttttgcccatatatgttaaatttcttcctttttatttttatttttggtgaaacctttggcaaatctttgcccctagagtagctcacaacatcacaacactatgtattcttccttcataattacagatttgtttgaataattgatgtgtcctctattatcctacttactgagggcagagctatgtccttgctcaccacagtaaccctaatgacctagcccagagaacagtagactactttaattaataaattaaatgtgcactttgggaggctgaggtgggcagatcacctgaggtcaggagttcgagaccagcctgaccaatatgatgaaacctcgtctctactaaaaatacaaaaattatttaggtgtggtggcatgtgcctgtaatccccactacttgggaggctgagacaggagaattgcttgaacctgggaagcagagattgcaatgagccaagatcgcaccattgcactccagcctggacaataagaacaaaactccatctcaaaaaatactaaataaataaataaatgaactgtgtaagattatcaatccatctgtgctcttgactccatccctctcatatctgtggcctctttcttttttggcttctactcagcttatgaacttgctcaagcctttccaagcctaaagcatttcctctttggaatccacatcctcttctagttacatgagtttccttcctcttttcacccaaactctgaacagagtatatgtacttgctatttccatttcctcagctcctagccaatctttagtctactacaatctaacttccagccttaccatccaccaaaattgtgcttactaaggtccctataacctcctaattgccagacctaattaacaagttgcagtcagtatcttatctgactcactctaacttccttgatgtttagttccttttgcccatctctgatcatctcttttttacatcctgtatgggttcttcttcttcagcctatttctcaaattaatgtttattcattcaaaaaatatttatgtagtacctaccatatagtaagaacagctggagccataacagtaaataaaatgaacaaaaatccaccttcatgaagcttagattctttttccgtgtgtgctttcattcttgatgttagaattccccaaggttttaatccttggtccacaactttacttattctgcacactttctttgggtgatctgatgatttttctcctattttttctccaatctagacattacccatgagttttatgcagggtatattcactaagatatgatctaggaaccttgaactagatatgtccaagtcagaaccctttatcttttccctaaacagatcttcattcagtgggtagtattcagccataagaagtcagaagttaaacttaaatctttcctttatctcccatatccaaccaatcaccatctcttacttttttttttcccccaagacagagtcttgctctgtacccaggctggtgtgcagtggtgtgatcttggctcactgcaacctctgtctcccgggttcaagcgattctcttgactcccgagtagctgggattataggggtgtgccaccatgcccggcttatttttgtatttttagtagagatgggatttcaccacgttggccaggctggtctcgacctcttgacctcaagtgatccacccgcctcagcccctcaaagttctgcgattacaagcgtgagccaccacacccggcccaccacctcttaaagcatttaccctatttgtctaacattctcctgttctttctccagttttgtatgctttgcatcctctctccaatagctgccaggatgatctaaaatacaatctcagtctcttttttaaaagcttcctcatcacctaagagatagaaatctatgtcttcatcttggtataaaaacctgtctgtgatctggtccctgcttcatcttccagttttctgtttgtttttcaatttactttaagattttgttacagtgtgtaacaaaatggttacacactgtgtcataatgcttaacatcatagtctctgaagccaggttgcttagatgtgaatcctagctctcaaatatttgcctcagtttcctcaaatgggaaatagatataggagccactatcttgtaagattatttggaggactaaatgagttactacatgtgtgcttagaccagttcctgagacatattaactactattacatcaggctgcttctaatgtttgcctttgttcattctacttcctcttctttcctaccaagtattagcttagccatagatcctgtgtagttttccaagtttttagaagctgacacttgatttactccccgaaactgttaccaatcacaacttatttcatgttagggttgatgttataagcaggtatcctctaggctcggttttctcttttaaatatagaaaatgtagtaaatataaccacttcaattgttatattgctgtgggacaaaatgcagttcctgtaccatagcagtaggagatcaaggtaagagagaacaacgataactccccagtttctagcttgtatgactcagaatccagaaaatattgtagaagtctcaaatgcttgttgatacacacgcttacacaaaattgtaaatgttttaatttccttcaagtttcctactgcctcttcagtccgctagcctgatactgcaatcagtgtcgcttcaggcaacttctcctttctccgccaaatttcgcctttcggtctcacccacccatcacccagacaaatcctccaaagctccgtcttccctttaaaagactctcagggaactcaaccccaaaacccaccctctgggtttccccgtcaccctggcaacggaagcaggaagaggcgggcttcgccatccaccctccccgcccgcggcaggcgccggccgcattggtgagggggcgcgggctgcttggccagggcagttccctcagctccgggttggagccggagccggagccggatcccgcgcacaccgccacgtcaacctaaacctacaccgccctctccaccccaccgccgcagcgcccgctgggcccgcagcgggtctccccaggcagcgtcctccacgcctttcccacaatgctccgcgccaggccccgccccggctcgccgtggagaccggcgcgtgaggaacctaccggtaccggccgcgcgctggtagtcgccggtgtggctgcacctcaccaatcccgtgcgccgcggctgggccgtcggagagtgcgtgtgcttctctcctgcacgcggtgcttgggctcggccaggcggggtccgccgccagggtttgaggatgggggagtagctacaggaagcgaccccgcgatggcaaggtgggcatgggcccggggctagggctttgctggagccggtggtggcctgggccctccggtcagggaggggcggaatggctgagcgcctgaacctcccttyctgtgcgctcttaagacctgkatattgtgttctcgctccccaccttyctcctccctgttattcacaccacccttyctctgcccagcgattmcctctcagttacttacactytctccctaagtccgacctgagacttcagacaccagcaacacttaacagccctgttcccccgtgtcttcatctttacccctctcccctctcccactctgcagtgatggcaatgcgaaassttgcgccttgcatttacctggcgcttccacctgcccggtagctcgggccacgggcagttcggccacacccacgctgagaacaacccctgggcgagaaacatcttatcccaaagtgttgattgagactatgccctctctttttctgatggktgttttcttgtktggatacttgttaatctctacatcattatatttttcaaaggtatatttttgtggaatgaaaaggaagtattagaaatgagctgaagaccattcacaggtaaagagaaaaatttttawatatacatttaggattaaatgaaamacagaaatgaggtgcgaggagcgttagatttttcaaagcattacgatctctttggaactaaaatatagtggttgaaatgtgatatgatgaagtaatgattgtttttgccctgcagagagtatgtctaaataaccgattcccttctctttktgtgttttgtttctacttacaccamacatgaactttgcaataaaattacactggtaacttacaattgtttttctactatttttaaaaaatggcctctacttaaattcagtataagcaccttctgaggaaactccgggaagaagatcgactgctgtgtagattgtctattataacartatatttcactgtcatttctggtagggttatatgagaagtaaaaaaccctatgtttccttctagtccctcccaaggacatttcctacaagtgaattctgctgaaaatgaaaattagacagctttaggaggtaaagaagtagctaaaaggaagaggtattacaggcaacgctataactgggtagaaagaggaagcacctgtagctcattgccacctttgtgttctgatgctcgtcagaggtcttttctcagtgtataaattgctgagggkgtgtgtgcaagctacttactaccactcatgaccttttttctgctatcttcagtgatttcacaaatctagctacatggatgtagaaagagtgaaaaatagaacctggggcattcacactgatttgccatttaatggagattgtattgcygaccatgttctgtgataaataaattgtgctattattgtttagttcaaaatgtattttaactgcctgcttttctttcttagattaatatttttggggacagatttgtgatgcttgattcacccttgaagtaatgtagacagaagttctcaaatttgcatattacatcaactggaaccagcagtgaatcttaatgttcacttaaatcagaacttgcataagaaagagaatgggagtctggttaaataaagatgactatatcagagacttgaaaaggatcattctctgttttctgatagtgtatatggccattttagtgggcacagatcaggatttttacagtttacttggagtgtccaaaactgcaagcagtagagaaataagacaagctttcaagaaattggcattgaagttacatcctgataaaaacccggtaggtaaacgtttgtttttaaaaatatttgattatatttttggtacattttgatatttatttaaattgctttaaatgatcaaatgcttaagaataatcatatgtcaaaattntaattcaacttgtatgctagaaacaaaagcaccaaaatgttctggattatttaggatcccgtgaaggaatgtcagtaccaaaaattcagttccctcttaatttgtagacgattttccaacaattctattaaagacattaaccccaaaacaaacgataatatccgtgaagtagttgaagtagttttcttattaaagtaggttaagatcaagtgttttagaacaggaacaaaaatatttttttaaaactcagagggtatgacttgctaaaaatagaagtaatagctaataatagcatgttttaactttgactgttttcttctgtgtatgcacaagtccacaaaccagagttagaaagttttataaattaatacttcacagcagctgaatataatgccagtcataaatatttatgtacacattaatgtaaatctttcaaaactaaactcattttaatttttatggtgtttttgtaatttatttgattatttcttagtgagatttagcgttcatcattaacaagaagacatagttataattttctcttttctaggtagaagttttaaaataggattattttcattgcataaagctgagcaagagaaacaatatttctttaaatattgtttagttgattatcttttcctaagatccacattctatttaaggtttttatttttttttaatttttctttaaaatttcaaataatgatttttaagtttccatataaaagacagtagaccttctaccatccgagtattatttaaatgaaagcatccttcagaaacaaattttatgaagcacagtaacaaggaagaaacatttccgatccaattttggattgttttctttttttttttttttttttttttgagatagggtctcactctcttgcccagactggagtgcagtgacgccagcggcttcctgcaacttctgcatcacaggcttaagcaattcccctgcctcaccctcctgagtagctgggattacaggcgtgcgtcactactgcccagctagtttttgtgtttttagtagaaacggggcttcaccatgttggccaggctggtctcgatctcctgacctcaaatgatccaccctcctcagtctcccaaagtactgggatcgattttggggtgttttctgatactggcttttatgtaattagctgatagattggggcacatccttttttaattaagttgattttacctcaaatagaaaaataacctacaaatgtattgatttataattgttataggagtaaaaaatatttatgaaattaagagtttcaacaggcttattattttcagctgcattttttaggaagaataactcatggtctgataacgtctgtcaaccttttgaagagtcaattatttcattacttttcttacttttttttttttttttttgaagattatagtttcttaaaaaatacttcatttcaacccatggtaactcatgtcatgttgtattacccctccttatgttggtatatggtctcccagaagttactagattaattaaacctacatatatgttttgaagaaacttggattgtgtatctgaaataattgtattatatctaatattttttaacagaataacccaaatgcacatggcgattttttaaaaataaatagagcatatgaagtactcaaagatgaagatctacggaaaaagtatgacaaatatggagaaaagggacttgaggataatcaaggtggccagtatgaaagctggaactattatcgttatgattttggtaaggtgatacgatattacttatgaaatgtgttttatctgagtaaaagaaaagtgaattctgtttcaccacttagcttatatatttaagatgcgtcactttgattagctccttttaatttgctgtgggagtgaaatttaaaaggaatgtcagttggtatacagagatgatctgtacagatatgaagttgtattggttaaatcttgttaaatacttttaaaataaggattgctatttaataaaaaatatgcattcatggactgcataatgacatttcacttaacaatggattgtatgtaggacattggtcccatgaaattataataccatatttttactgtaccttttctatatttaaatacaaagatacttagcattgtgttacagttgcctatggtattcagcagtaacatgctgtacagatttgtagactaggtgtgtagtaagctatactatctaggtttgtgtaagtacactctgtgatgtttttgcaacaacaaaattccctaacaacacatttctcagaatgtgtcccattagtaagtgatgtatgactatatgtttgcattaggggtagctaaatatttctttcagtattttttagtattgaataatattaatttctttcaatatattttagagcatcatattgtccaagaaaggcgaaacttcaagtttagtaatgatctcttcaatagaaatgccgtccttctcatatggaacccttactgatttttaaggtgttttggccttcggttgacattaaggtcaataccttgaaacattatcaataaaggttccatatgagaaggacgaaaggtgttttttttcttaaacatggaggaaaaaataaggtggaaggaggaaacaaagtaaaggaactaaggaagagagattgtaaacacacaggtatcaagggaggaaggtgtgttcagagacccagtgtttctcctagtcattaattaacctcaaatgcaggctaagaactgaatatgcttctgtattagactaaatgaagtattttaaatttatatctggaggatttgcttttagtaaatatgattttttttcaaaatagtattttcaagtatattctctacaccttgatagtctatatcaagagttagcagactgcatttcataggccaaatctggcttgccatttgcttttataaataagttttattggaatggaattactttaatttgtttacataatatatgtgacttctttcacacttcaagagcagagttgagaagttgtgatagaagccatacatcccacaaagcctaaaaaatgtatatttactaaatatttgtgtctgcctctgcaaatactctaagctttttagcagaagatattctaacatgataccatgtgttaaaaaccatataatctgaaaatcaaatgaggtctgtagtctagttaacagtgtaccactctcaatttcctggttttcgatattgtgctatatagctacataacatgtcaccattagaggaaggtgagtaaaaagtatacaagagtctatatttttgcaccttcctgaatctgtaattatttttaaaaccataatataaattttatatggaggtaaaattatgtgaatattacgaactaccgcatacacatctatgagagtccatatcagaattctaatatctttagatcaccctaaatgtactgatagtattatttacttttttttcacttaggatgttgcatattctctaagtttgagatataatatagtagtttgatttttttgatgattaaaacgagtaatctatttttatgttgcaatttatatggtgaagttttgattttataatttttatatacttttaaaattaggtatttatgatgatgatcctgaaatcataacattggaaagaagagaatttggtaagtttgtgggcttaaggttttataaaactaatacaagttcgatctcatctaaaactctaggggatatatatgtttgaaatttagaaatcttttggagtttcgaacagtaataatgtaatatactgtatcttaaatatttctagcagaatgtggggaagtgtaccataataaaaacattaatatttatgtagcaaaatgtgtaagtatatatactaaataaaagaaatttaaaaatcagttcagatcaggtttggatgccaagtgagcttgctgcaaacttacagcaaaacttctcagagctttttgattttagagttttggataaaggtatagttattttggaagtagatttaatttgattggcaactttgtgtgaaaatggccataaaaatacagttctgcattttccattgcattttagaaaattgtataccagaatagattcttatactttcatcctttgtacagtaataataggtttattttttctatttcagagcaataaattaaacttcaaatcaaatttcaattttatattgctctatcacaattgtatttaatttagaaaactaaaatacagccaggcgcggtggctcacacctgtataatcccagcactttgggaggccaaggcaggcagatcgcttgagatcaggagttagaaaccagcctggccaacatggggaaaaccctctctactaaaaatacaaaaattaggtgtgcctggtggcacgcacctgtaatcccagctacttgggaggctgacgcacaagaatcgcgtgaatctgggaggctgatattgcagtgagccatgatggcaccacaaaaaaaaagaaaactaaaatagcgtaccagtcgcaaaaaatacatataaatctatatgtttttcatatattatcgttaaaaatttattacagctacttgattttatacagtttgttccttctaagcaagggtggcttttttttttttttttttttgagacggagtcttgctttgtcacccagaccagtgtgcagtggcacgatcttggctcactgcaacctctgccccctgggttcaagcgattctcctgcctcagccttctgaatagctgggattacaggtgcccgctaccacacccagttaatttttgtatttgtatttttagtagagacaggatttcaccatgttggccaggctgatctcgaactcctgacctcaggcgatccacccacgttggcctcccaaagtgccaggattacaggcatgagccaccacatctggccaagggtggcattttaatcttattttctacatcatgctggtgagcttcacatacaaaatagctgttcaatgtgttactttgttaaaagccttctaggtgaacacttgaacatgttctaagtgaatagaaaatacatctttcctgtgttctgcaaataagacaatttgattcatttggattgttaatagaattaatgctcatgtcacaagctggtagaatcataactctcgtgtgagttatataaacctatagctgttcctgtgtggtttttattgtctctcatctcctaatatatcagtaagtgttttgtgtaccaatggttcagaaaacatcggaattacagatagaggaactgaacaaaacttgcaagcttactaatccatgagtctacctagaatgagacttcactgatagttatattgtatatgggttcacactttttcagatgtgtcactatgcagaaaagcttaagaactgttaatagttcatatagaaccccaaatggtagttcaagataaattgcagccacaaaacttcagagataattcataaataattaaccttgcttgatgagaggaatgagcaggagcattgttgtgatagagaaggaccctctagtgaagctttcccaggcatttttctgctaagcagatgttatcatttctggctctctagaaagtcaacaagcaaatgccttctaagctcttctattatatgcagcataggttaagtaggtttaatcaattctgacagctactgtaaactctgaaagaataaaataagagacctacataatacagtaaggattgcggggattaaatttaatataagccctaaataagacattaccttggaaaatcactttatttgaaaagattgacttttttttaacaattcaaaacattaatacatacttgctaaaattatagatttgaacatgtgatatctagccaatagtgcagtttatattttatctgtaaaatgacctgatgcaaattacaaattttactcacttaaaaaatttaacattgtaaaaatgtgctttcacattcaagataaaaaggcgagggtaatctgcttttggttaaaggatttccatatgattccatgttaaaattagttaatattttaaaataaaaatttcagaaattacagtaagacattaaaacatgcatggtattctaaatacgtgcaactaattcaggctaattagaaacaggtacaggactcagtgttcacctacatktcaagtataagatagacctgtggggaaaaagttaatctgtacmttacaggcaaagtaattacattttactttgctaatagaagctgttaactggagttgtatgtatattaacagacagtagctgtagttgtatagtttagaagtggaaagttgcattttgaaatgtaataattctattctgggtcactgttaggcrcaacatcccattgagctgtgatgatacagtatttaaaatattttaactttattcttattactcagcaatcagtgggaacttggcaaatatgagaagtgctckatgaagacaaagtacaggtgtacctcattttattacactttgatttattgcacttcatagataatgcacttttttttccttaacaaattgaaggtttttagcaaccctacatcaagcgagtctatcagctgaacgtgtttccaatagcatgtgctcatttcatgtctctttctcacattttggtatccaaactttttcattattattctgtctgttacagtgatctacagtcagtgatctttgatgttactattgtaatcattttggagtgtgcccataggatggcatacttaatttttgtgtctattctgactgctccctcttccttctcccttttctctcccacttcttgggcctccctactccctgagatacaacattactgaaattaagccaattaataactacagtgacctcttaagtgttgaagtggaagagatgcacatctctcattttaaatcagaagctagaaatgattaagcttagtgagggaggcatatcaaaacccaagacaggctaaaaggtagacctcttttgctagttaaattataaatgcaaaggaaaagttcttcatggaaagtaaacgtgctactccagtgaacacactaatgataacacaaaacagccatactgctaacatagagaatgtcttagtggtctgggtagatcaaattatctacaacatccccttagcgaaagcctaaccagagaaagaccctaattcttttcaattttatggaggcttagagagatgaagaagctgcagaaaaaagtttgaagctagaaaaggttggttcatgaggtttaaagaaaacagccatctccataacatcaaaatacaagatgaagcagcaagtcccgacatagaagctgcagcaagttttccagaagatctagctaagatcattgatgaaggtggctrtactaaacaacaaattctcaatgttaatgagacagccttccattggaagaagatgctatctgggacttttttttcatgcctgctaacaccatatccattctgcagcccgtaaatcaaggagtaatttcaacttcaagtcatattatctaagaaatacatttcataaggctctacctgccataggtagtgattcctctgatggatccaggcaaagtaaattggaaaccttctggaaaggagtcaccattctagtgtcattaagaacatctgtgattcatggaaggaggtcaaaatatcagtgttacaggagttgggaagaagttcattccamccttcatggatgactttgaggtgttcaaggcttcaatggaggatgtaactgtagatgtgatagaaatagcaagagaactggaattagaagtggagcctgattatgtgactgaattgctgcaatctcattataatgatctcattataatataattatctcattataataatctcaccatggggcggtgaggagttgttccttatggatgagcagagaaagtgatttcctgagatggaacctactcctggtgaagatcctgtaaacaatgttgatatgacaacaaaggatttagaatattacataaacttggttgataaaacagcagcagggtttgaggccagttttgactccaattttgaaagaagttctactgtgggtcagatgccatcaaacagcatttcacgcttcagagaaaatctttcaggaaaggagacatcaatcagtgtggcaaacttcattgtcatctcattttaagaaattgccacagccaccccaaccttacacaaccaccaccctgatcagtcagcacccatcaacatcacgacatgcatgacttgctgaaaggctgaaatgactgttagcattttttaccaataaagttattttttgttccttggttggtttgtcaccccacctggagagtgcagcagcaggatcatagctcatcacagccttgaactcctgggctcaagcaatcctgctrcctcagtctcccgactagctgagactgcgggcatgtgccaccatgtccagctatttttatagagacagggtcttgctgtgtttcccaggctggtctcaaactcctgggctcaagtgatcctcctgtctcagcctcccaaaaggctagatgacaagcatgagccactgcgcccagcctattttctaattaaggtatgtacattgttttgtttgttttttttttttagacataatgctattacataatacactgtatatagtgtaaatataacttttatatgcactggaaaaccagaaaatttgtgtgactcctttatagtgatacttgctatgttgtgatttggaaacaaacccacaatatctgaggtatgcctgttaccagggtaggagacatttttactacaagaaaggttttgtgtcaaataccattcaaatttgttttacagcatatttttatttaagacttatgaacagtaataccttgtgtaattattgctttctatttttatataaaaataactacctcattacttgtttatagctgataagataatcccttctttcattaaagtttgcattaattctgttaatatttttacctaaatttgtactggtttgtggtctaaaccaatatggcaattttttcgaccacctctatagaatggtcatttgccagactttgaaaacattgccaaagaacagcccatagtcctgaattacacactttgcctgtaatgtgtagattaactgttttcccacaggtctgtcttatacttgaaatgtaggtgaacactgagtcctgcacctgtttctaattagcctgaattagttgcacgtatttagaataccatgtgtgatttaatgtcttactgtaatttctgaaatttttattttaaaataataaattttaacatggaattatatggaaatcctttaaccaaaagcagattaacctcgcctttttatcttgaatgtgaaagcacatttttacaatgttaaattttttaagtgagtaaaatttgtaatttgcatcaggtcattttacagataaaatataaaatgtactattggctagatattatatgttgttcaaatctgtaattttagcaaatatgtattaatgttttgaattgttaraaacctcaaccttttcaaacaaaatgattttccaaggtaatgtcttgtttagggcttagattaaatttaatccccgcaatccttactgtattatgtaggtctcttattttattctttcagagtttacagtagctgtcagaattgactaaacctacttaacctgtgctgcatgtaatagaagagcttaaatctcagtcactcttactatttgtcttctttatttctctcatgcacacaaactcttacgtgaggtttggctgctatttcttgtgccgtcactttttacaactttatggccatatttatcttgcagtttgaggctgcttctttttcaagtatgggcgtaggagagtttttttaaaaagctattgttggtttgacatttgaaatgtttcttgtggaaaaaaaatttttaattttttaaaaatgtcatttatgtagaagatatagaaaaacatcacacagaaaatgagaaagacaatatgaaaattgcatgactttttaaaattctgatctccacaaaaagtttttaactaaaatatgcatgaacctttaataaataattctaagttgtttgcattttatgtatttttagatgctgctgttaattctggagaactgtggtttgtaaatttttactccccaggctgttcacactgccatgatttagctcccacagtatgtatytttcacatcctcattactagttttatttctaattgatctgcaatttatatgttagaatttttttttctatgaatagtaatcaaaaataattatcaaatactttaaatgtctggtttaaaaatatatagcttggagtgtgttcaagggaagaaaagtggtcttatcagagaaatatgttttctttttctgtcatagtggagagactttgctaaagaagtggatgggttacttcgaattggagctgttaactgtggtgatgatagaatgctttgccgaatgaaaggagtcaacagctatcccagyctcttcatttttcggtctggaatggtaagggataaagttagcattttttaaatttgtgaaacattatgacaagttaaatagtagagaaaataacagtatgtagaatttgcagaacattttaagtcttgttttacaaggtgccatctcactagtcttctgtaataataaacattttggattatgaatttttttttttgagatggagtctcactctgttgcccaggctggagtgcaagggtgcagtctcggctcactgyaacctctgcctcctgggctcaagcagttctcctgcctcagcctcccgagtagctgggactacaggcacccgctcccatgtctggctaatttttgtatttttagtagagacggggtttcgccatgttggccaggctggtcttgaactcctgaccttaggtgatctgcccacctcagcctcccacagtgctgggattacaggcgtgagccacagtgcctggcaaaaaaaacaccattgactttgctatattttaaaattaaatgtttgccaatttcagtttctgtcttaaggaacataatttatacaatatgtatattgtatttggtagtttacaaagtattttacaagtgttgtctcattgaatgtaaagctctgatatcttttttcttagtttccagtgaggaacctgaacgattataaatggtattattaaaatgtgttccatagaatctgtactgtcaagattatcaggatatcatttggaaatacattstgctattgagaaatagagctttgctgcattattcaagataatgtaaaaatcaaactctttggtattatttttattgagttttaaaaagaaaaagtaaaagatgtttctcttcttacaaaaaccaataggccccagtgaaatatcatggagacagatcaaaggagagtttagtgagttttgcaatgcagcatgttagaagtacagtgacagaactttggacaggtaattttattttcttaatttgcttgattttcagggtattttgaaatcagtattttgtttttaatggcaatattaacattttggtcatggtattgaaattttaaagtgtcttttccatgtttcttagaagggaattgtgtcatttactctgaactctgctgaatttaacaaactagttaaatttttacagaaacttgaactatcgagatatgggaaatggatatgagatagggctacggtaaaaaaggcatctctcaaagtgcaaaaaatgttttgtaatacaagtgttttattgcttttttaaatatgcttatcaatcagtaaattcaaacctattctgtttaattttaaagtttaaaaatgcttctaatcttaggcttttaactcattaactgcctttaggcagattaagctaataatagtatttgtggctcaagatgttcattttattcattgagtaaagttacgtgtcagaaactattaaatagtggggctgcagtaataaaatatatagtccctgccatcagtgacttcattagtgaggaaaacattagtaaacaattaaaatgcaatataggtactattattatagagcttaagggagcataagatgtgtaaaacaacccagttggggaaaagagaaagagttagaaaatacttcttgaaagaagtcatatccaatctgtcatgaaaatgaayaggaagccttaggagatcactgtgtatttggggaactggcaatacttcatgaatctgacaaaaagatcaataattgggtcaagtggtgtggggaaatataatatagctggctaaataggtaggcaaagctcaagtcacaggggcctaacttgccaatttgagtttttttcttaatgaaataatgaatttaggttttatatgatgaaaaaattggagagccattgaaggaatttgtcatactcaagagtatctttggaaagataactggtaaaactcagagtggattagaagagggtgagattagaaaggaaaaattacttagaagactgtttccattagtaaaggagtaataggtgatcagaatttgctttttttcttttatttttaaggaaattttgtcaactccatacaaactgcttttgctgctggtattggctggctgatcactttttgttcaaaaggaggaggtaatactattttttaattttgttggaatgagaacatgacatttaaatttttggtgacagttttaagtatgctactgtaattgattattaagtactagaaactacaatttatgcccaggattacaatttttttacttaatgaatattcgcctttttcattattttacacatgaggttattattcattttttaatgtatcctctatgtttttatgttcagtggaccagtttttcagcttagactcatgataaattgtaccttcagatagccacagatgttatttgacaatttgcaaaaataactagttgtttacagctctaacccctcccaaaataataattttttggaaatatggactttgcttcatgcttatatatatctctcaaacatacatagatttgcctcatacaattatatacttgaagatgacagcttcttctaggaacctttccttgaataaattaagttgaaaattcagtactctgcatagcaagccgtaaactgtaaactgtgttcaagcaatgtggttggttaaaaattgttctaagacaacaaaatattataactcaatgtatttgcatgtatttaatcccaacatgagtcttctccccacatttcatctctcagccttcatgctgctatattgaaaaggtactgccttgtaactaaaatcaacccattaccccatcctgtaaggcctatgctagaaagacactgccttgcagcaaaacgtcagccttaaacttaactaatcaccaagggattttgtctcattttggcctattgcccaaatttctgttcatccacacatgaacaaaagttcttacattctctgagattcttttacttctcacctcaagtaaattgcttctccctgtctttgtaggctctgtgatgctatagctctctttcttctaaatcttctctcattgtattctagtgttcatatttgcagaactttcataaaaatagtgaaggcactatttaaagattttattgtattttgaggatcctttatatacttctatcaaatatctattacattttatttccccccaattttgagatctcttggataaaatggattgttgataggaggagagattgagagtattaacctaaagagagaaaattactttttctctgtagctagacatcctagaaattaaagggagagaatgaaagaaagagggagcgagggagtgtgtgtgtgtttttgtgtgtgtgtktgtatgtgtgtgtgtgtagaaggatttccatatctatcaatagagtccagctcaattaattgccttcgaatgaacatggtaatttgggggaaaggcaaatgcaagtattttcatcaggcttaataaaggtaaaactgcctcataaggtttttttgtccccagattgtttgacttcacagacacgactcaggcttagtggcatgttggtaagcatcaatcattttgtaaaactatatcaccatgtaaagaaacacntttagaaattgatttgaaacattttcttcccttatttcttgaacatttaactcacctatttgtaatcttattttctgatgactgtattcatagctatgtgttttttcctgaataattagttacgttcaataaattttaacgtgrtatcaattctaagtgtcatttactttgtaagtattctgtaatttataagttcctcttcaactgaagttacatgttagtgtttttgtcatttcccaactttatcttttgttgttttcttttttagtcatttttaaatgtatatagctctcatgttatggctgggaagtagcctgagtgatgttgattttttaacaccattgaaataccctttgtggctttgtggcttgacaaagccacacaaattgtcagttttgaaaattttggaaattctttgtgagcttgaatataataatgttatgttaggtgtaatatatgttaggtgtagtattacatttattagatcagatttattaatcatgttatttgtttttggactacatgatctataatttctaagagggatgtattaaaatctctaccatccatcattgatttatctatttcttatatttctgtcagttcttcctttacatattttgacattatattgttggcagcagtatgatcattatatcctttggcggctatttatttctctttgtgcattatggatttgtttacacaaattctgttttatttgatattaaaatcactaacttagtatgcttttgtttcattccctttcttatttcaccctatgcctaggcctttagtttttcagcactacacattaaaatcacctgaggagcttttaaaaataataaaaaaacaaaaccatgtcccccagaccaattaaatcaaaatattcgagggtgaggactgagcattagtatctttattttttttttaatatttggtgatcagagtgattggcctatatttttcctttccagtaaagtctgtgcacttttagcatcaaagttaggctggcctttaaatgtgttggaaagtattatctctttttctcttctttggaaacagtttctgtacaactgttgttatttctttctcaattttttttttttttttggtagaatttatcagaaaaccatctgggcctgaagttgtctttgaatccatatttatagacttttctccaatctctctcagatagatagatagatagatagatagatagatagatagatagatagatagattttctacttcctctatttggtaaattctgtttttctaagacttcgttctttgaagcaaatgtgtaaatgtattgctataaaattgtacataatatcctatttttttatatctgtagtatctatagtgatgttctttcttactttctgatcatattttgtgtgtgtgtctcatgtctgtttttattcttattctgtccaaggagaggtttcttaacctttataagtcttttcaaagtctcaagtttcagctttattgatttttttttttttactgccagtttcttgatttcattgacttaagcactatatttccttccctctacttttttatgatttaatttgctgttcttgaatgattagttcattgatcttaggctttcctttctaatatatgaatttagattataaattagtgactacagctttagatacatcttctattttgatatatatatatagtattttgattatcagtttaaaatattttttaatcttgatttttatttctctttgaatcacagattctatattttttgttcctaatcataaaggktatttttaaaagtaattttgttatttttggctagcttgattctactgtggataatgaacatggaatcagtttttttaagttgttaagccttgtttcatggcccaacatatggtaaatttttataaatgtttcatatgcatttgaaaatgaatcctgtaattcacaggtacacatttctataaaatcagttgggtccaatttgttagctatgttaatcagatcctctagatcttaataattttattgtctgcctattctatcaataactgagagagtgtcttaatatcctccactactttgtggatatttctatttcctttgtttctgtcaatttttattatctattttgatgctttgttattagatggatattaatttagaattgtatgttttcttggtgatttgaatctctaacctgatgaaataaccctctttatctcctttcgtgccttttgcctccaagtctaccttgactgataactaatatagctacaccagctttcttttgtttaatgttggcatttttccattttttactgtcacccttactgtatccttatatttattgcctgcaatcagcatgtaattaggttttgtatttatctagttgctattttttatcttagtccattyacatttaatgttattcttgatatatttggccctatgcttaccatcttgttagttttatatttgtcctacctgttttatagtccttttttctytcctttktgcttcttttggattaagcaagtgatttttaaaatttcatttcccatctctactagctctktggttacctgtccttwtattgytcatttaatgggtaccctagaaattktgtacatgtatcctgacttactcatttgctacctaacgcaagagtactaaacagaaattattttactacctctgaaactttgctgttatgtattctaatcaaatatgtttttttctaagttctgtcttaaatgcagtaaagtgaatacatcttaaatgtacaacttaatttttacatatatatgctcccatgtaacaccacctagatcaagatctattctttcttagcttttaattgtttgtgattttctgaagtttcattatgatatacataggtcttgagtttcttatttattctgattgagattaactggacttcttgatcactgtaggttaatatctttcatcagttgtggaaacctgtcagctggtatttcactttttgtttctatctcattctcccttatctttccgagatcccagttgaatgtatgttagaactctatttgtttactaacttgcccagtgcagaaatttttttcagtaacttaaggttatgagaaatgtacttttcgtacaggatttttggagctcactaaaggattagcttagccactgtagatgaaaactgggaagatactaatttaaatgcacattgtagacacatacagagaatgtctcataaactgtataattactaaaaggatagccacaatgaaaaatcttaaacagtagtttggtttattttctttaacctgaaagactattggacagctcactttctataaaaattgtaaatgtcgttttttgtggattcgtagaaagaattataaaaagtagatttctactattagggaaaaaccatttctcaagttactaagtacaattttttgcacttaatatttctaaatttattragtaatttataatattagaaatctactttttaactttgctgtagaactaaggcatgaagttttaattttttggtagaaaaattgtgtttttagctaagtaaagctctaaatccctttaactttttscctcccatttacaacatggtttgttgtttctttccattttaggatggtcttgttaatgtaggatggatggactgtgccacccaggataacctytgtaaaagcttagatattacaacaagtactactgcttattttcctcctggagccactttaaataacaaagagaaaaacagtattttggtatgaatcactttaaactaatttatttacatataatgtgcaaacaccctcaaaaataatacattatttttgtaagcagtgagcaaagaaatgaacaatttatattgtctgattgtggaacccttatttagaacacatacttaatttctgagattctttttaatacatgcttcaaattataaaatttaaggattatttttaaactgacgattacatttcatttaaagtcattacatctttacatttaaaattaccttacatttaaaaccattatatttttaaaccccaaaagtatggagtacattcctgggttatacgaaagagcatttatagcatgagttttcattgttttctatttaattgtttattttgttttttttgagatggaatctcactcttgtcgcccaggctgtagtgcagtggcgtgatctcggctcggtgcaacctctgcctcctgggttcaagtgattcttctgcctcagcctcctgagtacctgggattacaggcgcctgccatcatgcctggctaatttttgtacttttagtagagacggggtttcgccatgttggccaggctggtcttgaactcctgacctcagatgatccgcccatctcggcctcccagagagctgggattacaggcgtgagtcaccgcacctaacctaattgtttattttctaatgttaaaaatatagatcagtggtagttttggctggggcctaagtatttttctaaagcaccccgtgggattctggtgtaaactcagttttgacatcttgtaatgtggtatacctccttaagtttgagtgaggaaactgaagctcaatctagttgtcaaggagctaagataaatagtgggatattggatgggtcactacggaatcccaaaagaaaktaaggactgtgataagacaaatctcccttagttttccctctgtactttaattctgcttttttagatgttgataaagataacatatactcatttcagaaattcatatatggcacagagctgtaaaagaagatgcaaaattccctaaaaccaaatcactaatagacagccaccatcaaatcttggtaaatacccatccagatctctactgaaatatatatgcaattacgactttgtgccagcaattctctagtttatacctgtgactcaaacctctgttctccactccagatgtattatacacatgcacctatacgtatatgtgtggatgtgtgtgtgtgcttgtgtatgtatatgtgtgtgtgtacatacttacatatcactgctcattcaatatcttccttaggatattagtcagtgtctcaaatttaaatgcctataaccatattcccaatatccctccataaatctgcttcatccagttttttcccatattatttgatgaaaactctgtcctttattattcaagccaaatgccctggagttattcttgatttctctttttctcayaccttataaccaattcatcaagaaaatctatggctttatctttaaaatgtgtttatacacatcaaatggatggatggatacagatacgtaatttttcataaatgggattgcatagtagattctattttgtaatctagttttttcactcagtgtatcaggaagatgctttcttatttaaaaaatgtacattttatatgcatactttatcattttataaatgaatatgtatacattatccttgaagtrattaatgatccctggatggtaagtcactgactagatgtgacatacttagtttaatcagttctttcttggtgtgtgtttctactttctcaagatgataagcagtgttgtaatgagcaatcttgtatctttatccttgtgcactttttcagttatctgtttagaatgggagcattgtggccattttaaactcaattggtattgccagattgccctccggaaaagttgtactagtttattctgtgccatccgtcaacaaggattgcctacaccctgtccaacaatagagcctcttgccttgagtattataatctctgggcttcatgatagaaaattacaaggtcaaaggctgtctgagacaggaaacagaaatgagtgactctggaaatgtaataacagggagtggtgaattaaacaytacttgtccctccccaaaagcagtcaggttttttttggtttttttttttgagacggagtcttgttctgtcgcccaggctggagtgcagtggtgcgatctccactcactgcaagctccacctcccgggttcacaccattctcctgcctcagcctcccgagtagctgggactacaggtgcacgccgccacacccagctaattttttgtatttttggtagagacggggtttcaccgtgttagccaggatggtctcgatytcctgaccttgtgatctgccggcctcggcctcccaaagtgttgggattacaggcgtgagccaccgcacctggccgcattcaggttttaaaaaatataaaacagtatgccagctaaatatatctggtaggtggaattcagaggctagataagacagcagtcctttataggtgtaactaacaaattctcctctaacagaaacaggtttataatgagattctagtagattaagcactgcaagtttatataggctgtgtaataggcattttagtaaaagtcttcatagtgaataggactaaagtgaataagatgtagaactgaggcgtgaaagatttgttatggcattttaagctctttgatagcaggaactatttcatatagacctctaagaatgtttatgatatatatatatatatagtatatatcatatatatttatatatatttatatatataatatctcatatatatttatatatatatatatctcatatatatatattcagttttaagaaaagaatcttagggaaaaaacctgaatttttattcttatgttgtacctattatttttagccatatgtttgttctcatgtctagcatgattaaactgtggattccatgattgttcgtacaagtttttagtgaattttagatctttcaagtaatacttaaactgttaaacatagatggttcataattaaagacatatattaaactctgttttgtcaactttcatatacattttcttgatgtaaccattgctgcattctttataataacagctgcttcattgagagaatcagaccagcagagagagagagttatatgacaaaatatgctgaggataaaatattgacaaataaagaagatttgttagaagggccttttatactcgtttgtgttttaaataagagactcgggccgaaaacaagtttaagataagatctgtatcattgtattttactctaaaaactcctaagtggtttggtttttagatgaaaacctctataatgagcaaaagtccattccaattttccacttctaagttcctcttaattaatcttaattattggttggggaatgaagtgtctttgatagtctattattcttccttctagtgttataaaaattcttaagtgaatgtgtaaaacattggcattctgtaaaacatgattagcattaaaattaagctaaagataatgtggtttttcttgatgattgggaggtcactcaggatttttctgagcatttttatagaatacacatcatagttaattaaaaattccagttaatgcaacatcttataatggratttattgtatatcactatttaagaaacagcttagttatataatatttttgataattgccaaaatacactttttttgaaaaaagacatttggaattgtttgaaaaactatttaccttctataatcattttcctaaaaatactacattggaaattgaaaaaacaaaagatatcaaatataatgaatatttattcaaaaagattacaatgtgattttctttttctagtttctcaactcattggatgctaaagaaatatatttggaagtaatacataatcttccagattttgaactactttcggcaaacacactagaggtaatgtttttattaataatgataagtagcaatgaatgttcgtaacatttcaggtcttaacattttaaaattagcatttgttttattcatctctagagagaattgaaagtagcagtttcaaaggattatatattagtcaattgtaggttaaattctaattggatatctggtgttgctaattcaggatggatctgtagttctggaaaacctactcagtcctgaaggtgggcttcaaaaggaacatcagaaaaggcagaattttaatcagagcaactttgggtctgattcataactttttgttcttgcttacagaacggattatattgattactaagaagaagtattcagtttatggatagaatgctgagaaatattgcttgtggtagaatcagttttttttcctattaggttggtgcaaaagtaattgcagtttttgccatttgaaagtagtggcaaaaaccacagttacttttgcacaaaaccaaatacttcctaaccacagatcttttgaagtstgtatcactacgagatcttatgtgctaagcctgaaaaagctgacaactttgccacccaactttttagctatatgctgttaaaatcatgtatttgtttttggcagtcatctactttaagattttataatttagtgactaaccctcctgtaatatttgttgattttacatagcattattctaagtaaactacaaaataagagaatgagtgggtccgaattttagacagtattttgaaataatgggtaggggagctaaaactaacttcaagtcatagaaatgaagattagaacccttagaatttcccatctctgacattttgttttctttatcacttttaaggatcgtttggctcatcatcggtggctgttattttttcattttggaaaaaatgaaaattcaaatgatcctgagctgaaaaaactaaaaactctacttaaaaatgatcatattcaagtaagaaaaatgtattctgcctagccttctgctggtgtactttgttgttaatttaatgcatataattaaattttraataacataaaaactcttatttgaaattataagaagcctataagtgcttttagtcttggtttgtgcttgcttttcctcttttttattaaaagtttatatgtaatctgaaagtggttaattttcacttattttgrcatttgataaacctgtatcatacaatttttctggaatgcatactgtaggaggttatctttccattttttaaattcttatttctttatataagtaattcttggtcgttgtttaaaratcaggacaataaataagtacaaaaataaagcaattatctaaaaaaatcacccatactcttaacattgttcataaccctgctatgtatttactctatataaccatttaaacattttgtgagtgcccatatgyatatgtaggcatatgtatatgtgtgcacatgcatacatattgtaatggccattgtaatagacatacacgtgtaaatttatatgtctgtgttttaatcaaaatggattcactgtatgcttttttttttaacttctgtcatacaacaatatcataaactttttcacagacctgtaaaaatgcatatatatttatatggatataaaatctctatatccatgtacacatgtatatcctccttattccctaaaggctacatagtggcttactatatggttatgccataattgtttaggaaatcctctcttactgattttatgttgtttcctttattttttatatcaaacgatgcagaacttgtctttaatatgggaaattttcttctcttttcttttgagacagagtcattctgtcacccaggctggagttcagtggcgtgctcttgactcactgcaacctcagcctcatgggttcaagtgattctgggttccagtgattccctccagagtagctgggactacaggcgcatgccaccaagtccggctaatttttgtacttttaacagagactggatttctccatattggccaagctggcctcgaactcctgacctcaggtgatccacccacctcagcctcccaaagtgctgggattacaggcgtgagccaccacacctggccacatgggaaattttcaactcarggttatgttttcttaaatggtttttattctcattactagagtcctccagaaagttttatcagtttataatctcactgacagcacgtgagtggccatttctccacgctgtgcccaccatggtactatcgttctttataatcttcacaattccgataggccacaagtgatatgttaacaatattcactttcatttaattgctttcaactggtcggggaaaaatactttttcatgattattaacaaatcataattgttctctagttaattttctctttatatctgtggcccattttcttttttctgatgggatgtttgtccagctttttctttgtttttttttctttttttttaatgcagtgtagtgtcactctgtcagccaggctggagtgcagtggtgcgatctcggctcactgcaacctccgcctcctggattcaagcagttctgctgcctcagcctcccaagtagctgggactacaggtgcaagccaccatgcctggctaatttttgtatttttagtagagacgtggtttcaccctattggtcaggctgatctcaaactcctgacctcaggcaattcagctacctcagcctccccaagtgctgggattataggcatgagccaatgcgcctggcccttcttgtttcttaatggatcttctctcttaaatgccacagatttgttcctggtttatatttggctgttgtgcttacgctcttctttttcacactctttgaaaacatcacttttttcttcattatttctgcttctgaaagtgatctctcctctatctcaagattatataaacattctctacatcttcaaaaagtaggtttctggaataacttcatattttcttgggaattcctcaggttttttttaactctctaggaagcatttttttaactaaattgagtcttaatattaaatgtaaatgaattatttctgtctcttattttcgtagcctattagcttctgtttaaaaactgtgtcattagggcagtgccatttttggattatcatgaatatttacaaatcaaatgggtaagacagtgtttttatcaaatttgacctttttctcctttaggttggcaggtttgactgttcctctgcaccagacatctgtagtaatctgtrtgtttttcagccgtctctagcagtatttaaaggacaaggaaccaaagaatatgaaattcatcatggtaagaatggaaaaaaatgataaaaaaaracttagcttcattttcaaatagaagttttctaattgtgctttttaaacttattttttacrgacatgcttattgtaaataacttttctcagtaaatatgaggacagatattttgaattatatgtagtcactttattctctttacccttctttttaacatnaatgccttttctctattcagtattttgatcaggatttctggtgataagtcaagctagtgagaaatttaagtcctgcttgtttgcaaaagtaagcaacacctgcagtttatattccagcttgccatgtgtatcatctcagccattataggcaatttccaaacattcttttggatgtttctcccactagacttccagacttcttcattaactgccttgttatctttcttgcatttataattttatttcagcttatttgggactttagctctgcattcatgtgagtgcagtctcaattccaagagtttggactacagcagagtccttgtcctgaaagaggtcaaatatagcaaaagaaacacacagactaccaactaccatgcagttaagtgaacaacagataccgatgaaatgcccattagcacctagcactgctttcaatgttgaggatataaatttgtaagacatgaactccttcaagaagtttaaaatagtgtagcggggaacagaggagggagatccataagaaaacaaaaaatactttaatggtcattgtatattaatgacaacaagatcaaatagatttctgcatagtagaggtcaagaagtggtatttgaattgagcataaagtgctcaatttccccaagcaactataggggaaaagaagtgagacctctaggctggaggaactttggggtaagataaccctcacagtaactactgtttattcactgctgtctccaagtcwgacattctgccagaagccttgcatacgtgattcatttttatctttacaacagcccagtgaaggagaaaatggagactcagaaaggttaagtaacttgccctatgacagacatactagaaactagccatggtagattttgaatccaaatttgtctgactccaaaacctaggctaatagccgttaaactataccatgcactaaaagtgctagaaatgactaagttttaataatggaataatactcttttttatctctgaaatagttctcagaccccccctcttctcttctctgtgcttactgctttgtttcaggcccatcatcgccttcatctatgatagtattatcctctgggaggattgcttatctcctagcctttcttccttaaaatcaattccttgttgtgtttgcagttattacccattcttgtgtcacttttctgccttgacttaccttatttcttatagcataagcgtcagattccttagcatagaagcaataatctcatctgttttgctcactgctctatctccagcacctagaatggtgtctggcacatagtaagaactcaggaaatgtttgttaagtggatagggtatgttcacagtctggctctgccagtttttccagtcttaattcccactgctgcccctccagatagtcttagctccagctacctttggatgtttgtgaatgccatgttctttcactcctctgtgccttcacacgatttttcctcctgcattataatcactccttcctgttccacagaatatttagcaaactccaaattgcctttcaaaacttaaagcagcttcttccctggaaaatatattatgaatctccaagcacttccttttatgtgctcttactaactttgtaatagaacttacattgtttctttggattaaaatagttattgagcatctgcatgtaccaggtacagtactgaggaataggaaaaaatgtgaactatacttagtaatctctaatacaaagaacattgtggactattagggaaaacagacaagtaaaytaacaaatttttattttttttttttatggacaagttttttttttatttgaattttttttwaatttattattattatacttcaagttttagggtacatgtgcacaatgtgcaggttaattacatatgtatacatgtgccatgctggtgcgctgcacccactaactcgtcatcgagcattaggtatatctccccatgctatgtctccccactccccccaccccayaacagtacccagagtgtgatattcccttcctgtgtcyrtgtgttctcattgttcaattcccacctatgagtgagaacatgcagtgtttggttttttgtctttgcgatagtttactgagaatgatgatttccagtttcatccatgtccctacaaaggacatgaactcatccttttttatggctgcatagtattccatggtgtatatgtgcccattttcttaatccagtctatcattgttggacatttgggttggttccaagtctttgctattgtgaataatgccgcaataaacatacgtgtgcatgtgtctttgtagcagcatgatttataatcctttgggtatatacccagtaatgggatggctgggtcaaatggtatttccagttctagatccctgaggatctagactgacttctacaatggttgaactagtttacagtcccaccaacagtgtaaaagtgttcctatttctccacatcctctccagcacctgttgttttctgactttttaatgattgccattcwaactggtgtgagatggtatctcattgtcgttttgatttgcatttctctgatggccagtgatggtgagcattttttcatttgttttttggctgcataaatgtcttcttttgagaagtgtctgttcatgtccttcgcccactttttgatggggttgtttttttcttgtaaatttgtgtgagttcattgtagattctgcatattagccctttctcagatgagtaggttgcgaaaattttctgccattctttaggttgcctgttcactctgatggtastttcttttgctgtgcagaagctctttagtttaattagatcccatttgtcaattttggcttttgttgccattgcttttgktgttttagacatgaagtcctttcccatgcctgtgtcctgaatggtaatgcctaggttttcttctagggtttttatggttttaggtctaatgtttaagtctttaatccatcttgaattaatttttgtataaggtgtaaggaagggatccagtttcagctttctacatatggctagccagttttcccagcaccatttattaaatagggaatcctttccccattgcttgtttttctcaggtttgtcaaagatcagatagttgtatatatgcggcgttatttctgagggctgtgttctgttccattgatctatatctctgttttggtaccagtaccatgctgttttggttactgtagccttgtagtatagtttgaagtcaggtagtgtgatgcstccagctttgttcttttggcttaggattgacttggcaatgcgggctcttttttggttccatatgaactttaaagtagttttttccaattctgtgaagaaaggcattggtagcttgatggggatggcattgaatctgtaaattaccttgggcagtatggccattgtcacaatattgagtcttcctacccatgagcatggaatgttcttccatttgtttgtatcctcttttatttccttgagcagtggtttgtagttctccttgaagaggtccttcacatcccttgtaagttggattcctaggtattttattctctttgtagcaattgtgaatgggagttcactcatgatttggctctgtttgtctgttgttggtgtataagaatgcttgtgatttttgcacattgattttgtatcctgagactttgctgaagttgcttatcagcttaaggagattttgggctgagacaatgtggttttctagatatacaatcatgtcgtctgcaaacagggacaatttgacttcctcttttcctaattgaataccctttatttccttctcctgcctaattgccctggccagaacttccaacactatgttgaataggagtggtgagagagggcatccctgtcttgtgccagttttcaaagggaatgcttccagtttttgcccattcagtatgatattggctgtgggtttgtcatagatagctcttattattttgagatatgtcccatcaatacctaatttatggagagtttttagcatgaagggttgttgaattttgtcaaaggccttttctgcatctattgagataatcatgtggtttttgtctttggttctgtttatatgctggattacatttattgatttgcgtatattgaaccagccttgcatcccagggatgaagcccacttgatcatggtggataagctttttgatgtgctgctggattcagtttgccagtattttattgaggatttttgcatcaatgttcatcaaggatattggtctaaaattctcttttttggttgtgtctctgcccagctttggtatcaggatgatgctggcctcataaaatgagttagggaggattccctctttttctattgattggaatagtttcagaaggaatggtaccacttcctccttgtacctgtggtagaattcggctgtgaatccatctggtcctggactctttttgtttggtaagctattgattattgccacaatttcagctcctgttattggtctattcagagattcaacttcttcctggtttagtcttgggatagtgtatgagtcgaggaacttatccatttcttctagattttctagtttatttgcgtagaggtgtttgtagtattctctgatggtagtttktatttctgtgggattggtggtgatatcccctttatcattttttattgcatctatttgattcttctctctttttttccttattagtcttgctagcggtctatcagttttgttgatcctttcaaaaaaccagctcctctttctgctagcttttgaatgtgtttgctcttgcttttctagttctgttaattgtgatgttagggtgtcaattttggatctttcctgctttctcttgtgggcatttagygctataaatttccctctacgcactgctttgaatgcgtcccagagattgtggtatgttgtgtctttgttctcgttggtttcaaagaacatctttatttctgccttcattttgttatgtacccagtagtcattcaggagcaggttgttcagtttccatgtagttgagcggttttgagtgagattcttaatcctgagttctagtttgattgcactgtggtctgagagatagtttgttataatttctattcttttacatttgctgaggagagctttacttccaagggtgtggccaattttggaataggtgtggtgcagtgctgaaaaaaatgtatattctgttgatttggggtggagagttctgtagatgtctattaggtctgcttggtgcagagctgagtttaattcctgggtatccttgttgactttctgtctcgttgatctgtctaatgttgacagtggggtgttaaagtctcccattattaatgtgtgggagtctaagtctctttgtaggtcactcaggacttgctttatgaatctgggtgctcctgtattgggtgcatatatatttaggatagttagctcttcttgttgaattgatccctttaccattaggtaatggccttctttgtctcttttgatctttgttggtttaaagtctgttttatcagagactaggattgcaacccctgcctttttttgttttccatttgcttggtagatcttcctccatccttttattttgagcctatgtgtgtctctgcacatgagatgggtttcctgaatacagcagactgatgggtcttgactctttatccaatttgccagtctgtgtcttttaattggagcatttagtccatttacatttaaagttaatattgttatgtgtgaatttgattttatggacaagtttttaaaagtgtttgcagtggagagtatttattgtctattgcttagtagtaaattaccccaaaactcagtggtttaaaacaaacatgtattaattcacagtttttcgtggtcaggaatctgagaaaaatttagctgggtagttccagacacggattttctcatgaggttgcattcaaaatatgcaagggctgtggtcatctgaagtctagactggctacagggtctggttccaagcttacktttgtgattgtcaggaggcctaagttcctcactggctgttggcagaggcctcagttcctcatcatgtgggcctttgtagggctgctctcaatatggtagctagcttctgtgatagtaacagagatgaagagaagtagatttgtaaaagaccaagaatgcaaagtcagtattacttggtgactgatgagatgtgtgggaggtcaagagagagagagagagtcaagaataatacctatgtttctgacttgacgaaattgcagttgagtgattgtaccgttcaatgtaagtggactgtggtagcaatgtagaaaatggattagttaaggaagactgggtgaagaaacactagctaggttattgcagaaggccagactgagttcaggcagtagcaatgggttggaaatggtaagagatggaatggatagaattattatgatacagggcagagaaagaagtcaaggctcactytggggaattatatttaggcacctagtggataattatgttattgccaagataaggwtggtgagaaaaggagcaggtttggaggaaaataacacagcctcaatttgaatatattgccatgtgtcaacgacagagacrtcttctgagaaatgtgtcattaggagatttcatccttgtacaaacatcagagagtgtacttaaaaaaaactagatggtatagtccactacacatctaggctatacagtatagcctattgctcttaggctacatctgtacaatgtgttacaatgtactgaataccataagcaactgtaacacagcggtaagagtttgtgtatctaaatgtatctaaacatagaaaaggggtaatgtgttgcactasagagttacaacagccacaccatcactgagccataggaatttttcagctccattataatcttatgggaccccatcatatatgtggtccaccattgcctgaaatgtcattatgcaggactgtattgtgtttgacgtgtttacgtgatatccaagtacagtttttcactgggcagttggtaatatgggttttgaattcataagagaagtctaggttgtagaaaatgatttaggagttaggccatagtaatcmctgaagtaagcataattaatttaaagaaccctataaaaaagtcattattctacctctgaagatgagggaacatttcaaagagattttgactttttttttttttttttttttttttgaaatggagtctcactctcaccaggctggagtgcagtgtcgagatcactgctcactgcaacctccacctcccaggttcaagcagttctcctgcctcagcctcctgagtagctgggactacacacgtggccaccatgcccagctaattttttgtatttttagtagagacgggggtttcaccatgttggccaggatggtctcgatctcttgacctcgtgatctgcccacctcggcctctcaaagtgctaggattacaggcgtgagccacygcacctggccaattttgacatttttaactagtccaggaaacagaagagtgtgcaagaaaagggtgctcctatcagagctaagccctgtatagtatacagcacactaaaacctcaccaaaatcaatttgttcataatttatcttctttagtattctgagtattaaaactttgaaatgtctctgtgcatacaaaaagcagaatttggatttgaatttctctcattcactttgaaaggaaagaagattctatatgatatacttgcctttgccaaagaaagtgtgaattctcatgttaccacgcttggacctcaraattttcctgccaatgacaaagaaccatggcttgttgatttctttgcccccgtaagttatttttatctgtcagattctaacattgtcagatcttctcctgttatggcraaaagacattttctagataactytgaatcattagtacaaaaactgtgtcattccattatggccactaatgcatattgcttttaaatgagtgctaatgtaattactcctccagggaaggtttgccgctaagtacagtttgtcttacttagcatattacttgttgcagraatgatgggggsgttttttgtgtcatttggctcggtgcttatgaatattttttctttcctagtggtgtccaccatgtcgagctttactaccagagttacgaagagcatcaaatcttctttatggtcagcttaagtttggtacactagattgtacagttcatgagggactctgtaacatggtaaggcaaagtatcaaaaattattctaattaattttataaaatgaagaccttttggctgtttattattaaaacattaaaataacttagaaataatacatcttctatttagagtagtaacaaattatttaaacaaaataatatttttagaaagtggtatcaaatatgattggattaaaccatgcatagctaatcaatgcattgaatgtaaataaggtcttatttatcaaactcaggcaactattttcattaacttcataaaatgcttatatgattttccaattattgaagattgttatatttctttaatatttttgacattttataatttttttcctttggctttcttcatacttctaagtatatttgctggaaagaagttaaaacaatgaacaagccttttgaaatctttgtttaaatgaaattattttctcaggtaaatattcactcctcagttgcaggaagaactaaaaattatataccgtagaatgaaagtacgtaatatcacgtataaaatactttgggcaaaaaaaaaaaaaaaatcaatcctatagtagatctatctccagatctattagtctttaggaaattgaatgacaggggagcatgttaagtgacaccatggatatgaaatctgcacttcccagtatgggagaactttacaggacaaatacccagtatatacattgtatatagtggaggagagattaaaaagacttaaaagactatcagtcaaatacaacatttagactttgttyggatgcagtttaaacaaaccaagtgcaaagaaagagataattggggaaatgtgaacactgacaagatatctgatgatttcaggtaattattgttagtttttgacaacaaaaatgatactttggttatatggaggggagtccttatattttaaatatactgaaatatttgtggatgaaattatagatcatctgaaatttgctttaaaatgatcttgggagtagactagaaagggagtataagtgaagtaaaagtagccatgagtcagtgattattgtagctatatgaatacgcgagagtttgttgctctctacttttgtgaatgttctaaataactcataaaaaataaaatgtttttaaagaacatagatggagaaaagataaagggaaaaaagaaatgggaagaggaaggaaaacaaaagaaagccatacatttttagaacatcacagaagtttaagccagcagcaatggcacatgcctgtagaaatttcattaaaatacatttttataaaaggaaataaacaaggcctttggttttgaatgttttctctgtaactttgaaagaaatgccaaccaaagatacaaaattgatgtgataaacaataattatcttaattttaatttctttagtttagtttttttttttttttttttttgagacagagtcttgctctgttgtccaggctggagtgcagtggtgcaatctcagctcactgcaagctccaccccccgggttcatgccattctcctcccttagcctgccgagtaggtgggattacaggcacccgccaccacgtccggctaactttttgtatttttagtagagatggggttttacagtgttagccaggatggtcttgatctcctgacctcgtgatcctcccacctcggcctcccaaagttctgggattacaggcatgagccactgcgcccagccaatttctttagtttttctacttttcatcttagctcattaaacatatgtgagttcagtgtaaggatttaaaactatgatatcgatttacctggaatagaggccaagattcactactcaccaattagttgccactcaccaattggttgactttgaccaagttacttagcctctcagtaacttagtttcctaatttatacagtgggttttatcattttagcaactaagtataattgttgtgaagaataaatgagaaactacatgttaaatgctaaaataatgctcaacacatagttaaattttagctataattgctttgttaatcagtgaattatttgaatttgcacacatttttcaagactaatataaatgtttccattgttttttcaaaaattatttttgaatcctggtcaaagattccagtttgctaatgagtacttaaaactttaagagtgcaaagttcagctacagcaaatccacagacaaggatctctttataactttttgaaaaataaaaataaaagctttagagagakgcttcctgggctggtgcccattttaattctgagaaggaaattaagcatttcctactataaaggctatcttgaagaagaataaaaagggattacattcatagggcatgattcataattctttaacctaaaatataatcatgtaccccctaattatttgtgtctttattcttgctgttttatttcctgatcatcatctatttctagaaaaagtatttattatggtttaaaaaaaagactcaagctagagatatagcctgttgtttatagcctcttcttaccttggttcaggagagtaaaaagggaccattcgtataattacccatgccgatttctcaatgtttcaatgcctatggttctcatggcgaatggagcagctataaataaggatcaggtattcatcagtatttagcagtattcatcaccataagtcctttgctaaatttggtgagactaaaatttttgtcaccagaaatttagaaatgggtttttaaaatcttgttcttgttacttaaaggcaaacttgttataaatttgtaacaaataggtgaaatctataaaatctttaattcatattctccttcctatcagtataacattcaggcttatccaacaacagtggtattcaaccagtccaacattcatgagtatgaaggacatcactctgctgaacaaatcttggagttcatagaggtatttcagattatagactatgtgactagaaatttgtctgtttctatgtaaaccctgtatgaatgtttcatattgtttaataggatttactcttttcatgcccaaactattttcttacaaaatgatttttaaagaatttttctaatgttttactcttcttatatacttgtctgtaaactcaaagtaaatctgtgttttatttgttacctggtatgtacagtgccttataaacaatggacacaattatttattgaacatatgcaatgtattttcaccttgtcacccctttgcactgttttctctgaaaacaagtgtctggcatctacagcatctttttttttttttttctcagtaacactcttgatagaaatacttacaggggmctcctagaaaaaaaaaaagaaaatttctagtttattattatccatttgatgaccctccaaccctgtcctactcacctgttcctcctcctctgacgtaatgttttgtcttgttttcccagtgaagctagcctcttcatcagtattacctgactgttgtaggctgaagctttgttaaaatatcatttggaacaaagaatctgtagaaaggtgtagtatctccagtcagaatgtcagaaaaatgagatagtaggctttccactagtaattaaagaatcatttccaaaccagtcattcttggttctagaacagaactttatggcctctgtagacatccaggcagcccttgaaactcttttattatccatgcagaaacttaaagttgcctctttgcctgttatgattttagtgatacatagagataaaggataaatagaccttgattttttacaaaactaatgagcaaaatccaaacttaaaaatctaagttaggtttattttcatattttaagataattcacattggatttcttttagctatccttaagcatcttttggtttctcaaaaatgggaactttctaaaggacatacacagattgagcacccctaatccaaaaatcttaaatctgaaatgctccaaagtctgaatttcatgtttagacttgggtttcattcccaagatatatgcaaatattccaaaattcaaaattctcaatacttccaagtattttggataagagatactcaacctgtaccaacaatttgccaggaatatatgaacagctatgctttatatatatgttataatggaagctatattctcttcaggatcttatgaatccttcagtggtctcccttacacccaccaccttcaacgaactagttacacaaagaaaacacaacgaagtctggatggttgatttctattctccgtggtgtcatccttgccaagtcttaatgccagaatggaaaagaatggcccgggtatagtaaaaatagtttattttaaatcttaacatttactaagaatgtttatttaacrgaattattttgaaacggatgtgaatgaacccacaactaaattattacttaataacagtactgatcataccactttgattccagctctgtttctgtctggtgtgtgaatggtatagcctaccatttttgtgtgtatagcatctggtacactttttttttttggtcgggtagcagggggcagagtctcgctctggagtgcagtggcgcaatctcggctcaccgcaacctcaaccaccctagtagctgggattacaggcatgtgccaccacgcctagctaatttttgtatttttagtagaaacagggttttgccatgttggccaggctggtcttgaacccctggcctcaagtaatctgcccacttctgcctttcaaagtgctgggattacaaacatgagcctccgtgcccagtatatccagtacttttgactaaactgttgccaacaacaacccaaaaatttacctcatatttgtttcaattttttctaatttttttcctgctttatttttagagtttaaaaatatcatttcctgacatactgtaggacttaaaagtaagaaaaaaaagctttcagcatgtgtatttagaaaatttcctgaaaataggcaccatgttttaagttgtagaagattggaaacaaatcacttaaataccagaatggaaaatgcaattactacttcacatttgtttacaagataaaacactaaatctgagttaaagtgatttctagtatcttaacatttaggattacatatttttgtgctcttttcaataaaatttttaagttcaggtgtgagtcagtataacacattagacacctacaaagcttgttttcattggaaagaatactttgaaatattgcaaagactttcattagtttctagcactttgaattttagaagtatatagttttttctcatgtaacagttaaatgaaataaattgtttaatctgcaataattttagtaagtacttaattacaaaattagattacaaattcattagtataaatggtctattatatgttaaacccttatccatttttattgggtaaaagtcactgataaataatataataactgtttcaccataataatacaatgcttatttctttattgcaaacatatgtaaaaagttatggaggtaatctgttttttcttttacagacattaactggactgatcaacgtgggcagtatagattgccaacagtatcattctttttgtgcccaggaaaacgttcaaagataccctgagataagattttttcccccaaaatcaaataaagcttatcaktatcagtaagtattctctcatatttgaagacatttattataattatttaattatacacttaacagttaagttacctgaacaaaataaaagttarcccaacaaatatttattgggagcccactacgtaaagatagtttgttaatgaacatttcagaagatgaaaagggagtattgaacagtctcactgtgcataaagcttatagtctagacaaaaagataaggaaaggaagagctaacatttattaagtccttaaacaccttatttggtttcaggtactatattagatactttactcaccttatttccaataatcctcacatatgctctgtgaactaggaattactacccttcctrctattacagagaagtaaactgtgattctcagaccttagaatccaaggtctaggagttatctaaggcttagataacttccccaagtcacacagctgctaagttgaagttgaggtttgaacccaagtctgtctcagcacccatgctgtttccacaacaccacgtggtatttcaggtagaaaactcaaatgtaaggtacatatgatgaatgttattaaacaagtaaaaatgaaccatggatttcaagagaggaaagggtcacaactatgaggaaattatgaaaggctgcattttgtaggtagtttttgacatgtgtctttaaaaatgggtaggaatttgacagacagtaataacttgaataaagattcagaaactaaaacccttggacattctgagtttcgcaattcccataggtctacaggagatgtccagtagacagctagacattctgggctgtctggggcacaaagataccaagactagagaaaaatacatttgtgaggccttataaccagaatttgtagctaggtatatttgagaagagagataccagatgaaatcaatcaatataacttattttttaaattgctacaataagattgttttctgaatacatccaataatagagaatcctatttacaactaacattttttcttctctcagcagttacaatggttggaatagggatgcttattccctgagaatctggggtctagggtgagtaattaaaatatatatcattgtataaaatagattcaaagccatttaccccccttttatatcaatagttaaatttactgtgggttaaggttctagcattttaaattacttagtaaagtattatattaaccaagatagtactgtactttattacattgcccttccttgacatcatttttaacttagaaagtattacaatattattgcatttcatatgtttgctttggttttatataatgaaaaatgattttgatcatttgccacagatttttacctcaagtatccacagatctaacacctcagactttcagtgaaaaagttctacaagggaaaaatcattgggtgattgatttctatsctccttggtgtggaccttgccagaattttgctccagaatttgagctcttggctagggtaagtcatacctgtcttaaataagttgtagccacattcatgttttagtaattagataaaacattgtaagtatgtaatttttaggtttttttcttaaatgtttcctctgaatttaaaaatagctattatatttctatgactgtaatggttgtagtagatttcctctttctttgttaaagcttttagctaacatcttctctatcttggtagacatcatcatctactagccataaaagccagaaacgtctctttcttctccctcttgtctactttctcctccccaccccagtactctgttgccctccaggcagttactagattgtgtcagttttatcccctaaatgtctttcaaatgtcatttcttattcatctctactgctaacctgtttcttcaaccctttatcatctcttgtctagacttaaccatatttgccttttaagtgcagtcttcccttgatatactcaggggattggttccaggaacccccattccataccaaaatctgtgcagctcaggcctcacagtgggccctctgtatgcagggtttcacatcctatgactrttctgttttccatctgcaattgcttaaaaaaaaaaattcccagttcaagcagttcaacacagttcaagcctttgttgttcaagagtcatctatggtattatactgtctacctttgtcagtgctgccctggtgatcttctaaaatatttccctctctgacttactaagtttcttaatatgcatacattgacttcaggtgtctgatatgagctctatctctattgtccacctcacaccttagattccagtgtaacagagtactccaggttctctgaacatgtgtccttatttacatgccgctccctctctctaaaatgctctgtccttaccttggtcatctgtattttttctcctcttactgcaaaactcagctccgatggcactgctctattctctgcccttctcagttaatcagtgtcacctggatatgttatcaagtgtactgatacagtgcatattaattctttatttattattacttgaaagatatttaatttgaccagaaataaaaggagctggataccaatggaaataattagttgtagcaattttgggttttgttcggttggttggttttatttttcggtatagcattgtccatcttcctttgtaaatggctgtctcttcctgagggcaaagtccatgttttatttatttttatatcctcagggcctaactcagtaaatgcttatataaaattaaactgaatacataccctcaatgcagtctgagcttttggtgtttctttctgtcrtaacagtcttattagtgacctaatccagattgatagctttcttgcctccataactcgaggaactcttgccactartgttggtataaaacactcaactggaatgagaaagtcagctccagttccaccagttcacactaaagcttagcatcccaggccatgggaattttttagcagagggattttaaaggtcttactagctataaaagattatttttgttattagctggtgcatcagataagaggtttattctttccattctaatcttcttatgcttccttctgtaataattctgctttactccatttctcatgtactaaaaactttagttataaactttgtaatgcaactctatattgtatctagtagaaaattattaaacatgaaaaagaccatttattcaacaaattttaagtaccaaatgaaaagccattatgctaagtagtagggccacgtaactccacatgaaagaaaaggaagatgaaaagaaagaaattccatgtctttaaggagattttaatctagtggaaagagaaaatggaaataaatataagtaatacaagataattgctacagtaaaattagaatgaagctggaacaggggtagaagggtgtcagtgatgccagagaaggatgtttagagcaccagaaacagtatggtgccatctcataagtaattggaaatacaagtaagcaaatatacaaacattttgtaaatgacatagacacttacgaaattaacatttctacatttttcttactttcggtatgcaagtgtgtgtgtctgcctacatgcttgtgccctaacacaagttagtctgcattttagtaaacccctgccttggggacgaaactagaggcagcaaagatattttaagtgtcctgaagtgagaggtgataactttaatcaggattagggcattggtgatagaaagaaggggacaaatacaaaagacagataagaataaataggattgaatgtgatagatgaaggatagagaggagtctggatgagcctaatttctggcttgaactgaatgaatagaacgaggaaaagtgggttcaggggacatgctgtgtttggrtgcttatgcggcattcacccaaagcaggccaatgcgtggttagatatgaaatcgaagagaatgattggggtacatcagcatatagatatgtaaaaccaccttgggcacctgttcacagtgaaaagattgttgatcaaagatggaactctgattggatattataacttgaggggcaggtaaaggagatcctcatgctggaaaaaggaagmacagtcagaggggtaagaaagccaagagagagtagtgataaatgctaaaaaagaaagaaaggagtggtcagcagtaaacatcagttgcgcaataagaagaccaaaaagtgcccagtttggtcaagcggtcactggtgaacttacagcagtttcagcagagggagcagtaagcacagaagacgactaaaatgttgccaaataagcagacaatgggaagcagtgamacagtagactgctgctcaggaaaaaaaaaaaaagagagagagagcgtgagaagcactatgacagaggaaccataatccaggaaggaatcctttcatgattatatacatcttcactggagaatatgtgttctgacagggagggactggagaatacaggtggagtaagtcagccttcacgagacaaagagtgcccaaagagtcctaccacagcacacccccagtgaaaggagaaaaagatagaaacagaaacatgtttatggtatgatgtgccagtagtgggtggcaggaagaagttgagacattgcaggataaagctgctcagttttcttgatgaggcaaaggagggtttatttgctgttggagaggtggtgctaggtgaataggggcttaaagggataatgtggaaataatcttgtttgagtaggaagaattaaagttttttaaataaattcttagattcaaaatgttttatatcctattgctttgttgttgccaaaatagtttatgccaaacagaaaatggcaaactgtatttttctttttcagatgattaaaggaaaagtgaaagctggaaaagtagactgtcaggcttatgctcagacatgccagaaagctgggatcagggcctatccaactgttaarttttatttctacgaaagagcaaaggtatgtccagactttcctctgttccttcccttagtaggccaagctcaaaagatgtgtttcagtctgagtaatgttttttttctgttttctsatccttgtcatttttttatattattacatattactgatacaagtttttaaaatttacatgtataccaagcgatcttaaaaggttttttgtcttgtggttgatacagactcaattgccttaacatttttatactaatgaataggaaaactactagaaagagacaaaaaaagtattattcgtgataatctttgagtgctggaattcaaggtaattttctacttttctgtgaaaggttatggtgactgttgaggtcactaagaatactctataatacacactgctgcttggaataatatttccttagtatatttctattcagtatactttttactgaataagtttcaaagtaatgagcttcctttgtggggaggaaagaacaatgataaagtatttgccatgtactcatgttttctggtaaaacattaaaaatagataatttcaaatatttttatactttttgtccagagcttatagcttgcagtgaatgccaagaatgagttctcagacaattccagctgaacgggggcaagatagctcttctaagagagtccaccccagcattcatccgcacagtatttattgaaagggcttgttaaaccacaaacatccactagatggcttgaggtccagtcgtgagacacctgtggccttgtaaaagcactcaaactgcattctcaggaggctgtttttagcgttccttatcacaccacacactccactcctgtcctgttttcgggatcaaggaatttcattctcatgcacaaataacatacacacagtgcctcagtatttttccatgccccgacctcaaatgccacgtacataaggttgaatatattgccatgctcccccgatgtctccctcttctttaattcttagcacatgctggtcatccaatgcaaggtaaacttctattgttcttccttggtcatagatacgttgggtggcagcacagagccgtctgcaaatgcctagcaaacagataaaaaaaagaataagtacaacggccatcacctaaatgcatatgtttaacccagacaaccaagtgttggggtttaaccaatgaaaactttcttgtaattgctgaagggtacttgtttgtagttgctgtgactattcttcaagttgttcaatttacactcaagagtggaaatttgagaagacaaatagtcgtgataagccccttgcagatgtgctttcactctctcccaagcatattgggagctattatatggcagaggtgtgacacagaattatattgccaatcacaatgtaaattttgacgggtaatgaatgcctgctgctgatcccctagccattcaaaagtggcttcaagggtctctargtgagacaaaatagttttatcaatatttacctattcctgaaattcatgggttacattatataccatgtggcttatcactgaggctgtgtgaatagattctgtcagagaagcagttgcagtagcggcagttgctaatataataatagctgagagtaaaaaggcaactgaagtggccagaaatcttatttttcaagtatgagacaatgcttttctaaataggtgcagggtggaatcctcttcctagctccaagttaaatttacaggcagccaccattctgcatgccattttaagatcatgacacaggttatatttaattatgtaacgttttgatgagagaagcatgtagcataccaactactggaagagactttaatactataaaaggattgattctgctctatgttaggaacaccttgccgaaacaaaagtatataagggtgcatagtacaaatcaagactatgtcggtaacattattatgcagagagagggtatagttgccaccgctagtaatatactcaccatgggaaagaacccattcaaaaaaaggaagtcctaatctccaaatctgggtatgagcatggcttaaagcttgtttcccttttacttgtaatattggtcctaaaagcccatactctgaccagatgatagaactattggagggactcctaaatccaatagtctgatctgcagacataagattaccatggggaccctaatcaagtaaggtgtcattatcaaacagaggctcttgatgcagcgcaggctgtttgcatggcgaccactggatggcctcacacttatatcgccagtccgtactcagacagcatataggaagatcaggcacttgtgtagcttcattagagacctcagtaagattagtgctaacagcagacataaaggtcaagtttgcaaacttagtatccctttggggctggtaataaagatactcctgaagaatgagagtaacacacttatcatgtgctattatggggaaaaaaagggggattactagacaataaaatcaagtagtaattaagtttaatccatcccaaattttcagttaaggggtaagacaggggcatctatcaacctcctgtcccaaaagtatcattggatgacaaaggcaggtcagcatcccaccatgtaataacattaaaaacggggatttaaaacatgactccaataaacatgttcttgagctgatcccacttggcaaaggacaagaattgccagccaccccaacatccatgtttgtcttactttctcagaagtttccccagttaccaccagatacttaagaaaccgattccatgcggttgcgagggcttccacagctgcaagccaaatagatgcctgttgatycaatttctttagctgtccccaggtagtgttaggtgccttccaagtcatcaccttcattgttgtggtcgattctctaacaacaggtcctgttctcgaaaagagagccccatattccccgttttttgtttaagatatatattaagagtttgataagcttgtttaacaatggcttgactagttgaggtataaggaatactagttttgtgttgtatgtgctaaagttgcaatgcatatgcaaatcgagcactaagctagcaaggtctrttatcaggttttatagtttgtggaaggtttaaagttataatggattcaaataaatgaccaattgcatctttagttttttttctggtctgggggtagcatgtattaggcctgtgtaagtgtacacggtaacgtggagaaatttaaaacgtttaaagggtggatactgagtaacatcagtttgccaaatagcattaggcaccagaccttgtaggttggcaccaagccttaaggaaaaaggggaaagagaatgctgttggcaatcaggacaagttttaataatcatgcgagcttgagcaagtgtcaaatgaaactgttgtttaagaatccaggcgttctgatgaaaaaaatcatgatcagctggactcgcaaaaaagcaggagaatctgcagaccacatctatggtcatactagagcatcaccttgagcattcttttctgataagggaccaggtagcttagaatgagagcgaatatgtatgatgtaaagagggtgatgatgggaccgaggagctcttgtgctggaagaaacaaagctagtaggggttcattagtaatgcccttcacatgtgcaagatttaaatgagtaatactatacaccatgtaagcagaatcactaactatatttatgtcttggtgaggaaaagttggttgcatgctgccttctaggttttatctcagatagctctggctttcttgctacccacagaggcctggggcaggagagttgctaagatgcaactaacttttccttatactccagggaagcagaaaaaagacacggccagaaaggctgatgctggaaataggaaatgagaacttgcatattaggaagactgtcataatcagccactttccttccctcctgtaggcacccctccagcagggaagtttgttgaggagacgcagccacctaatcatacaaatgttcrctgaccgggggtataatctaagaactgtcacttgggcggcctctaatctacttaagggggatgggaggtgctgttgsctgaacggggccaacagatgcaggtccctttaaggttggaggaaagaaaggcaatggcttttctgtagggggaggaaaaggctccagtctgtccttatcctcactagaaaaaatatactccttatgccctacagaagggaatcaagtagagagaggagcacccccgtgctgttctggttcctgtttttcctcactagaaaaaatctcttccttattccccatagaagggaatgaagcstagagtggaatctctccctttaaatcttccaaattcctttcaggtggagataatgggcgatctggtgggtaaagaggataccacgcagagcgtaccggtgcccaggtggccaaaatagtagcgttaataaaatgaccttgctcatttcctcttttcaggcagtgacctacctgcttccataaccctaaatctaaggttccgtgatcaggaaaccaagggcatttctgccaaattaaaagcataagcttgtgtagagctccaggatctacagtgcactggatagccttaagtagctgttgcactgttttaaaaaatactttctgttctttggtcatttcctgacccatgataacccaacccctggtattttatgcatgggtcccatcctcctgatgggagtcaggactgtcccttactgggattcctcgaaaattgatgagctctcctccttcacacataacttcaaggtgatcacgtcgagggcaccacttgcagagcttatagcttgcagtgaatgccaagaatgagttctcagacaattacagctgagcagggccggtgagggggtggggggcagctcttctaagagagtccaccccagcatcatccgtccaccaagtatttattgaaagagcttgttaaaccacagatatccactagatggcttttttgaggtctggtcatgagacacctgtggccttgtaaaaatgctcaaactgcgtttcaggaggctgttttcagcattccttatcatactacacactacactccgtatcctgtttttagggtcaaggagttacattctcatgcacaaataacatacacacagtgcctcggtatttttccatgccccaacctcaaatgccatgtacatacgtatgaatatgttgccgtgtgccccccacattttgaaggagaattaggttaagatctgatgttatttattggtggttacattttgtgatgaatagggctaaattaagaaattggatgatgaatttcagaaatctagaattgccacacatctagatttttcagtgaaggtttttgatttgtcaagaatctgtcttaagaacaatctagagcaagcagaacttgatggaggtgagaggcagcttatatcagagcctgagtcttcatttctttgaatcaacagctctatttctcagttttcagaatagctgagagatgggtgacataaatagggatcttcttcagataatatcagagaagtatcaatttaatgagcagttacaagagttaaccataccatagacagagctgtttgaaaagatgttgccatgtgtccagaggagtccaggggacaaagttaggaaccaaacatccctgtccaaattgaaagacaagggtagcattcagccattgaggccagacaggaaggccaaagcagaataatggttggagtaaggagaaacacaaaccaggtgggcagttacacacaaaacaaaattctagcacatagttggggattagagttcacaccaagattaagacaacaggtggccccagatccaaataagcaggtcaggatatgctgacctgttccttcccctgcttttcagccaccttcctgctgtgcgcagatgaaaactaggagatacatgttgctttccattactgttgttggtcatggttgggcagtgctaatgattgtattagagtggaatgagttcggtcctctgggaacatctttttgtttgtttgttttaattatactctaagttctagtgtacatgcgcacaatgtgcaggtttgatacataggtatacatgtgtcgtgttggtttgctgcacccatcaactcatcatttacattaggtatttctcctaatgctatccctcccccagccctgaactccccaacaggccccagtatgtgatgttccccccactgtgtccaagtgatctcattgttcaattcccacctgtgagtgagaacatgagatgtttggttttctgtccttgtgatagtttgctgagaatgatggtttccagctacattcatgtccctgcaaaggacatgaacgcatccttttttatggctgcatagtattccatggtgtatatgtgccacattttcttaatccagtctatcattgatgtacttttgcggtggttccaggtctttgctattgtgaatagtgctgcagtaaacatatgtgtgcatgtgtctttatagtagcatgatttataatcctctgggtctatacccagtagtgggattgctgggtaaaatggtaattctaattctagatccttgaggaatcgccacactgtcttacacaatggttgaactaattaacactcccaccaacagtgtaaaagtgttcctgtttctccacatcctctccagcatctgttgtttcctgactttttaatgatcgccattctaactggtgtgagatggtatctcattgtggttttgatttgcatttctttgatgaccagtgatgatgagcattttttcatgcatctgttggctgcatagatgtcttcttttgagaagtgtctgttcatatcctttgcccactttttgatgggtttttttttattgtaaatttgtttgagttctttgtagattctggatattagccctttgtcagatgggtagattgccaacattttctcccattctgtaggttgcctttcactctgatgatagtttcttttgctgtgcagaagctctttagtttaattagatcccatttgtctattttggcttttgttgccattgcttttggtgttttcgtcatgaagtccttgcccatgcctatgtcctgaatggtattgcctaggttttcttctagggtttttatggttttagatcttacgtttaggtctttaatccatcttgaattaatttttgtataaggtgtaaggaagggatccagtttcacctttctacatatggctagccagttttctcagcaccatttattaaatagggtatccccattgcttgtttttgtcaggtttgtcaaagatcagatggttgtagatgtgtggtgttatttctgagggctctgttctgttccattggtctatatatctgttttggtaccagtaccatgctgttttggttactgtagccttgtagtatagtttgaagaaaggtactgtgatgcctccacctttgttctttttgcttaggattgtcttggcaatacgggctcttttttggttccatatgaaatttaaagtagtttttttcaattctgtaaggaaagtcattggtagcttgatggggatggaattgaatctataaattactttgggcagtatggccattttcacattattgattcttcctatccattagcatggaatattcttccatttgtttgtgtcctcttttatttccttgagtagtggtttgtagttctccttgaagaggtccttcacatcccttgtaagttggattcctaggtattttattctctttgtagcaattgtaaatgggagttcactcatgatttggctctctgttgatggtgtataggagtgcttgtgatttttgcacattgattttgtatcctgagactttgctgaagttscttatcagcttaaggagattttgggctgagatgatggggttttctaaataaacaatcatgtcatctgcatacagggacaatttgacttcctcatttcctaattgaataccctttatttctttttcttgcctaattgccctggccagaacttccaatactatgttgaataggagtggtgagagagggcgtccttgtattgtgctggttttcaaagggaatgcttccagtctttgcccattcagtataatattggctgtgggtttgtcatgaatagctcttattattttgagatacattccatcagtacctagtttattgagtttttagcatgaagggctgttgaattttgtcaaaggccttttctgcatctattgagataatcatgtagtttttgtctttggttctgtttatgtgaaggattacatttattgatttgcatatgttgaaccagccttgcatcccagggatgaagctgacttgatcttggtggataagctttttgatgtgctgctggattcagtttgccagtattttattgaggattttcacatcaatatttaggattttmatcgatgttcatcagggatattggtctaaaattccctttttttgttgtgtctctgccaggctttggtatcaggatgatgttggcctcataaaatgagttagggaggattccctctgtttctattgattggaatagtttcagcaggaatggtaccagctcctctttgtagctctggtagaattcagctgtgaatccttctggtcctggactttttttggttgataggctattaattattgcctcaatttcagagcctgctattggtctattcagaaattcatcttcttcctggtttagtcttgggagggtgtttgtgtccaggaatttatccatttcttctagcttttctagtttatttgtgtagaggtgtttatagtattctctgatggtagtttgtatttctgtgggattggtggtgatatcccctttatcattttttattgcgtccatttgattcttctctcttttcctattagtcttgttagcagcctatcaattttgttgatcttttcaaaaaaccagctcctagattcattgattttttgaagggttttttatgtctctctttcagttctgctctgatcttagttatttcttgtcttctgctagcttttgaatttgtttgctcttgcttctcyagttcttttaattgtgatgttagggtgtcaattttagatctttcctcatttctcctgtgggcatttagtgctataaatttccctctaaacactgctttagctgtgtcccagagattctggtatgttgtgtctttgttgccattggtttcaaagaacatctttatttctgccttcatttcgttatttacccagtagtcattcaggagtaggttgttcagtttccactagttgtgtggttttgagtgagtttcttaatcctgagttctaatttgattgcactgtggtctgagagacaatttgttgtgatttctgttgttttacatttgctgaggagtgttttgcttccaattatgttgtcaattttagaataagtgcagtgtagttctgagaagaatgtatattctgttgatttggggtggagagttctgtggttgtctattaggtctgctttttgcagagctgagtgcaagtcctggatatccttcttaaccttgtgtctcattgatctaatattaacagtgtggtgttaaagtctcccattattattgtgtgggagtctaagtgtctttgtaggtttctaaggacttactttatgaatctgggtgctcctgtattgggtccatatatatttaggatcgttagctcttcttgtggaattgatctctttaccattatgtaatagccttctttgtctctttgatctttgttggtttaaaatctgttttatcagagactaggattgcaacccatggtkttttgttttgttttgttttgttttgttttttggtttccatttgcttggtagatcttcctccatccctttattttgagcctgtgtgcatctttgcacatgagatgggtctcctgaatasagcacactgatgggtcttgactctttatcaaatttgccagcctgtgtcttttaattggggcatttagcccatttacatttaaggttaatattgttatgtgtgaatttgatcctgtcattatgatgttagctggttattttgcctgttaattgatgtagtttcttcatagcatcaatggtctttaccatttggcatgtttttgcaatggctggttccagttgtttcttcccaagtttagtgcttccttcaggagctcttgtaaggaaggcctggtggtgacaaaatcagcatttgcttgtctgtaaaggattttatttctccttcacttatgaagcttagtttggctggatatgaaattctgggttgaaaattcttttaagaatgttgaatattggcccccactatctcctggcttgtagggtttctgccgagagatctgctgttagtctgatgggcttccctttgagggtaactcgacctttctctctgcctgcccttaacattttttccttcatatcaaccttggtggatctgacaattatgtgtcttggggttgcttgtcttgaggagtatctttgtggtgttctctgtatttcctgaatttgaatgttggcctgccttgataggttgaggaagttctggataatatcctgaagagtgttttccaacttggttccattctccccatcactttcaagtacaccaatcaaacagatttggtctttccacagagtcccatatttcttggaggttttgttcatttctttttactctttttttctctaactttgtcttctcgctttatttcattaatttgatcttcaatcactgataccctttcttccacttgatcaaattggctattgaagcttgtgcatgtgtcaccaagttcttgtgccatggttttcaactccatcaggtcctttaaggtcttctctacactgtttattctagttagccattcgtctaatcttttttcaaggtttttagcttccttgcaatgggttcaaacatccttctttagctcagagaagtttgttattaccgaccttctgaagtctacttctgtcaactcatcaaagtcattctccgtccagctttgttccattgctggcgaggagctgcaatcctttggaggagaagaggcgctctgatttttagaatttttagcttttctgctctggtttctccccatctttgtggttttatctatctttggtctttgatgttggtgacctacagatggggttttggtgtagatgacctttttgttgatgctgatgctattcctttctgtttgttagttttccttctgacaggtccctcagctgcaggtctgttggagtttgctggaggtccactccagaccctgtttgcctgggtatcaccagcagaggctgcagaacagcaaatattgcagaacagcaaatattgctgcctgatgcttcctctggaagctttgtcccagaagggcagccgcctatatgaggtgtctgtcggcccctactggaaggtgtctcccagtcgggctacatggggatcagggactcacttgaagaggcagtctgtcccttctcagagctcaaatgccgttctgggagaaccaccactgtcttcagagctgtcagacaggaacgtttaagtctgcagaagttgtctgctgccttttgttcagctatgccctgccaacagaggtggattctagaggctgaaggccttgttgagctgtggtgggctccacccagtttgagcatccctttccactttgtttaccttctcaagcctccacaatggcagacacccctcccccagccaggctaccacctcacagttcaatcttagactgctgcactagcagtgagcaaggctccatggktgtgggaccctctgagccaggcccaggagagaatctccttgtctgcagattgctaagaccttgggaaaagtgcagtatttgggcgagagtgtcccgttttttcaggtagtctgtcacggtttcccttggctaggaaagggaagtcccctaaccctttgcacttcccgggtgagacaacaccccccccaatccccgccctggcgtcttctcgccctctgtgggctgcacccactgtccaaccagtcccaatgagaagaaccagatacctcagttggaagtgcagaaatcacctgtcttctgtgttgatcacactaggagctgcagactggagctattcctactcagccatcttggaatgccctctcaaactttatccaggaacatctgttcttgcacagttkcgatgttttgaggcttttggagtcagtgatgctttttttttttttttttaacaattgtttcatgtttccgtgacactattattagtatttattttaggtacattatgggttaactgcttttgcagcattatttccttgaagagaataaatttgaatttcaaacacttcaagttttggaacaaaagaacttgaaagcatatttaatcaagtttcttaggtggaaatgttatgtttttattaaatacttaaaagataacaagtgtttttaattttagagaaattttcaagaagagcagataaataccagagatgcaaaagcaatcgctgccttaataagtgaaaaattggaaactctccgaaatcaaggcaagaggaataaggtatggactaagcctagagttgactttggcaaaagttggcaaaagttagcaaaatctatttttcctatacattacatgcatccagagacaacaaaatgaggcatcaaaaaatagtaagatagctgaaaattctactttgggaaataggacaatcaaaatgtagcctagacactgaaatgcttttaaaaatttggacaagtaaamccacttaacaaaaaatagtgactgtggtccatgcaaaaacatgtatacaaatatttatagctgtatcattcataatagcaaaaaaaagaaatgtctgtcaactgacagataaatgaaatgtggtgtatccattgaatagaatattttcagccataaaaggaatgaagtactgacctatgctacaacatgtttgaactctggaaaatgtttagtgaatgaagccagtcacaaaggccaaatattatataatactattgatgttaaatatctagaataatccatagggacagaacgtaggttaatggttgcctggggccgaagtggagtgggatagaaaagagcaaaaatggggtaactgctaatgggtagtaaggagtttattttgggaatatggaaaaatgttttaaaattagattgtaatgacagttggacaactctgaatataccaaaaaccactaaactcctttaaatgtgggaattttatggtatgtgaaatatatctcaacaaagccattaaaaaaaaaatagtgactgtggccataaattatttaaattttgttcaaatgtaaataaagcattgaattgttaggaataaatatactggagcctcataacacgttttgaatagcaaattttcttttgttcttggtgtaatcagaatgtattgaaacccatatttgtgttggcccctctttgaatctttaatctgtcaagaagcagcacaacctttttcctgttactcttcagaaggcagttcagttttacctttttcaaatcggtgttactgtagatcatacttaaaaacagaacaaagagtctatgaatgttgtagtgcttttaaaatggaatttaatacaatcacatgaggtatctcggattctttccctatgaggcgaaaggaggacaaaatagctcagcctctggaaagggctagagaagactggctttatagcaccatattagacaataggttctactgtaatccagttcaaactgcagaccccaatagacaaagccttacaacctacctcaagaatattttttacgaatctgaaaggtaggaaagagttatgagtctgtattttcttgkttccactgaacaaacatgtttttctagtgtttcgctatattagttttctcaagatattttattttgaaaggtgtaacttttatctcattaaatatttgaaatttaaaaattgtcataatctaaaatatcatacctgaaattaagttaaagagaatacccaatatgcttgaaattatgtaaacctatatagttagtaatatctgctgtgagcaggtaagaactaggatattcttttcttttttattgttatattttggcaaagtatatttcatgtcatgatccattaaataagaatattgagtatttctgaaaaagtaaaatgttggtttgtggtatttcaccttatttttaacattaccaactcatactttctcctttctctatcgcctttacattattattataggatgaactttgataatgttgaagatgaagaaaaagtttaaaagaaattctgacagatgacatcagaagacacctatttagaatgttacatttatgatgggaatgaatgaacattatcttagacttgcagttgtactgccagaattatctacagcactgstgtaaaagaagggtctgcaaactttttctgtaaagggccggtttataaatattttagactttgcaggctataatatatggttcacacatgagaacaagaatagagtcatcatgtattctttgttatttgcttttaacaacctttaaaaaatattaaaacgattcttagctcagagccatacaaaagtaggctggattcagtccatggaccatagattgctgtccccctcgacggacttataatgtttcaggtggctggcttgaacatgagtctgctgtgctatctacataaatgtctaagttgtataaagtccactttcccttcacgttttttggctgacctgaaaagaggtaacttagtttttggtcacttgttctcctaaaaatgctatccctaaccatatatttatatttcgttttaaaaacacccatgatgtggcacagtaaacaaaccctgttatgctgtattattatgaggagattcttcattgttttctttccttctcaaaggttgaaaaaatgcttttaatttttcacagccgagaaacagtgcagcagtatatgtgcacacagtaagtacacaaatttgagcaacagtaagtgcacaaattctgtagtttgcygtatcatccaggaaaacctgagggaaaaaaattatagcaattaactgggcattgtagagtatcctaaatatgttatcaagtatttagagttctatattttaaagatatatgtgttcatgtattttctgaaattgctttcatagaaattttcccactgatagttgatttttgaggcatctaatatttacatatttgccttctgaactttgttttgacctgtatcctttatttacattgggtttttctttcrtagttttggtttttcactcctgtccagtctatttattattcaaataggaaaaattactttacaggttgttttactgtagcttataatgatactgtagttattccagttactagtttactgtcagagggctgcctttttcagataaatattgacataataactgaagttatttttataagaaaatcaagtatataaatctaggaaagggatcttctagtttctgtgttgtttagactcaaagaatcacaaatttgtcagtaacatgtagttgtttagttataattcagagtgtacagaatggtaaaaattccaatcagtcaaaagaggtcaatgaattaaaaggcttgcaactttttcaaaaacctgttagaatatgctttattgtgttttgaggagttttcctttttttcttttcaatatcactttatcctgctcaccagtatttcctcataagggttattatagccataattaatgttaaaatagactttgttcttcatattctcccatctttttcgctactatatactctgtctggattctgctgtatgcctgttggcatatatggaacagtcaccacttgtcacacttaacaccagctttttgaattatgatcagtaatggcaagagcctttcattctcgaatgtttaaagcctaggagttctacaaaattggcttctttctacaagaatcccaaaatggaatgcctaaagaagtcttacttgggtaaatacttactaaaatatactggttatgtgcatatcaccacactggacactgaggagtgttcaaaaggaatctaagacatggtccccatcttccaactgtctgtaattcactgttttgtcattgagctcataaggtacttacattactacctataaatgtttcctgtacttgttagttgttgagaaacattttaggcagtaaataaaatagtaaatattatgtgtcctataatttgacctaagctgtgtgcctttggaatcagctctaagccagggcccccygggagtcatgttaagwaacacgtatcataaagtgacatacatcaaggttatcttatatagtcataacagtattattgggtctttcaaaaacagctggcagattgagcttttaatggctatattgatacagtagatagagcacctctaaggagtaccaggtataatgtgccatttctctcagcaacaccatttttgtgtgcagctgaccctctaacatggtatcaattctagctgaccaaagcacattctatcaggcagccaggcttggaaattaggtccatttaaagtatgtggcttacagtcaggtatggtggtgtgcgcctattgtcccatctacttgagaggctgaggcaggagggattgcttgggctcaggattttgaatccagcctgggcaacatagcaagaccccatctctaataaataaattatgttttgggcattaatgatgtttgtctattctgatttctcaaattttatttaggtctttcatagcttttttatttaaaggtatatgattaagataaaggaaaagtaaaatgaaatgtttatgtaattttatattctcaaaattttctttaaatttgctctgttttctgacagtgctcaaagtgggaatttttttagaagtacggttatcaaaaaaacacatttcctatgggacacacatttcaaagatgtttagtacgataaaatttttagtaaaagggtagcacttttaagtcatttgaatagaatatttgtgtaatatttagtctagtgttagtccttaaatctgccaacaaaaccagatagatgtcttaaagtaggcacatttattccattgtgactgttaagaaataataaaagattaaattaacaaaatgcattttaaatttttatgatacctatagaaaattgataatgaagatgaaaagtaaataacctttctgataatattctactttacacatatactgaaaacttacttacatatacccaaattcttctagtgaagaagtttgtaatatggtttgagtatttgtcccctccaaatctcatgttgaaatatgatccccagtgttggatatggggcctggtgggaggtgtttgggtgatgggggctgatccctcataaatggctttgtgccttccccagtggtaatgagttcctgctgtgtttattcctgcaagagctggttgttaaaaggaacttggcaccaccacctcctctctttctcgctccttctctgtgtgacatgccttctccccccgtgccttctgccatgagtaaaagctccctgagacctcaccagaagctgagcagatgctggtgccatgtttttacagcctgcagaactgcaagtcaaataaacgttttctttataaggtaaccagtcccaggtattccttcattgcaatgcaaaacagactaatacagtttcttttcagtaagaattacaaaatttaggccaatgaccaagctgagtataaattactaatcatacacaaaaatgtgtttcactggcttgagtcatttttctgtttaacactgaatttacacttagattcttgtactgtcactgagtccccttgtaaacagctaggtatattttgtgaatggaaactagccaaaaatacagccaaagtctcaacgccaaactggtctacatcagtatggactccagaaatgcatctttcaaccacttgattgcattaagtagtcatttgagtgcatcacctagtggcctttggtcctgaaagttagcaatcatccccaaaaaggtctgtgttaataactgatagacaatcttcattaagcaactgctgttttttttttttaatacttcaagttctgcaatacatgtgcagaacatgcaggtttgttacataggtatacatgtgccatggtggtttgctgcacccatcaacctgtcatctacattagctatttcttctaatgttgtccttccccttgccccctaccccgccgacaggccccattgttgatgttcccctccctgtgtccatatgttctcattgttcaactcccacttacgagtgacaacatgtggtgtttggttttctgttcctgttagtttgctgagaataatggtttccggcttcatccctgtccctgcaaaggacatgaacgcatccttttttatggctgcatagtattccatggtgtgtttgtgcccgtttctttatccagtctaacattgatgggcattttggttggttccaagtgtttcctattgtgaatagtgctccaataaacatacgtgtgcatgtgtctttatagtaaaattatttataatcctttaggtatatacccagtaacgggattgctgggtcaaatggtatttctatttctagatccttgaggaatcgccacactgtcttccacaatggttgaacaaatttacactcccactaacagtgtaaaagcattcctatttctccacatcctctccagcatctgttgtttcctcactttttaatgatcgccattctaactgatgtgacatggtatctcattgtgtttttgatttgcatttctctaatgaccactgatgatgagctttttttcatatctttgttggccacctaaatgtcttcttttgagaagtgtctgttcatatcctttgcccacttttaatgggatttttttcttgtaaatttaagttccttgtagattctggatattagccctttgtcagatggatagattgcaaaaagtttctcccattctgtaggttgcctgttcactctgatcatagtttcttttgccatgcagaagctctttaattagatcccatttatctgttttggcttttattgccattgcttttggtgttctagtcatgaagtctttgcccatgcctatgtcctgaatggtgttgcctaggttttcttctaggttttttatggtttcagaccttacatttaagtctttaatctatcaacttaatttttatataaggtgtaaggaaggggtcccagtttcagttttctacatgtggctagcctgttttcccaacatcatttattaaatagggaatcctttccccattgcttgtttttgtcaggtttgtcaaagatcagatggttgtagaagtgtggcgttatttctgagggctgtgttctgttccattggtctatagctctgttttggtaccagtaccatgctgttttggttactgagccttgtagtatagttcgttctttttgcttaggattgccttggctatatgggctcttttttttttggttccatatgaaatttaaagtagttttttccaattctgtgaagaaagtcaatggtagcttgatgggaatagcattgaatctataaattactttgggcagtatgactatttcacaatattcttcctatccatgagcatggaatgctttttccatttgtttctgtcctctctcatttccttgagcagtggtttgtagttcttgaagaggtccttcacgtcccttgtaagttgtattcctaggtatttaattctctttgtagcaattgtgaatgggagttcactcacgatttggctctctgtttgtcaattattggtgtataggaatgcttgtgatttttgcacattaattttgtatcctgagactttgctgaagttgcttatcagcttaaggagtttttgggctgagatgatggggttttctaaatatacaattatgtcatctgcaaacagagataatttgacttcctctcttcctgtttgaatacgctttctttctcttgcctgattgtcctggccagaacttccagtacataggagtggtgagagagggcatccttgtcttgtgccggttttcaaagggaatgcttgcagcttttgcccattcagtatgatattggctgtggttttgtcataaatagctcttattattttgagatatgttccatcatatctagttttttgagtgtttttagcatgaaagggtgttaattttatcgaaggccttttctgcatctattgagataatcatgtttttgtcataactgctatttcaaatgtttggaggaagtaaaatgtctttaaaagaataagtgttgatttttggaaaatatgaaattggaaacttagaaaacttgaattctaagtggctatttatattaccaagcggtaaaacattagctaactaaaacatggttctgaagccagttaactagcaaaaagtcccacctatgcattgaaatatctttctcaagtcattagataaagtatatggcgttaaggcaaaaaatacatatacacacacaaaaaaaatatttcagcagccactgccaactgaaagtaataaaatgaaacaatttgttggctttaatgtatttaggaaaaatcatttatttacaaaacatcttccctttcttatcatgaaaattatgaagatgaggtaaagtctgttccatttttcctctatttttgagaaatcttagatttatctttaccagtctgtaacccagctttcttgttttatattttaaatatactttctattttgtgacaggagtgaaaaaatgtttaatgattttaaacatgtttatatatatttttcagacttggaacagcagtatctcatgttttactataaaaacttgggtatattacttgaagatcaactatattgttatttttagtatgttagcaattcatctgtcaataatcaccaaagaactcaagaatgaataacatgatctatcaaaaggcctataatctcaatcttcatgttaagactttggaaagttaatttgtattaattaactaatataaattaatcctatcaagttaatttgtaataaattcaagatgcaaaaagaaaacctatttcactaccgaaattaaataaactttaaaattcattttgttggctgggtgcagtagctcacgcccataatcccagcactttgggaggccaagtggaaggatcacttaaggccaggagttcaagaccagcctagccaacatagtgaaaccccatctctactaaaaatacaaaaactagctgggcatggaggtgtgtgcctgtaatcatctaccctggaggctgagacaggagaattgcatgaacccggaggcaaaggttgcagtgagcagagatcacaccactgccctccagcctgggtgacggagtaagaccctgtctaaaaaaaaacaaaacaacaaaaaaaatcattttgttggtattttatataaacttaagaaacctccccacacaaacacacacagccatattgtcatctctgaagayagcagccacatgtgtcttattccctgcagtgttggcagaacctagcacattgttgacccgtagaagcacagtgtgtatttcaattgacaaacagccagaagtattatactgttgactgtgtttaaaactaatttgccagagttctactgtgataagaatttctgactagaaattataaattcattgttttatgccttaaaaattataaataatgataagtttaatttgcagcccttatagcttagaggcattgtagttgatattatagtaacccttttagatgttagtaacttttattgtaaaatttaaggtagctctacctgctaaagtagcacctattcttttgaaaggaactttctcaaaggatttttagggcttcataatttcttgttgctctgtgtaaatccctctgataggcttccctgaaggattttaagcagaaataacatcaggtaccagtagatggcagtgaaaaataagcagacacatttttctgataaaatgccatttctacctcagtacttgataagaatcacacagtctagctggcctttgtgttttcactaaaaatatcctgaattatcagtcagttatgtttgactatgagaaattgcagaaaagttaaaagtatttcgcatccaaaagtttgtaatctagtgtaataaataggacagatactcaaagtgtatgaatggtatgacaataaatttagaaaatcatacaggcacacacactgctatagacatgtaaagatacatacatgtattggagctcagcagattcccattcatgaagaatggtgcctgtgtaacagtataaatggatcacttctaat

SEQ ID NO: 95037 - DNA, 39998 bp, Homo sapiens
  misc_feature (1)...(39998): n = A,T,C or G
aaacacattcaaaagctagcagaaggcaagaaataactaagatcagagcagaactgaaggaaatagagacacaaaaaacccttcaaaaaattaatgaatccaggtgctggttttttgaaaagatcaacaaaattgatagactgctagccagactaataaagaagaaaagagagaagaatcaaatagatgcaataaaaaatgataaaggggatatcaccaccaatcccacagaaatacaaactaccctcagagaatactataaacacctctatgcaaataaactagaaagtctagaagaaatggataaactcctcaacacgtacatcctcccaagactaaaccaggaagaagttgaatctctgaatagaccaataacaggctctgaaattgaggcaataatcaatagcttaccaaacaaaaaaagtccaggaccagatggattcacagctgaattctaccagaggtacaaggaggagctggtaccattccttctgaaactgttcccatcaaaagaaaaacagggaatcctccttaactcattttatgaggccagcatcatcctgataccaaagcctggcagagacagaaccaaaaaagagaattttagaccaatatccttgatgaacattgatgcaaaaatcctcaataaaatactggcaaaccgaatccagcagcacatcaaaaagcttatccaccatgatcaagtgggcttcatccctgggatgcaaggctggttcaacatatgcaaatcaataaacgtaatccagcatataaacagaaccaatgacaaaaaccacatgattatctcaatagatgcagaaaaggcctttgacaaaattcaacaacccttcatgctaaaaactctcaataaattaggtattgatgagacgtatctcaaaataataagagctatctatgacaaacccacagccaatatcatactgaatgggcaaaaactggaagcattccctttgaaaactggcacaaaacagggatgccctctgtcaccactcctattcaacatagtgttggaagttctggccagggcaatcaggcaggagaaggaaataaagggtattcaattaggaaaagaggaagtcaaattgtccctgtttgcagatgacatgattgtacatctagaaaaccccatcatctctgcccaaaatcttctcaagctgataagcaacttcagcaaagtctcaggatacaaaatcaatgtacaaaaatcacaagcattcttatacaccaataacagacaaacagagagccaaatcatgagtgaactcccattcacaattgcttcaaagagaatacaatacctaggaatccaacttacaaggatgtgaaggacctcttcaaggagaactacaaaccactgctcaaggaaataaaagaggatacaaacaaatggaagaacattccacgcttatggctaggaagattcaatatcgtgaaaatggccatactgcccaaggtaatttatggattcaatgccatccccatcaagctaccaatgactttcttcacagaattggaaaaaactactttaaagttcatatggaaccaaaaaagagaccgcatcgccaagtcaatcctaagccaaaagaacaaagctggaggcatcacgctacctgacttcaaactatactacaaggctacagtcaccaaaacagcatggtagtggtaccaaaacagagatatagatcaatggaacagaacagaggcctcagaaataatgtcctatatctacaactatctgatctttgacaaacctgacaaaaacaagaaatggggaaagtattccctatttaataaatggtgctgggaaaactggctagccatatgtaaaaagctgaaactggatcccttccttacaccttatacaaaaattaatttaagatggattaaagacttaaatgttagatctaactgcataaaaaccctagaagaaaacctaggcaataccattcaggacataggcatggtcaaggacttcatgactaaaacaccaaaagcaatggcaacagaagccaaaattgacaaatggtatctaattaaactaaagagcttctgcacagcaaaagaaactaccatcagagtgaacaggcaacctacagaatgggagaaaattttcgcaacctactcatctgacaaagggctaatatccagaatctacaatgaactcaaacaaatttacaagaaaaaaacaaacaaacccatcaaaaagtgggcgaaggatatgaacagacacttatcaaaagaagacatttatgcagccaaaagacacatgaaaaaatgctcactggccatcagagaaatgcaaatcaaaaccacaatgagataccatctcacaccagttagaatggcgatcattaaaaactcaggaaacaacaggtgctggagaggatgtggagagataggaacacttttacactgttggtgggactgtaaactagttcaaccattgtggaagtcagtgtggtgattcctcagggatctagaactagaaataccatttgacccagccgtcccattactgggtatatacccgaaggattataaatcatgctgctataaagacacatgcacatgtatgtttattgtggcactattcacaatagcaaagacttggaaccaacccaaatgtccaacaacgatagactggattaagaaaatgtggcacatatacaccatggaatactatgcagccataaaaaatgatgagttcatgtcctttgtagggacatggatgaaactggaaaacatcattctcagcaaactatcacaaggacaaaaaaccaaacaccacatgttctcactcataggtgggaattgaacaatgcgaacacatggacacaggaaggggaacatcacacactggggactgttgtggggtggggggagggggagggatagcattaggagatatacctaatgtaaatgacaagttaataggtgcagcacaccaacatggcacaggtatacatatgtaacaaacctgcacgttgtgcacatttaccctaaaactcaaactataataataataaaatgttttaaaaattcaatagattttacaatatttttaaataattatgactttgtatttatacattttatttgtattagtatgttttcttacattaattatactttttataaggacaagatccgactcagtactgatgttctttagagcctacttacacatttcattgtattttactttagtaagaaagccacaaaataaaaatctacattaaaatatgtgtgtacaaaaaaaatctgattcccagcctattcctgtttgcaattgctgcaacattaaaatatagcacatcaaatacatatttgcttctcggctaggatcgccaaagaaaaaacatcttatgatttgtggttgctgttatttaatcttccctgagcttcatcttccctcatctgtagaaggggaatattattgagtttggagtgcttttgtaatgattaaacacagtagaagatgaaaagtgcccagtgcaattagcaggccttcaatcaaaataagcaagctagctagctagctggctggccagctaaataatgcttccctacatccagaatttccagttgtttcattagatatgcacattcaagtttttacttaggtaattttaaatgtgtcccagtggcaagtgtcctgctaaaggggtactgttagcttcttctcacctaaaacttagtttgttacaaaggaaatgccaattatggaaaaagtcaagccttgagctactgaaggccgagtaacctcgccaaagtttggatgagtcgcttcactaatgcacatgcaatcctgacctagagatcatgtgagtttctgcgttagaaggcgggcacctgatggctcccagtgcagccaatcaggagagaacgttgccgccacacccacctgctccgcgctggccctgggagaggagccaacctgtcttgctttttttttttttttaaccaggctaagctgctgtaaattaagtcttcctggaaatctcagcaactctattggacgtgctaatggcacagttcactccaaactggattcatatttaaatattacatatcctccaactcttgagtgctttaattttgttatctggttagcctgggaaatcattttaaaaatacgctataagtatcagactttcccttagcaattatataaaatctccttgcagttttctgaaaggcacagaagtgcagtttgatttggttgtcttrtcaaaggacatttatgcatgaaaataggctgcaggagtattctatataagatagcaggcagttctgcacgtctgtttatatgccattcacaccatgaacacatccaatgcaattgtattcatcttctgtcattttttaaaattagagtttactacatgatttttggaggacggccatatcatagttattcatcccttgcatggtctgttctgccacttctaaagttctgcgaagtttaatttttggcaggtttcaagattctctacatactttgtaggttagagtgaacgtgcacagtatattgtgtaataattgcaatacaagacggtgtgttgtgttgtggcacggaatgcatcaacttaaagatagaattgttatgcagaatagagacctttgaaatatttgggtattatcaacttttatttcattttttgagaaaaacttaaaaagtgagcccagttttttaaaaagcatttcattgttctaacctacaattgtgcattgtatgtttgtgtgtgtgtgacggagggtgggatgaataaaaggggacattaaaaatattcagaccataaatatagtagattggaggttctgatttgatgagccagtttctcagccataaactgagagggggttggggatacacttcattgtccttcctggctaatgtaaatcccttatatttaaaaagatatttaaaagtattccaagcattttggcagaaaagcatagtatctaatgttatttttttcttattttatgtgcatgcctcttatccatttaaaaatagctttactgacctataatttacacactatataattctcccattgaaagtgcataattctgttgcttttagtatatttacagagttgtgcagcatcagcataatgtaatctagaacattgtcatcaactacccccaaatctctattcttcccttcccctattaattacccagccccaggcaagcactgatctacttttggtctctatggatttgtctatttgtggacactttaaatggaatcatacaatatgtgtcttttgcgactatcttctttcacttatcataactcaatacggctttagattatttgacctcgatgttctgcctytgaacataaaatattatccttgcattccttgatgagtttgaggattgagaataatttgcatgagacaaaaattagaaactagttagagcaagtaggcttttctccatcacataagctgatccatcttgccaatgttaaaacaccagattgtacaagcacaagctgggacgcaatgtgtgtccctctatccctacattgactttgcgggggtggggatggggtgcggggtgagtgagggaggactgcaagtgacaaacaggattcgtcaaaagagaggtgtattaaagtgccgatcaaatgtaatttaacagctaaactttccctccttggaaaacaggtgattgttgagtatttaacgtgaatcgatgtaaacctgtgtttggtgcttagacagggggcccccgggtagagtggaaccccttaagctaagcgaacaggagcctaacaaagcaaatttttccgtctgccctttccccctcttctcgttggcagggttgatcctcattactgtttgctcaaacgtttagaagtgaatttaggkccctccccccaacttatgattttatagccaataggtgatgaggtttatttgcatatttccagtcacataagcagccttggcgtgaaaacagtgtcagactcgattccccctcttcctcctcctcaagggaaagctgcccacttctagctgccctgccatcccctttaaagggcgacttgctcagcgccaaaccgcggctccagccctctccagcctccggctcagccggctcatcagtcggtccgcgccttgcagctcctccagagggacgcgccccgagatggagagcaaagccctgctcgtgctgactctggccgtgtgrctccagagtctgaccgcctcccgcggaggggtggccgccgccgaccgtaagttttgcgcgcaaactccccwccacctgcagacccggcgggtggccactgccacccgaactgaggatgagaagaaggaagttggaaggggcggtggatgcgcccagggactctcccagcctgggctctagccccgaaacggtccccggagtgggatccaggaggggccgggagggaatctcctcccgatcgtgaagcggcggcgcccagttcccgctttttctctctgccgggttcccgcgctatcccttccactctggctgggaccgcgttcccgggctcgcakgctccgccggggaggttccggggtgtgggggccgggacggcggaggcggggagtaagggcccggctggcggtgacctgcagtcacctctctgccggaggggccctggaatgaaaggcgcgcgggccaaggtgacctcgccttggttggcactgcggctcagcccccgcccggggactcgcgggccgactgtggccccttctggggaagccggggcgcggggaggcgttccgggcatctcagccgcacggggtacgctcgccctcggcggggcccctcgctccgctgtgggagtggcagtgggtgtcggggtggagaaagtacgcgtggcgcggagtcctggggacgcggcgtcccacccgctctggggagccccggactctctccagcttccaggctcgcatgcccctcttttcttagtgccctgagaacccagcgaggggctgaccctcccgaaaccgtggcgcagccaccagcaatctgtggtcgccgactcggggggttgccaggtctgcgtttggccaccctttctgtcctgggggctgaggtcagctccgggcgcccggccccgccgcgcggctgcgagcacktggggttgacgggcgccgcgtggaggcagcgagcacaacggtggtcaccgccgccagggaaccgcccgctcgctggggtccaggcgttcggggccaaatgagaatgtctcagacctgtccgcaatggaggcagcctgcttaattcgaacctcgattcagtaaacatgcaacagcagcatagagagcagctgaagccattcataacacgggacaacatttccttttttcttccatgctggaattgcaattagggcggtgtcgcttggatgtgctctcaggcggcacgtccccagcggttcaagttataatagagtctctccatagctttgatggccgctaaacgtttgttttattttggcattaatttgtgaaacatttttgttaggttaaaaaacaaaaagttggcagggagcagtggctcacccatgtagtcccagcacttcgggaggccgaggccggaagacagcttgagcccagaagttcgaaatcagcctgggcaacatagggagacaccgtctctataaaaaaaaaatacaaaaattagccgggcgtggtggcctgtgcctgtggtcccagatagtcagcaggctgagagatcacttgagccagggagtttcagtagactgcagtgagctgtgattgccccactgcacttcatcctgggtgacagtgagaccctgtctcataaaattaaaacaaaacaaaacaaacactaagtatagattccatcaaagcaaaattggataagaaaaaaagtatcttttctattggatcagtttgaaaacactggagagttgatgagaaagtcttcaacatcttaggtggggtatgtttcgtatgtttcccttcgtactgcttaatgctgacaagaagatggtaggagccaactccaaattcttatttcagaaagcacaccatagaataacgtcattttcattgcaaaacaagcaccgaaatatgtcatcacattcaagtttttcctaggctcccttacaggttcaagatcctaaattcttgggagtcagtgtcacctctctgggtttaggttcctcaactctgcaatgagtttggatgaggccaatgttctctgagcctggtgtaactcttgcctctttaagtggacacttatgtgattaattagtttaattgagttgtagccaacacatgcttttcctagctgtaaatatattaaggaaggattatttccaagtagactggaaacratgccctcccatcccctccactttcactctactcacccaatatatcatgcctctcccatcacagcaactttctccctctttctcctccagatgcattcatctaggaaggtaagaatttcagggagagaaagatgtcaccgtggtagaaagacagggatcacctcctctgggctcttgagtttacttattcattctggattctttctaacaagaatatgaggacaagaggcactgtcctcaggcacttcgtcctgggagccaccaccatctctgcatggccccaattaggaaacgtgaagagctaggagagggagagtatggtcagtgcttagcagctgaagttccacttgcctggccatcgtgaatttccaggctgtcttctgagttgaacatgatggcaaaggasagcaaaatagcagatgtcactgaaggagagctcagcgagggagtgattgattaatagctgtattgaaaggtgggagtcaggtacgggggaagagckgcgatggaaaattttcgctttctttcagcagcttatttttaactcagctttctgttcttgctttattatggaggaaaaattgggccatagagtttactgccttatgccagattgttcaagaaaatgccttgcaacttacaatattttgcagctagtttcttccgtgaccaccacaaagactgcattgacttaaatatgaagatgttccagccatcaaaatgatggttggtgatgattttggatcacaaagtgtaaggaaagtattcaagacatgagtatcatgattttttaaggtctggatgaagagaccatttggatttactaataaggtaaattccaacttttatggcaataaaaacaacaraaacacttatcagtgtaaagctttgggatcatctatccattaaatgagtttgtcaccacagtgaactaaataccttttatcaacagagactttctaacctgggagtaaaattcttgtcacagtgcttttgtcacattctgtctttgcaaaagttgaaggctccaatagtttctgaaggactaataggatagggttccaacttactcagaggctaagagtttgaaatttactctgaacgatgtctgttcactagactgcgtgactgcagtttgctgtcttgtggccattttaagattgtctgtgtgcactgacaccatttgcgtactcaacaacaggtatctactaggaaggaaggaatggattatcttaggtgctatatatatatgtaagttctgccggaagtgagcctattaaacttgtgccaattcattccttttgctcttcccagtctgtgctctcagaatgatcaaatgctatctaagtagtgtggtgattttgactgtttgaatgaataaacgaaaacgtctcccaccattatttgacagtagaatagaacaaagatgacccagttggcgtggccacactgtgtctaatccagccaccttgctcacagcactcaacccactttggtgtgtgcgctcatctgtattttcgtaaatgttgaagtctctttctatgcagtcaggtaggggtaataccattctggcttggattaatttgagtgtagtacaaagtttagagaagcttttaagtagcatgaaaagtcagatgctttcggagggatggtggtgaatgtaggtaaatggatctgcacttagagatcctcaacagcccttcattcaagatacagctatcatgacatcaataatgtacctttgaaaaaaaattggctgcagaattaattacggtgaaaaacagtataggagttagcacttacattttaactaaaaagaatagcgtccccatgtttattcagccctccctccaataaaacaattgttggcaaagtaatcatggactttcattgtgttagtttgagacaactggatgtttccatttgccatcctcagcaacaagaagaaagtagtctcagattaaccaggtaantattttgtatttcacttaaaaaatcttgactgaaatatgcctatgtgatgacactcaaccaaattatttcattaaccagtccacaagatctccttaaataatgatggcttattcacacttgatggtctcattcagtggggcaattttaatacacatctctgaacctattttttaacccctctttttcagtagtgtggaaggttagccctaatattggagaaaattcagggtaaaattcagatgattcatacaggatttatttttcctattccattaataaaacaacttttataaaaataaaaagtaggctggcacagtggctcactcctgtaatcccagcattttgggaggccgaggcgggtggatcatgaggtcgggagttcaagaccagcgtggccaggatggtgaaaccccatctctactaaaaatacaaaaattagccaggcgtggtggcaggcacctgtaatcccggctactcgggaggctgaggcagagaatggcttgaacccaggaggcataggttgcagtgagtcacgatcgtgccactgcactccagcctgggtgacagagcaagactccgtttcaaaaaataataataaaataaaatgaaataaagtaaagctgcatgttagagaagtcaagagcattacttacgttagaatatctgaacagaccaatcaattcagtctgatcatgatattgatgtttttcttcaccaaatcgaccacatcagtaattcactttgttcttcgatatcctacagacactgcctgagtcgataactatgactatcagtctcagagagcaaatgaattactgaggaagccctgtaggagtgagagaaaaggggggagagagagagaaaggggtggggggataacaggagaacagaaattccaaagagaattgcattctcattgagttcttgtacctcatgtcattgcataaatgttcatcttactcacgtgatgactttgatctgcctttaaagcaccatctgctgctttcctgggatgctcaacacttccctctttctagcaacaagaattaccactcttcccctctatacatttatctttctctacgtgctttaacttctcagcctaatttcgtctctgtgagttattatctatgttagaataaattctttgtctttgtttacacactcagatttgtagttatttatttaggaatttaggaataaagattccatagtcaggaaaggcacaatttataacttgcgtgttacccaaaactctcccctaagggcttaatatggacatttctgaygaggcctgatgggcaggtggtacggtgatgctaagttaaattcagaatgaaggcctgcctttccttccctccttccttccccttccccttcttccttccttccttccttccctccatccctccctcctgtactcctcttctttctcaattctaaggtggccttaatttctaagggacatggcaaaagacagtctagttggatgagtgcagtcactaatattatttccatgtatggaaaataactgtttccttagtaacaattgcatcaaatcagttcacctgctgcccaatagcaatcacaggatgcattgggacaaataaatatactgactgccccacagccacatggtctaagtcagttactggagagctgactgaagtttgggaagcatattcatcttacgacactgagacatcctcggggggttgcaaacacaggtagtgtgaaaattatcagaacatccaagaaaaggaaagtttgactaagtgccgataagatttatgatgtcatgtctgacatagaattgaaaccatcacagagcacatagagtggtatattttcctgtcaaatgaaaatcattttctttaaaagtgaaatgaaagtctctaaatacaaatttactagaggatgtgtaaatttcctacttttcattacatactctggacccaacagagggaaattggagctgtyagtgagccatacatgcaatctggtacaggatctatggattgaatagactttttttcatggaactacacaaagccagtcttagtcatttcaaagaaaatttgtggtcatttcaaaaccaccagcaattccagggacaccaagttgcataattctaggggaaagtggactaaaagtgaatggcagcctctggagttatactgagcattattcttaaaatgtcaatttggcaaataggtggtaagcgagatctgtctgccagattgttcacatcatctctgctttaaaaagattgatcatagaatatgttaaaataagacctgtggagaggaggtatgagctatttaaggtggaaaggtgtgggagagggtgaaattagttttaaattttctaaagcactttttaacaggaaaagaagttcttgggcactgaaggcagaattagattaaaagtattcaatactcttccattatcagagaaatagtaaagctactagagtgctttctggttgggaaggaagaaggctaccaacatcttcaaataaagatgagaagtagagcatattcttggtggatgaatggattcacgtgtacttttactatatgcaaatgaaaagagctttaaagatcaatagtttagcaagactcttatttgaataagtgatcttggagtgtttacccattgtaacaaaactccttttctcataattagaatcattaagaaatttctcctacattttagatgacggaggtgtgtgtgcacgtgtgtgtgtatgtgtgtgtgatcaactcattgcatatttcttaaaccacaatattgtttaaggaattttagaaaataattactcaataggaaaatgttggccaatcctcagatatttagataaggctgattcaaatgcctattctttcactgttctcactatgacactcttatttttattattggcctgacttccgcagttattttgaagttacagatttttaaattttgagttgaaaaaaaagagcaaatttagattaaggaatgagaagtagtcctcgcagcctcatgaatctcctgaaatttcgaacggcaaaatctaaaatctacaagttattaccttcttacagtaaataggtgggtgttatgggtcgttttctttaacttctttacttgaaaaggaattaaatgatttccctttaacataacttccctttgattgtgctctgcttcatgaagtctgattttatttgcaatataatttacttcaactattcactgtaccccatgaagattcagcagcatttataactattgtccatagtttcaaaaactaggttgtctttctcttctcaccaagtttgggattaactatgaagaaccaaagtgaaccctttcaacaacaaggtttgctgtggttttcaagttttgcctttgtgtggaacattgtaatgacatagtgggaaaagaaatatttggggagagaattaaccatggctgatacatagcacgggtatttctgaacaacctactaaattatttcttagaacattttgaagtatatcttgccataggagtgggaacagtttcatacaaaagcctcctcatgcttccaacttttctttaaaaaatttttttaaaattattttattaaaaatagaggcccggcccgatggctcacactggtaatcccagcactttaggaggctgaggtgggcaaatcacttgaggccaggagtttgagaacagcctggccaacatggtgaaacctcatctctactaaaaatccaaaaattaaccaggcccggtggctcatgcctgtaatcccagcattttaagaggctgaggcgggtggatcacttgagcccaggagatagcgaccaccctgggcaacatggccaaacttcatctctacaagaaatacaagttagcctggcgtggtggcacgcacctgtggtcccagctactcaggaagctgaggtgggaggatcacttgagttcgagggtgcagtgaaccaagatcgcaccactgcactcctttggcctgggacacagaacaagaccctgtctcaaaaaacaaaacaaaacaaaacaaccccccccccgccccacacacacacaaatagtggaactatagcacacaagagccatgcatgagtcagtgttctccacgaaagcaagcttcaaagtggaactgagagaccgggctctgatcctcaccctcccactaataccagggtagcctcagccaagtcacttaaattcatgtcttgagagaagacagaattaactaaggaatccccaaacagcagttcccttagttgaaatcacaaacgtacacacacataccctgactaaggagagcttcaagaaaggctggaagacttaggagaggtcaatggtgacaatcttaattcagagtkaaggttgtctctctgtcaactttgctcaacgttggagcatstgttgttctcttgcaatccacattcgttttcgaaaacacttcagaaacaaaaatagcatcagcggtggttgcctgtgaacctaaaacatatcattccaatgaataaaatcaagcaaccctccagttaacctcatatccaatttttcctttccagaaagaagagattttatcracatcgaaagtaaatttgccctaaggacccctgaagacacagctgaggacacttgccacctcattcccggagtagcagagtccgtggctacctgtcatttcartcacagcagcaaaaccttcatggtgatccatggctggacggtaagggaggctctttggggaagagtggattggggtggtgaggtatcctgactggcctgcccaattgttggggacccagtgatgggtccgcaccccacatctcacgtggatctccttacacttgaataaagacagttctggctcaggtgggatctgaagccacaggttcatgagaactccccctaggcagtgccagccttcattttaacactgtacctggttggtgcccttgagccagagcttcctgcgaggttggtaaaggatgctctgcccagctactgagcagaagataggtgattgctgtggggaaccggtggaaccctggcatgatcccgcatcacccagcacattgccaggagaacctttctaaagaagacagcatggaagagtgaggagagggctggagtggagtgaggaagtgtggcgtccatgctggctttgccattctccagctctgtgctgtggatcaagtcacttgtcatctctgggcctccatttactgatctgtaaagcagaggttgcactagatgtccctaaaaacactctacttccaaaattttccagttgtaaactttagggagcctttctggaaattaaaaaaaaaaagggctgggcagggaactgacatgctgacatgccagatgattagaaaaagtgaaactgtgattaaatttactttaaaaaattgttaaaagtcccctctctaatatgtcacacagtcactttagattatgtagttcttgcttagtttgttttaaaatgtttcaatcccaagtgagtagactgtgtaatttatttaaaaggatttgtgtaaaatggcttgttaaagatatattatctatccattatgtcagagcttgtgaatattataatactaatttctagtgagaactaactaaaaataacattcatctagtccacatttcttttcctacataatttaagtggctttgttattgactgaagaggacaatcgctacaatttttatagagatgagactactactaacagaattcacacagatgtttaacaaaatatagccatttactatgttaacatagtaaattcaatattttgtgataaaatctcaaattcctaaacataaatcctttaatattttaataggtgtaagtaggaaaaaggaatctttttcttttttgagatggaggctcactctattgcccaggctggagtgcagtggcgcgatctcggctcactgcaacctccgccacctgggcataagagattctcctgcctcagcctcccgagtagctgggactacaggcgcccaccaccacacccagccaatttttatattttcagcacaggcagggtttcaccctgttggccaggctggtctcgaactcctgacctcaagtgatctacccaccttggcctcccaaagtgttgggatgacaggcgagagccactgcatctggcccagaaaaaggaatctttagaggccctttggttatatacagaacttggattttaaaatttttcaaaaaatctgagcttaataaacgcatttatacaacagaaataaattgagtatctcagtcatctcaatcttatccctgagagaattttatactttgggaagttgtgggaaaaaaatggttctttttcatactaagatgacatgaccaacccaatatcaacagacggtgccacttcctatcattggtcctactgcctcactaagcccacctgtatctttcacatcatgtgtcctgacattttgagtgcttgagcacagagactgctgtctggctgtgggactgagttgggtctgtgcaagaactaagccagccacactgatcttgattatctcagtgaactcactggcagggtcaggtggcccacctggtataggcagcagggagggcttcagttcagctgcgtgtctgaaaaccaaagatttaaaacatagtaattattgaacctcagaagaaaaactcagattgaaagaacttagaataagaccctttttgagttgagaaaggtgagtacttagatttttcatttgctttgtttgggattacttacatcagtattttatgttgatcagaaagaaaggattcaattagctattgttcggttaataaaaatgtcagccactgtaggagtaagttggatgtccagcctttttagattgcttaacttggaaacactgggctgggagcggtggctcatgcctgtgatcccagcactctgggaggccaaggcaggcagatcactggaggtcaggagtttgagaccaacctggccaacatggggaaacccaatctctactaaaaaaatacaaaaaaattagccaggtgtggtggtatgtgcttgtagtcccagctactcaggaggctgaggcaggagaatcgcttgaaccaaggaggcggaggttgcactgagctgagatcatgccactgcactccagcctgggcgagacagtaagactctgccaaaagaaaggaaagaaaggagggaaagaaaggaaggaatgaaaggaaggaagggaaggaggaagggaaggagggagggaggaaggaaggaaggaatgaaggaaggaaggaaggaatgaaggaaggaaggaagggagggaggaagaaaggaaggaagaacaaagaaaagagaaacactggtagtacagaaaaacttctgatagaggcctagagtaaacccgattttcttgccttatctgaaataagctgcctggggactcacaggcacagacgaagggaaatgaggaggctctccagctgtgtcatgagacacccaaaggaatgcttagcatgtagcatgcatgtgatacatcccagcaggttgcttagacacagctatcttggagctttgccacttgcttggatgtcactggctttaagtacagggttcccattgtgaagtaggggatcctggctgaaacagggagacattaacattacattctgaagaaatgacatcaacctctcctgatcttgaaagccaactacaaagggtgcccaacaccccaaccttgaagggaggcgaaggtgagtgggactggaccaattcaacagggttctgctcctagccaggtgctcctgctagtttcctcaaagacccactttgcattcagaccaatctttccttttaatagtataaatgatcaaaattttattgaatgtctaaaatatactttttaaatgggaagcatggtgaaccccaatctgccgttcctcaactcaactcaatgccttcctggcttacttagatctgccttggaagggacagacctgtctctgaacactgttctgttatttgatttttctatctgtgccaatgggtttccaatcaagtttgttttttccatttcatgcaggtgtattgggctgatgtatctatgacaagtggtaggtgggtattttaagaaagcttgtgtcatcatcttcaggtaacaggaatgtawgagagttrggtgccaaaacttgtggccrccctgtamaagagmgaaccagactccaatgtcattgtggtggacbggctgtcacgggctcaggagcattacccagtgtccrcgggctacrccaaactggtgggacaggatgtngcccggtttatcaactggatggaggtaagactgggagaaggagmcttatgtgtccaaaacagtgtttttgactggagccagaaaaccggctgttctttcttccttttctcttagatttaaatattttctgggggcattcaaatcttcagaatcagcgtggatattattttatatccaaaagcaacattttgataagaatagactataaggccaataaatagtcctgccctgctctatcgtttgatattttcacagtgaatagatctgctgagaccaataactaagtgggcccaacagaaaaaagcttgtgattttcggacagaggaaagatggcatgttcagccagacccttccctaccagttggctggcctgtggacatcttatcctcaccttgacataccaatctctttcatgaaaatattaatagtacttattctttagtgtgaaataggatgaacgtttttgttgagcattgggagagtgatggaattgagctaggaagatgttggaagggaaggtgcataggatagaagggaactgaggtctggagttctgacttagctgcaagagacccactttttcacacgatcccttgagaagtacctctgaaaagtatcttggggttggaaagaagctgatactctgaccaaggcaaattattttaaccaggtaattggaagtaaaaaataagctgtgtttattagactgatcataaaagacaaaagttcttttcttgtcttttttgctgaccaggcaaatgaacatgggcaaacgggatcacctccctggggctcaggcttctcacctgttaaatgaggggctggaccatgtacctctggtcccttccactgaatgtttcctgagtctgtcattgcttggctaaccttcaatgataaagtgatacagatatttagagtaaggaataatgggaaaatatatacccatatactatacattcaaacatacacacatatacatatatgcatgcatataaatgtatacgcatatgtatatgtgtatatgtttgtacgtatagtatatggttatatatgcaaatacatatacatatacaaacatatgcatatattatatacataaataatactatttcagatgcatggaaaaactttgtaatttaaatctgctattaaagaaagagaaaatcaattctggatttgtttacggaaaagtgaaacaaaagaaaaagacaattttaacactagagaatattttctctctcttacctgtaacacaaaattaaaataagtagaattagttttcagtatttcctatatttggaaaacaatatttatattcattttgtttcttttagttttatttttggcagaamtgtmagcaccttcattttctttttcttccaaaggaggartttaactaccctctggacaatgtccatctcttgggatacagccttggagcccrtgctgctrgcattgcaggaagtctgaccaataagaaagtcaacagaattactrgtaagaaagcaatttcgttggtcttatcataagaggtgaaaagactgtcattctgagagagaatcagaacaaaytttgttaaatacccacatgtgtggtgttcttcccggagacatgaccagcacttgattatctcattgtagggctctttattagggataagaaaaaacacagacgctctcactggcttactatccactggcaatagcacagaaataaagcataatyacacacaatgcctgcagatttctctgggaagcctgtttcctcccactctcagctctgtgttttagtagtgtaaatgcacatcagtactaggagaaaagaagaaggaccaattccagaggccacttcgaaagaagaccgtcatctaggcaaaggtgtggcatacacacagagagaaagaacccaccactgtttatacatcttctcgacatattcagaaataatctacaaaaggaaatccagccatcctgagtggaaaytgctgcataaggctagtttaagagactcaaattcattttagaaggagccaagcctccttttatgtctctctaagtaaagataccatgactgtagaataggagctaataagaatctaaatagctgccagtgcattcaaatgatgagcagtgacatgcgaatgtcatacgaatggaaatttacaaatctgtgttcctgcttttttcccttttaagkcctcvrtcsarctggacctaactttgagtatgcagaagccccgagtcgtctttstcctgatgatrcagattttgtagasrtcttasasacattcaccagarrgtcccctggtcgamgcaytgraatccagaaaccagttgggcatgttgasakttaccygaatggaggtacttttcagccaggawgtaacattggagaagctatccgcgtgaytgcagagagaggacttggaggtaaatattatttagaagcgaattaaatgtgastctyatccttaacccttattgacccaatgtcctactcagtagcttcraagtatgtagttttcatatacayatttggccaaattatgtttctgaagaattctgcaatgttcagcatgaccaccttagagccaggcagacagccattttatcttttatttactatactgtaggctacactgagcagtgcacttacagtagcaagagaaaaaggtgggattttagacaggaagactccactgacctcaataatggcatcataaaatgctatctggccacatgttgtcataccttgaatgtagctgcaaagccaatggaaagattttagatgttmctggaacagaagatgttaattagsataaatcttccaaaatgttcagaacataatgttagcttaatgttttactttaataatgttagcttgtgttaaatttatgatttttgtttgtttgttttttgagatagagtcttattctattgcccaagctggggtgcagtcacacaatcacagggacttgcaatgttgcccaggctggtctcaaactcctggcctcaagtgatcctcctgcctcagcctcccaaagttctgggattgcagctgtgagccaccacgcscagtttacgatttatttttaagagccccttgcatactttatagacattgggacctacctaggatattctcgttatttttgtgcacgtaatagaacttagagcatattgttrctattttcgattgtcctaaaawcttacaaggaattcattcttatggcattgctgattatttctatgttcatttgatataaaagagtgttagtaggggcagaaccctcaattgtacataatatcaatgataaaatacaattcatttaacaattaccctcttaagatgtggtttctagaaatacaaattgtccytaacttacagttttccaactttacaattgggctgtaacaccattttaagttgagaagcacgtgatggtttgacttaaaactttttgacattatgatgggttttgggggtattaagtgcattttgacttacagtatttttgacttatgaagaatttattgtaaggcaaggggcaggtatatgtttctagaagcacctagaagtgttagacactttcaatgtaagagaaggatgagataaacaaggaaatcaacctccaccttggaggcttattacagcttcataaacatactcataaatataagaagcacaaaagtcaaaaattccctgtgaacttgcaactttcactctcttgaaggtgggtgggccrctaccaccaagaatatctcctgaaatagggcctacaatcataaatgcacaggactatatccttgggtgattctactctaacaccacatstcacctattttagacatgccaaatgaaacnctctttgtgaatttctgcygagatacaatcttggtgtctcttttttacccagatgtggaccagctagtgaagtgctcccacgagcgctccattcatctcttcaycractstskgttgaatgaagaaaatccargwaagrccyacaggtgmagtyccaaggaagccttkgagaaagggctctgcttgagttgtagaaagaaccgctrcaacaatcygggctawgagatcartaaagtcagagccaaaagaagcagcaaaatgtacctgaagactcgttctcagatgccctacaaaggtaggctggagactgytgtaaataaggaaaccaaggagtcctatttcatcatgctcactgcatcacatgtacnkattctgtmcattggaacagagatgatgactggtrttactaaaccctgagccctggtgtttctgttgatagggggttgcattgatccatttgtctgaggcttctaattcccattgtcagcaaggtcccagtgctcagtgtgggatttgcagccttgctcgctgccctcccctgtaaatgtggccattagcatgggctaggctatcagcacagagctcagagctcatttggaaccatccacctcgggtcaacaaactataasccttgtgccaaatccagcctacttcctgcttttgtaaatagtttttttaaaacttttaagttcaggggtacgtatgtaggtttgctaaaaaggtaaacttgtgacatgggagtttgttgtccagaatattccatcacccaggtattaagcttagtacccattagttacttttcctgaagctctccctcctcccaccctctgggaggccccagtgtctgttgttcccctctatgtgctcatgcaaagttttattaggacacagccacacacattcattaccatattgtcaaaggctggtttcatgycaccataacagagttgatagcccacagagcctaaaatatttactccctggcccttyacagaatgttcacaacttacataaaggcaaggaccatctgtcttatttatttatttatttaatttgagatgaagtctagctttctcctaggctggaggagaggggcatgatctyggctcaccacaacctctgcctcccgggttcaaatgattcccctgcctcagcctccggagtagctgggataacaggcatgcaccatcatgcccagctaatttttgtatttttagtagagagggggtttcaccgtgttgaccaggctggtctcgaactgctgacctcaggtgatctgccctccttggcctcatctgtctttttaaatgcaactattcctggaaggcaagaatatctcacaccttctaagatactgccattttgccaggagtttgtttcacacttgaatttcaagsttggcctcttgtttagaggcagacctaaaggaatggtcggaaaatgagagaggaggtcttcggataaatccggtgagagggaccaacttcaggaagggtggcttttgtggaatccagatggaaacctgagggaagggatgatattaaagaacagtggccccaggtaaaacatatggcacccatgtrtaaggtgattcttagaatctgtagaggtgtctttcgtggtatagaggttgaggcacctgtgcttcaaggaaaccttaactcttcaaaatcaggcaatgcgtatgaggtaaagagaggactgtgggaccataatcttgaagwcasagacaggcttcactcatccctgcctcctgcaccagtgggttcaaggctctgtcagtgtcccctaggggcacytcaccacycccagcttcttcagctctggcctgtcctgctgcctgcaagggttttgcttaattctcaattcaatgtctcttcatcttttagyagctgtggggttttgttgttgttcttctgtttttgcttagtatctgactactttttaattataaaawgagatgtatctaaacaaaatagagattgttatcagaagttcacaacatttattaaaaattttttcacctggacaagagtctaaagcagcataaaaatatggtctgctatattctaaaccatcagtcttaagagatctgtgtctcagcttaagagaaaatacatttaatagacagtaacacaaataagaaaaaaatctgaccaaggatagtgggatatagaagaaaaaacattccaagaattattttatttatttatttatttatttatttatttatttatttatttttgagacacagtctcgctcagttacccaggctggagtgcagcggmgcaatcttagctcactgcaacctctgctttccggttcaagcgattctcctgcctcagcctcctgagtaactgggattacaggcacccgccaccacgcccaamtaatttctgtatttttcttagtagaaacagggtttcaccatgttggccaagctagtctcaaactcctgacctcaggtgattcacccaccaaggcctcccaaagtgctgggattacaggcatgagccaccatgcctggcctccaaraactcttttttccyccatcatcatggttctattttagtcctgctgcctttccttttaacctctccccaggcccatttgctcagggtttttggtagagaccagaggaggggcagggaggagatatagaagttcaactacctgcttccagaggctgtccctagtatagaatactttaggggctggctttacaaggcagtccttgtggcctcactgatgrctcaatgaaataagttcttttttaaaaaaaattttatttatttccataggttattgggggaacaggtggygtttggttacatgagtaagttctttagtagtgatttgtgagattttggtgtgcccattacggaatggaaaaatcaacgaaataagttctatgatgcacctactagacacctamtctgcrctagatggtgggggaattaagagcatgggcatgatcctgtgaccggaagcccgcttacagtcagggtggaggacagacctactcatgaaacaaacacagtgacatatagtgacacagaagcaaatgycaaatatgcttgctccagatgctaaggcacaagatggccaaggatggcggagttcatggagaaagcatcatgagtgttttggccttctgatttgatctccctagcacccctcaaagatggctacttcctaatgctgcttggcaattcagacacatttgggtttttcctatgcatataaccacacttttctgaaagggagtagaattcaaggtctgcattttctaggtatgaacactgtgcatgatgaagtctttccaagccacaccagtggttccatgtgtgtgcacttccggtttgagtgctagtgagatacttctgtggttctgaattgcctgactatttgggrttgtgatattttcataaagattgatcaacatgttcgaatttcctccccaacagtcttccattaccaagtaaagattcatttttctgggactgagagtgaaacccataccaatcagrcctttgagatttytctgtatggcaccrtggccgagagtgagaacatyccattcrytctgtgagtagcacaggggggcggtcatcatggcaccagtccctcncctgccataacccttggtctgagcagcagaagyagagagcgatgcctagaaaacaagtctttagttaaaaaaatcagaatttcaaaattgaggtctttcctctatttgatattgagaaaaaaatgcttcaaattggccattttattttcacttactagttatatttttttatttatcatcttatatctgtttatttcttttataaagctgctgttaaacaatataattaaactatctcaaaaggtttgacattaaagaaaatgagcaatggtaacaggaaaccactctatagatgtacatataatatgtacagaaaatataagtagtaagaagtccatgacaaastgttagctcttttttttttttttttttttttttttgagatggagtctctctctattgcccaggctggagtgcagtgattcgatctcagctcactgcaacctctacctcccgagttcaarcaattcttctgtctcagcctcccgagtagctggggctgcaggtgcccaccaccrtgcccagctaatttttgtatttttagtagcgacagggtctcaccatgttggccaagctggtcttgaattcctgatctcaggtgatccaccygcctcggcctcccaaagtgctgggattacaggtgtgagccaccatgcccagcctaccctttactactaatcaaagaaataaaagtaaggcaacttgatacttttacaattactagatgaacaaatctttaaaaatagccagtgcagacaaggtggtgaagcagaacatgcgaacctaccatgcatcattcacggctagaaccctccaggtgcggaaggtagtattttaataactttccatagctacaaaatattattacatagaagggagtgatttttttctaatatttatcctaaagaaatagtcaacaaacatttttaaaaacatcaattacagtcgtacctatactagcataaattagaaacccagtatccaacattgaggcagtgggtaaatgaatcgtggtttatcaagtcattaaaatcaatctagcctttaaaaactataattstaggaaacccaggaaaacatagtaaaaartggaatataaaatctraagagaataaagaatagagaatcgtatgtgtgctatgattgtagctaaataaygttcaagtatcaacacaaattgaaaaggaatacatgaaaatgaaaattatatttctgaatgattgacttcaggattttcttttagaattgtattaaatagttcatgtcattaggataaatgctggaatgtggatataatttaaaatatactaaatgccatcgaccttcattttgagttctttgttggacatttttgtgcatttttaaaatatcccctaaataataaagctatttatatttggagaggagaaaaaaaagtrgggggcagggagagctgatctctataactaaccaaatttattgcttttttgtttaggcctgaagtttccacaaataagacmtactccttcctaatttacacagaggtagatattggagaactactcatgttgaagctcaaatrraagagtgattcatactttagctggtcagactggtggagcagtcccggcttcrccattcagaagatcagagtaaaagcaggarwgactcagaaaaagtaattaaatgtatttttcttccttcactttagacccccacctgatgtcaggacctaggggctgtatttcaggggccttcacaattcagggagagctttaggaaaccttgtatttattactgtatgatgtagattttctttaggagtcttcttttattttcttatttttggggggckgggggggaagtgacagtatttttgtatttcatgtaaggaaaacataagccctgaatcgctcacagttattcagtgagagctgggattagaagtcaggaatctcagcttctcatttggcactgtttcttgtaagtacaaaatagttagggaacaaacctccgagatgctacctggataatcaaagattcaaaccaasctcttcmagaagggtgagattccaagataatctcaacctgtctccgcagccccacccatgtgtacccataaaatgaattacacagagatcgctataggatttaaagcktttatactaaatgtgctgggattttgcaaactatagtgtgctgttattgttaatttaaaaaaactctaagttaggattgacaaattatttctctttagtcatttgcttstatcaccaaagaagcaaacaaacaaacaaamaaamaaagaaaaagatcttggggatggaaatgttataaagaatcttttttacactagcaatgtctagctgaaggcagatgccctaattccttaatgcagatgctaagagayggcagagttgatcttttatcatctcttggtgaaagcccagtaacataagactgctctaggctgtctgcatgcctgtctatctaaattaactagcttggttgctgaacaccrggttaggctctcaaattaccctctgattctgatgtggcctgagtgtgacagttaattattgggaatatcaaaacaattacccagcatgatcatgtaktatttaaacagtcctgacagaactgtacctttgtgaacagtgcttttgattgttctacatggcatattcacatccattttcttccacagggtgatcttctrttctaggragaaagtgtctcatttgcagaaaggaaaggcacctgcggtatttgtgaaatgccatgacaagtctctgaataagaagtsaggctggtgagcattctgggctaaagctgactgggcatcctgagcttgcaccctaagggaggcagcttcatgcattcctcttcaccccatcaccagcagcttgccctgactcatgtgatcaaagcattcaatcagtctttcttagtccttctgcatatgtatcaaatgggtctgttgctttatgcaatacttcctctttttttctttctcctcttgtttctcccagcccggaccttcaacccaggcacacattttaggttttattttactccttgaactacccctgaatcttcacttctccttttttctctactgcgtctctgctgactttgcagatgccatctgcagagcatgtaacacargtttagtagttgccgttctggctgtgggtgcagctcttcccaggatgtattcagggaagtaaaaagatctcactgcatcacctgcagccacatagttcttgattctccaagtgccagcatactccgggacacacagccaacagggctgccccaagcacccatctcaaaaccytcaaagctgccaagcaaacagaatgagagttataggaaactgttctctcttctatctccaaacaactctgtgcctctttcctacctgacctttagggctaatccatgtggcagctgttagctgcatctttccagagcrtcagtactragaggacactaagcatgtgaccttcactactcctgttctgaattccaggaatatgcccttttcaaccctccacacatcccctgccagacagcaagtgctaatgggttacaggaacaaaggggagaaatattagatcatgtcatacaagccagtgacacaagaaatgaagggaaaggctagacacagtgtcatctggaaacaggaaaagcaattgcttttggtttgttcttttcctagtttgcatttgggacaaatgtatagaataagaattgccttcatgcctgcaatcccagcactttgggaggctgaggcaggtggatcacctgaggtcaggagtttgagaccagcctggccaacgtggcgaaaccacctctctactaaaaatataaaaattagctgggtgtggcggcacatgcctgtaatcccagctactcggcaggctgaggcgggagaattgcttgaaccggggaggcagaggttgcagtgagatgagatcgcgccattatattccagcctgggcaacagagaaagactccatctcaaaaaaaaaaaaaaacatgcctattaggaaaagtatattaaagaccctatgtgtaacatctttaatgtttttaaattctactttataatagattttatacatgtttactataaatagattaggaaaaataagcaaaaataaaataaaatcactgtgaccatatcactcagagacaaccccaattaacgtttttatttatattctttcggactttatatatacataatatttatatgtttttcgtcctttacaaaaatagaattatggtgtatatactctgaatgactagatgagaacatctggatcaaaagcattaatgtaagagcattcaggataaactcaaaatggagaatagttagtggtattgagccaggcaaaataacgcaattcttatctaactggagacttttcttctaagaggttattacgttgtttttcctcatcacaaatctgaggcaatatcatactttcttcagttcttagaaagagacttttagatgaagttttttttgtttgttttggttttttttttcttgagatggagttttgctcttgctgcccaggctggagtgtagtggctcgatctcagctcactgcaacctccacctcctgggttcaagcaattctcctgcctcagcctcccaagtagctgggattacacgtgtccgccaccacacctggctaatttcgtatttttagtaragaaagggtttcaccatgttggtcaggctggtcttgaactcctaacctcaggttatccacctgcctcggcctcccaaagtgctgggattataggtgtgagtcaccacacccggccctagatgcagttttatacatgcatttgtattacacataaatagcatgcatatkctgccagagcatctacaactttaaatctacatgtgaatgtgaaaataaaacctcattaaattagtaaataactctagctgcttgtaaagcacgtccagtcgtattttttatatgttacaagactttatctgagaaagcctaatgaagcattccttgtctgattataggattactgacagaacagttatttagacagagaatgttcagatgcgttttatttttattttttacttttatttatttttgagacagtctcgttctgttgcccaggctagaatgtggtggcgtgatctcggctcaatgcaactctgcctcccgggttcaagtgattcttgtgcctcagcctgacaagtagctgggattataggtgcccgttaccatgcccagctaatttttctgtttttagtagagacggagtttcaccatattggccaggctggtcattgaactcctaacctcaggtgatgtgcctgtctcagcctcccaatgtgctgggattacaggcatgagccacagcacccagccagatgcatttttaaaaacgtacctgaactttatctaggaggtaattataaattagactaataatcttctacagtttctttcttctgtgattaaaatcaatcaaatcaaagattctctttctcacaccttctgctaactcctcagaaacctcatatcacaagaaatgaaatggaacaggcctttcgtttgatacattttagaataagaaatcctctaaatttagaagtcatttggcccagtcctccaaaaatgatgcaccttattgggacggggctaaatagttgctccagtgtcttccattcctacaaacctgccattctctgatccattatacacatctcccctgggtttattctcacaacctttgttctgaaattccatttgaaggctttttccatcctaaaaccagtgggggacaggcgggaattgtaaaacactcagaagataataaattgccctttttcctgtgctttttctcagaaactgggcraatctacagaacaaagaacggcatgtgaattctgtgaagaatgaagtggaggaagtaacttttacaaaacatacccagtgtttggggtgtttcaaaagtggattttcctgaatattaatcccagccctacccttgttagttattttaggagacagtctcaagcactaaaaagtggctaattcaatttatggggtatagtggccaaatagcacatcctccaacgttaaaagacagtggatcatgaaaagtgctgttttgtcctttgagaaagaaataattgtttgagcgcagagtaaaataaggctccttcatgtggcgtattgggccatagcctataattggttagaacctcctattttaaytggaattctggatctttcggactgaggccttctcaaactttactctaagtctccaagaatacagaaaatgcttttccgcggcacgaatcagactcatctacacagcagtatgaatgatgttttagaatgattccctcttgctattggaatgtggtccagacgtcaaccaggaacatgtaacttggagagggacgaagaaagggtctgataaacacagaggttttaaacagtccctaccattggcctgcatcatgacaaagttacaaattcaaggagatataaaatctagatcaattaattcttaataggctttatcgtttattgcttaatccctctctcccccttcttttttgtctcaagattatattataataatgttctctgggtaggtgttgaaaatgagcctgtaatcctcagctgacacataatttgaatggtgcagaaaaaaaaaargataccgtaattttattattagattctcyaaatgattttcatcaatttaaaatcattcaatatctgacagttactcttcagttttaggcttaccttggtcatgcttcagttgtacttccagtgcgtctcttttgttcctggctttgacatgaaaagataggtttgagttcaaattttgcattgtgtgagcttctacagattttagacaaggaccgtttttactaagtaaaagggtggagaggttcctggggtggattcctaagcagtgcttgtaaaccatcgcgtgcaatgagccagatggagtaccatgagggttgytatttgttgtttttaacaactaatcaagagtgagtgaacaactatttataaactagatctcctatttttcagaatgctcttmtacgtataaatatgaaatgataaagrtgtcaaatatctcagaggctatagctgggaacccgactgtgaaagtatgtgatatctgaacacatactagaaagctctgcatgtgtgttgtccttcagcataattcggaagggaaaacagtcgatcaagggatgtaytggaacatgtcggagtagaaattgttcctgatgtgccagaacttcgaccctttctctgagagagatgatcgtgcctataaatagtaggaccaatgttgtgattaacatcatcaggcttggaatgaattctctctaaaaataaaatgatgtatgatttgttgttggcatcccctttattaattcattaaatttctggatttgggttgtgacccagggtgcattaacttaaaagattcactaaagcagcacatagcactgggaactctggctccgaaaaactttgytatatatatcaaggatgttctggctttacattttatttattagctgtaaatacatgtgtggatgtgtaaayggagcttgtacatattggaaaggtcattgtggctatctgcatttataaatgtgtggtgctaactgtatgtgtctttatcagtgatggtctcacagagccaactyamtcttatgaaatgggctttaacaaaacaagaaagaaacgtacttaactgtgtgaagaaatggaatcagcttttaataaaattgacaacattttattaccacactaagtcattattttgtatcatttttaaagtaaatttattcttaggtcagattcactcagcatattttgactaagtaaccactgtacttagtaaaccgaagagcttctgagaattatagtgtaccttatagatatttttaacatttatatttgtataaagctaaagaaagccttacatatcctttaaactgactatagaagaaaatgatacagaattttgcctgcataaagtacacaggactattcttgcctacaatatgctttttcacaagcaaaatgttagactaatataaggcatctttggccattttatagtgtacatcatctctatttctgaggcctcattgttagctgtaacgcaagtagcatttgtgcaataaaatgaactatttgggatgggagggtacattttttagaactttgctttgggttgccttgataattaatagcatatagtccatttatgcagctaagtagggattgcttcttagtacagtcaggaagaatttagcccagaaaacaattatttcaatggccactgacccaaacttccaggctgaagagcaatggcgtgatcatggctcactgcacctccacctcccaggctcaagtgattctcctgcctcagcctcccaagtagatggtactacaagcacacgccactgcacccagctaatttttgtattttttgtagagatgggggtttcaccatgttgcccaggctggtcttaaattcctggcctcaagtgtctgccccccttggcctcccaaagtgctggaattacaggcatgagccaccatgtccagccttgacccaaacttttattgtcagttagctattggggcttctggagtttgggtctcccctgacaggagggggctccccagttcacacttggccactgcccatcaattcctgttgatatgatcaacaagatagacaattgcaaatgttgctgaggatgtggagaagtgtgaacctgtgtaagtggctgatgggaatgtaaaatggcacagccactatggagaacaatttggtagtatttccaaagttaagcatagagtttaacccatatgacccagcaattccactcctagatatatacccaagagaaatgaaaacacagatccacaaagatttgcacacacaggttcatagcagcattaatcagattagtcccaaagtggacaacccaaatgtccatgaacttgtgaaagagataagcaaaatgtgacaaattcacataataaaatattattcagaagtaaaaagaacaagcagcagatatatgatacaacacgatgagccttgaaaacgtttagccatatgaaagaaaccagatgcaaaatggaaccatgggcttaggggaggagaacggcacaatggtgtaaaagttgcagagaggaacaaaaaggctacctgcctcgctcccaggccaagtaacacaggaggaaagaaaatatccacatatgcgagggctaaaggaaagaggtgttctcaagctgaagcaggaggtgggactcaactctggaggtgggcctcacacactgtaccaaattgaggactagctaaaacagggatgggggtgaaagcaccttttcataagacatgcccaccattgtcccgttctcctcccttaagcccttgtcttgctcatgtcagcaagcttattgccatctattcttcctagttacagacatctgtggagctctgagttttttgcctaatcattattttagaacctggttcactctctctcccttctacactagttctgtcattattattactgatttcagtacctctgaggtgatagattttattttccaatggcagccacaacactacctcccattctatatgttcccctgcaatgttgccttgacatccctattaagagttggaatctagtcaccccgcttttctagtctccccactcctttgaacttgtgtgggccctaagattgcttctactagtagaatagaactaaaatgaccctggaccagtgtggggtgcagcccttaactggcctggcagcttctgcttttggttccttggggcactcactcttgggaaacttccctttggaactcagcattcatgatgcgggaagttgaagccacatgaaaagagcatatggtggttctctcagctcccagccaacaaccagtctcgactgtcagccatgtgagtgaggcatcttggacctccggccagttgagtgttcagaagactgcagctcgagctggcatctggatgcaaccacatgagagacgctctgcccagccaagcccagccaactcacagtactatgagagatactaataacttgttgttgttgttgttgttgttgtttttattattaaactttaagttttagcatacacgtgcacaacgtgcaggttagttacatatgtatacctgggccatgttggtgtgctgcacccagtaactcgtcatttaacattaggtatatctccaaatgctatccctcccccctccctaagtttttaggagtttgctttgcaacgatagatagttgaaacatctggatgatgcatccagtattctggcttctcactgcctttacctcctctctcccatggccttgtcttctaaatctacctttacatagaaacattcagtcacgtgctatactatatcatgccattactaataactcataaactcaatttcaacttctcccttctttgactaccacatgctatctttttactttaatcagtctagtgctctcagttcaacagctcctcaactgccccaggacctccaatacattgatctattcatccctcatttcctttcttagcctcactttgatccgtactcagcttagatttcaaggcccaaggttattattactccagtgccaaaactctaaagagctgtgcttctctcaccctcaactgagctcttcagggcaaaacataaaccctgaatatatccaaattgccactcaactccataactgcatctgagcagcagaatgtgataggtaacacacccatgcacacacagccctgctgcccctcactttaccgcctcactccatggctcccttacagctgcccagcagtcctcctacatttccctggtccaaacaggcctcactctccaagatgatgatttaatctcagacctctaataacttctcacctctctctacactcacctgattgccttatttactgagaatacaggggcaatcataaagctctatgtgcttcactcttaaatctatccatctccctgctcctgtgtccatacactctgttttcccttctgatataagagacgttttccctctttctacctctgaccaattcttgcataaaaagatcttgaaggagaaggaagtccttttctcctactcaaagacattgctctggagttgttcctgttctctcctgctcctcagttttcacctcctactggatcattctaacagcaaacaaaaatgtatacttcccacttaaaaacaaattaaaacttgcttgaacccacttccatctccaccttcctttttttttttttgtgatagagtcttactcttttgcccaggctggagtgcagtagcacgatctcagctcactgcaacctctacctccctgattcaagcaattctcctgcctcagcctcctgagaaggtgggattgcaggcatgttgccaccacacccggctaatttttttcgtattttaagtagagatggggttttgccatgttggccaggccgggctcgaactcctgacctcaagtgatccatccatcttggcttcccaaagtgctgcgattataggtgtgagccaccacacccggccttatgctcctctttatagcaattgcttaatctctactaatggtttctacttcccctcgcaatccttgaacaaagtctgatcaagccactttcaatctaccagacttattgtttctaagcttactgatgaataccatggcagtaaacccaatggtcgattctcctttgtcttcttacttgacttccctgtgtaatttgagccaggttgcttttcccttgaaacgatttttcactggtctcttaggactccactgtttgctaccctctttctcccattagctattccttctcactctttgttgattcctgctcatcttcctaacccttaacgtgttgagtgctccagtgctgaatcttcagtgtctcaacttcatttatatctattcacaaggtgatactcagttggctttaaacaccacacagctgctgatgaatccaaaatttacatctccatcttgtacctcgcttctaaatttcagactttttaatatatccacttgtctatcaaatatctccacttggctttctaataggttttgggaacctatcatgttataaaacattgttatccaccagttttctcctcccagttaaaagaatttcttccttccagttgctcaggaggaaatcttggaatccatacttgagttctttcttccgcaatacataatcaatcagtcaaaaaaactggcttggtgtcatggctcatgcctgtaatcccagcactttgggaggcctgggcaggagggtcacttgagcccaggaatttgagaccagcccaggcaacatggcaagacgccatctctactaaaaaaaaaaaaaaaaaaaaaaacacttagctgggcatagtgatgcatacttgtattttcaggagactgaggtttgagcatagcttgagcccaggaggttgaggctgcagcgagcttttattagcgaaaaagcactctagcctgggtgacagagaaagaccctgtctcaaaaaaaaaaaaaaaaaaaaaattctatcagcttcacttaaaaatatatccagaatctgactgcattttaccatttttaatgttatgccatcaggtttcactggattatttcaatagtctctcctggtttctctgctactgctcttgcttctcattagtctattaataatgaatcaggtgaactttctagagtagatcgtagcatcccattcctctacccagtacttcaactctctgtatttttcatcctgcctaacaacaaaaaaactataaattattgtttgcatatgcatgtgtgtgtttgtacgcatactgttgttattcaccctgttttacatttagcccatttctagctaatttttgtatatggtactatctgtggttagaggtgttttttgtttttgttgtggtagttgtggcaataatttcttttttacatagtcaaattattccagcaatttgttgaaaaaaatatcctctctccatcgaattacattggcaactctgttctctggtcctcacagatcagttcctcatgatgactgatttttcaggaaatgtgggctttgaacagacttcactcagaaagcctgtgctagagttccagcatagggacctcattcctttatcagggctcagatccttcatcctcttgtaacaggctctggacctacaatggaaatctgctgacatgagattaagagaaggtatctggaatgaaggcacttctccgactccacccattccgctgacagggctccaacaactccagggtcttttaatcaagagattgctaagtcaaagacaatgcctcctcagccaaatgtgaaacacaaaggtttcataatcaaaatgaaattccttcttagcacacaactggagaaagctctaaaggagataagaatcaataataagatttataaaatttggcagcataagctgaggatgatgatatttcccttaatctttatgtttccagatggcactggtgtggcagcagaaatcacatcatggatgagacgctaagaattggcacaagatctgcaccttagatccaaagactatgtgatccaggccctcaaatacatcttttctaatcctcataataattctatgaggttggcaccattgccccattacaaatggggagaggttatgtgcaaagtccaagctcacatc

SEQ ID NO: 95038 - DNA, 122715 bp, Homo sapiens
gtggaggaagctctcaggtgcttctggagcagaggtaactcaagggcagagacctgccattgagacataagctctggctgcccattcctggagcactcatctgtattattgcagaactcccattgcaaacgctttgttgggtacagattaaaatctctactaagtgcttagctggcaccctggaggtgtataatcagaaaccatcattcctcttaaagcttcatgtttgcatgcaaacattcatttaaatagctcaggcctcagggtcataatgcaattctaaactcttgtcccaggacctgcccagttttgtggatgcaaatattgccactgaaaatagtccaaaaacagcatccaagattttccacaaaagtaggatcagaaacccagggagagaattagtctatttcacttactctattagattaggaataatgaaaggggaaagagcagacgcatttcttgtaaatcaagactgaaagctctacaagtgcaaataccatgtttctttctatttgtcattgtatttgcagtacccaacatgatggccagcaaaaaatacttgtgtgattggcctaatagataaatgaatgaatgaagcaagaaaagtttgaaaagggaagaccaggccaggcatggtggctcatgtttgtaatcccaacactttgggaagccaaggtgggtggatcacttgaggtcaggagttcaagaccagcctggccaggatggcaaaaccccgtctctactaaaaatacaaaaattagctgggcatggtagcatgcacctgtaattccagctacttgggagatacaagaatcgctcaaacccagaaggcagagattgcagtgagctcagatcacaccactacactccagcctgggcaacagagtgaagttccatctcaaaaaagaaaaaaaaagaaaagaaagaaagaaaaagaaaagggaagaccaaatgatgctctcagagtcaggttcaaataatacctctgcatcatctatctctggtttttgtgcaaaagcagattacttctgaagggccctttccattccatcttgtggttcttcttttttttcttttttcttgagatggggtcttgctatgctgcccaggctggtcttgaactcctgcgctcatgtgttcctcctgcctcagcctcctgaagagctaagattacatgtgcctaccacaatacacaactctatcttgtgattcatctgcagccttgactgatataaaggacattggccatttctgcctgcccagtgtccattccctttttctattaagtcccccatttccctttgggaaatcatctcttctcatttaacgtactcttcttaagagggtgtgtcttggtaagcacctcccatcatgaaaggtgaaggacactttttccttttgtttgcaccttttaggaccagtgcgacgtaaactcaaacaagcagatattctctccagtatttgactcttgaccaagtgacccaacaatggaaggggtagttagaagtcatttattttggcaggggtgttgctaagagaaaaaattcaaagaaattaaatttagaccgggcacagtggctcgcgcctgtaatcctagcactttaggaggcctaggtgggtggatcgcctgaaatcaggagttcaagaccagcctggccaatgtggtgaaaccctgtctctattaaaaatacaaaaattagccaggtgtggcggcgggagcctgtaatcccagctacttgggaggctaaggcagaagaatcgcttgaacccaagaggcagaggttgcagtgagccgacatcgtgccattgcgcttcagcctgggcaacaggagcgaaactccatcctaaaaaaaaaaaaaaaagaaaagaaaagaaaagaaaagaaaaaaagaaataaattaaatttaacagaatttaactgagcaaataatgatcctcaaattgggcagcccccatccagaatcagaaggttcagagagattccagcactgtcacatggtgagacaggatttatgaatagaaaaaggaaagcaacatacagaaaacagaagtgagacacagaaacagttggaatggttatagcttggcatttgccttatttgaacactgaacagttggctgcctgttgagtggttgaagtatggcttctgtgattgcctgaggcttggctacttgtttgggttttttgtttgtttgtttttgtttttgagacggagttttgctcttattgcccaggctggagtgcaatggcgcgatctcggctcactgcaacctccacctcgcgggttcaagcgattctcctgcctcagcctcccgcccgccaccacgctggataatatttttgtatttttagtagagatgggggtttcaccatgttcgccagtctggtctcgagctcctgacctcaggtgatccgaccccctcggcctcccaaagtgctgggattataggtgtgagccactgcacccgccagcctccttctttaacatccattctaagctattgctatttgtccttttcactcccgggttctatctccttgtagtgaacactgttagggttgttcctcccttctctgctatgattcttccttgtctataactgattcctcccctccagcagtttgaccttgtgctctggccattgcgattggtcagatttacccatcctcaccataagctaggccaatcagatttctttttcctgagagtgtagaagtttgacctcatgaatatgaaagttgtaggttgttgagagctaagcaccagaagtggtttggttaggaggaaggaaggtctataattttctgctgctgaggtttaggattttcctgagtgccaacacttccctgtcttcaggagagttccaataaatttacctttcttgaataagttttttaaaattggcttatgttatctgcaaccaaagaacctcaattaacacagtctccatgtgatagaaggttccttggagacaaggccaaaatttttttttttttttttttttgagacagagtctctatcacccaggctaaagtgcagtggcacaatctcggctcactgtaacctctgcctcccaagttcaagcaagtcttgtgcctcagcctccaagtagctgagattacaggcatgtgccactacgcccggctaatttttgtattttctggagagacggggtttcaccatgttggtcaggctggtctcgaactcctggcctcacgtgatccatctacctcggcctcccaaagtgctgagattacaagtgtgagccaccatgtccagccaaggccaaattttaattcatttatccatttatgcattcatcaaacatttattgagcatttgctatgtgacagacacgtggtaggtactgggaacccaaagataaattagacaatcccctcaactcaccaagcttgttgcctaattgtaagtataaatgtattcaatcaatcattcattcacttaataagtacttcatttatccaatgaataattaccaacactcatttaatattatgtaacaggtcttggcactaaatgcttttgttaattctccaactctatgaggtatatcccattttacagaagaagtacctgagtcatagagaggttaggcagctttgcctaaatcataaggattctaggtgctgaaaccggtcttcaattatggtatatctgactgcagagctcttgcttctaagcattgtgtaacctccctctcaaagaatctcaaagcagtgtgatacatgcttacacaggtgtgtataaagctcacagaggagaaagcaactaattttgtggggaggttggggttcaaaacaggcttcacagttgaagtggtttgagcaatcttgaaggaagagaagggttgtcttcctggtgcctagcacagaactttgcatatgaacactgtaaaatgatgattaagcggcttatgtttctggaaggagttgttttcctgtttacatggagtctggggtgtttcctactgcctactgcagcatcatttttgtgatttagcaatggcatgtgaagtaatcagatcatctgtatatcactgatgctcacagaagcctgtaaggtaagtagtacaggtacacactttgtaagatgagtgaggaaaccagggctgagtttgcattacttgtccaagactatacatagtgagtaagtggcggaacaagacaaggggccagccccctgaggagggatcggctaacaggactcctcaaatctagccagactcctttactcctcttagcctgcaggtgaggctttgatctttctagactcgacacccgagtttctgaaggtttcctcagaacaccctccccatccttctcagttccagctctccaagtcccgctcatcttccaagatctgtctcattgcacatcttcctcgcwagccttctccagagtcattcagctcactccctaagcttcagttaaatcccttagccctgcttccatccagattcctgccctgaaaactttctacctggttagactcatcactgccattcagcttccctcatcagaactcctgttgcctaatctctccagccttaggttggtctttaactattgttttctttctatgtgtatatcttgtctctcactgaaatgtaagctccatgaagcacagccacatgtttcctttttagccttatacatacagatgtatattcactttgggatcaatagtgtttgtcaactcaaataggatgtgtgggatgaatgatcccaccttctgttagattattcagctcctaagtcatgcaaaaccaataccttgtggacctcctttctaaagctcctgcagggtggggaaagaatgcacggattctcataggtgcatttagcaattactagtaaccaacacttaatgaatgcttactaattgctaggtcctgtacaaaatacattacatacataaacttattcaatcttcacgacaactattattgtccccactgaacagatgaagacacatagaggtcactcagctagtaagtggcgcagctaggatttaaaacccagaccgactccagagtccatactctcaattatgatactaaattctttatggataacagaaagtctctaattgtaatgtagatcaatttccttgctttctaaccccatgggaagatggaactaaaagggtgagaaaataatatttattatactcctactataagcctagtattataagaggtgcataatgggttaatgatataattcttgctgtaagtctatgaagcaggaagtattaactccattttaaagaatttggcttctaaagtggttaaacacagtgctcaagttttagcttccagttattggcagagttggaattagaccaggttttctaactttgaaggaaagacttaatttaaaggagactgtatagaaaaccctgccaagggcaaatgtgaagggcacgtgaaaaggcatctgaattattacttataataattcagaaatagtgaatgtgtggcgcatattgaagaatgatgagagattgtcaaaaaatctattctataaacactcacaraggaatcagctaattaaataagcgagctgcctgtcttgggctaggacataaactccaaaacttcccacgaggcaagggcaaagagggcgccacctgtcctggagaacctgggaacccgctctagagacttcggctcagccccttttatttcctcacactctaattggctacttttccctgggctccgcctcctcctcgrtctggaccattaaacaggcaagccctaccccggacctggatgcggcctccaatcaggtgccaggccctggagtccctctagagaagccccctctccaccggcgaggcgctttgctctcgtccgtgattggccaggcagcagcatggggtccgcctccttctcttccagattggtcagcggtcctcaggaccacatccctctcggcaggtccccgccgctttttcccttcgctgcgtggccttggccgagaccggtcctctgcggagagggccccgccctctgtgaaggcccgcccgggaattggcggcggcgctgcagccatttccggtttcggggaggtgggtggggtgcggagcgggacttggagcagccgccgccgctgccaccgcytacagakcctgccttgcgcctggtgctgccaggaagatgcggccggagcccggaggctgctgctgccgccgcacggtgcgggcgaatggctgcgtggcgaacggggaagtacggaacgggtacgtgaggagcagcgctgcagccgcagccgcagccgccgccggccaggtacgaggggcccgcgcggcggggccggggtggcggtgtggactggcggaggggcggccgggcggggcgaggtctccgggccatccgctgggcaatccgcggggcgggcgccgttcgcaggtgtgggcggcagtgtccggccgctggcccgacctccacgagcctggaggctcaaggacggctcgggggctccccacctctccgcgcctggaggtcttactcccggagctctgggttctgctcagagctccgggtacttttctctgccccattctgccagaagtgtgtgctgtccccaggggaagcgatgaggggcccttcggactccagtgggagccgcccaagggctccsgagggtcccttctcaaacccctgaggttattgcttccttttaaagtcctgcagtcgtccaaagaaaaccacccatggggtccttaagaagcaaagaaaattaggcggtggtgtcagatggaaacacacccagcctctcccaaccacattctggactaccacgttcagtccccaaccaggacattggtccatagatctggcagggaatccaagctggtccctcgaaagcatcattctcttaactctgccggtggtgagactctaccccaggctccaggttggattaggtggccccttcgaccctttcctgaacacgagtgctatcacacraggggattgtttagcctggtggtgacttgcgatgactctatactaattaaccatgctgaatcatcaaccaagttcaggcagttctaaaatattttgaaaagttctaaattcaagacaatgcttattatcaaccttacagtggtctggactgacagatattctgttgaaatgtgtttttaaagatgagctggttaaaaagatgcaagatcggtgttcctggaagagagtgttgcgataattttgcagttgactttaatacgtttaagtcttgtacagatattaaggaacgcttagaaagtactctgtttccctttagcgggagtgtgactgttgcagtttgataggatggtgatcttaatttggctttaacataactactccccagatgagtagttatgatggataggtctgttactgtttgctgcgaagcagaaaataaagcatttttccaggtcatgttgagatattgagactgagttgaggggaaaaataagtaaagcagacttgacctcccctgaagttgtaaggtgtcaaagcgaagtaatacacagatcaaaagatttgttttcacttttaaagaaataattgtgtgagggaggaagtgataacagtcagctcattataagcagtggaatagtttgtcgttttcctagcaatgtaaacgacttataagacaaaattgttgtggtatagaatgtaatagggaaatttaacgggtaggagttagaaaatacatttgcaggtgaatttcattgaggtatgattttttttttgtttttgtttttgtttttttttttcagacagtttygctcttgtcacccaggctggagtgcaatggcgcgatctcggctcactgcagcctccaccccctgggttcaagcgattctcctgccccagcctcccgagtagctgggattacaggcgcccgtcatcacgcccggctaaattttgtatttttattagagatggggtttcaccatgttggccaggttggtctcgaactcctgacctcaggtgattggcctgccttggcctccaaaagtgctgggattacaggcgcaccaggccgaggtatgattttttttgtttttttggttttttttgagatggagtctcgctctgtcgcccaggctggagtgcagtggcgcgatctcggctcactgcaagctctacctcccaggttcacgccattctcctgcctcagcctcccaagtagctgggcctacaggcacccgccaccacgcccggctaattttttgtatttktagtagatacggkgtttcactgtgttagccaggatggtctygatttcctgacctcgtgatcygcctgcctcggcctcccagagtgctgggattacaggygtgagccactgcacctggccggtatgattttttaaaatgaaaaaggaagtcaagagaaaggtgttcacacttcagcgktgctttgtgttcaaatgcttctttcaatccctatgagttatgttcagatttagtaggaaatcaaggacctttctcccataatctctaacaatttagcatttatagaatgatatttcttcagagcttgccaactaataaggtgaagaaatatcaaggtactaacatgacattttaaaatctgtatgaataacatttggttgacttttggggacatgttttgtaaaagtttcactcaaggcacattggtggcatttggaagaacggtctgttggaatgctgtgagggctgcagtatcccttctagaaaactacttctcaccagtatttttaatacagacttcagatctggagctttctacactctcagatggaggaatattgtctgtgaatatttttctttcttatacaaaagagagatcttggtaactacatgagagcaatacaatatcttaacattttttaaaagttgttttcatttttaattaaagcgatgtgcttgtgctccaacctctacctatctttcccctctttctggggsggaaatgttgccaactgtgccatcaaaaatacgcatacagctgtgtgtcatgcttttactaaaatatgaatttagagtataacattgttgagatgtaaattcttttcctcacatctcccaccatgtcttttaatgaacaggagagaagtcagaaacgtctaggatcactttacactctcaagagtatgtttctgtgcttgaagagatgaatgaatgtgtatagtaaaagaacaactcttggatttgggtttagaatttgatgagctagatgctgtgttaaggagttatgaaacaatcacacattgctgtttagtgatgacagtagacacacagttttcacaatagtaacagttgaamaatagagcagtaatttttcctctctgctattcagatgagtgggaggagcacaaacctttatttgaggtaaggtgtggcaatttgcccgagggaaacttttacattagcattggaaagaacctttgggagtttatttaattcagtcctttatctctttgtaggagtttattaaaatcagtcttgatagaaaattctgtactgtttttaaagatctccaggggatttgcagcaagtttttctctatagcaaattggattattattccatgatcttaattaccaaatttcttcctgtggatttaacatttgatgaaataaatgccatgttttggttgcacctgaaatatagtagtttgkgtgtttgtttttaaaactycacgttaacagctctttttaaaagagcttccatttctttatagaagttttgagatttaggttttccttttactttcctgagttagttaataagtgtgaaagaaaaaaagttatctacctttgagacagttttgaccctaacttttttccctttgggtgtagttttaatgagatattagaaggatgagagctctctggcttacagaataaaaaattctatctcaaggaattggggcaaaagttgtgttcttatgttaaataataagcaaagtagaaagaacaaagtgttagtcttgcttcttaggaggaggcaaataaataactaataaagctggtttactaaatagctactagcttttgtttccactgagggagaaacagtaactgggggtttatatgtgatagttaaggaaaaggagacgatagttatgaggctagaacagtagaaatagttagaatagtcatatatctatttagatttagcagatcctgataagatacctcagatacctgaaggcttttcagaaataatgtaatttacaacttggaggacaagattttcatttcagttttcactctaaggggaagcatatcttgattcttacatagctgcatctgaagaattccagagttattygagrtactcaggaattttctttaacaggaattcttgggaaatgtgtaagcagctatgttcttaagatagtattttagaactaggatgttcagaaaagtcagacttgcccactttttagggtttgcccatgtgccatagaaatttgcaccgctttgagcaagacagttaattggttgatttaattagattcagtttttggaagaaagaagcagtgttyattggtagaataggcaattcagagggatgggtagaggcactgtttgcattctgagtgggtgtgccatacttgattaaataaatggtttgtggactcaaagtcagttcccttctgggtagtttctgagaagcttctgtaatataattcacaatttgtgaccgataaaaaagtaagtcctttgctcttgacccatttactgttagaaaatttatcttaagtttgtctttaagactactttttattgcaaagcttgaggcagctattcttccttttttaaaaaaataatttttacttctcattatagaaataatacatgtttaatgtgggatcataaarcattgagataatctctgcgttaggtttttttttttttgagacagagtctcactctgtcgcccaggctggagtgcagtggcgccatctcagttcactgcagcctccrcctcccgggttcaagcgattctccagcctcagcctcctgagtagctgggattacaggcatgcgccaccacgcctggctgatttttgcatttgtagtagagacaaggtttcacagtgttggccaggctggtctcgaactcctgacctcaggtgatccacctgcctccgcctcccaaagtgctgggattacaggcgtgagccaccacgcctagccggaggtttgttttttaatgtggtctattgtaaatccatctgctactttccgttaatttcttttctttctttttttttttttttttggcgagatagggtctcgctccagcctggcctgcagtagcacagtcatagcttactgcggcctcaacttctcgggctcaagcgatcctcccayctcagcctcccaagtagctgggtccacaggtgtgcaccactacagtgggctaatttttttttttgagacagagtcttgctctgtcacccaggctggagtgcagtggcgcgatcttggctcactgcaagctctacttcccaggttcacaccattctcctgcctcagcctcccgagtagctgggactacaggtgctcaccaacacacccggctaattttttttttttttttttgtatttttagtagagacagggtttccccatgttagccaggatggtctcgctctcctgaccttgtaatccgcctgcctcagtctcccaaagtgctggaattacaggcttgagccaccatgcctggccttttttttttttttttttttgtagagatgggtcttactatgttccccaggctagtctcttttttacttaaacaaacaaacaaaaataaataaaaatatatatatataaagagagagggagacagagagagagggagacagagtctcactatgttgcccaggctgatctcaaactgttgggtacaatcgatcctcctgccttggcctcctgaagtgctgagattataggtgtgagccaccgcacccagccacccaggctggtctcagactcctgaccacaagcatcctcctgcttcagcctaccaaagtgctgggrttacagccactgtagcagactattttgtgataatttctaagtacagtgaaatatgcggttgtactgatactatgggtgtgatccagtcttactccaaaaaataggtattaagggctgggcacagtggctcatacctgtaatcccagcactaagggaagccaaggtgtaaggattgcttgagcccaggagttcaagatcagcctgggcaacgtggcgagaccccatctctatttaattaaaaaataataaggtatatgaccaggtaccgtggctcacgcctgtaatcccagcactttgggaagccgagatgggcggatcacttgaggtcaggagtttgagaccagcctggccaacatggtgaaaccccgtctctactaaaaatgtaaaaattagccgggtgtggtggtgtgtgcctataatcccagctactctgggagtctgaggtagtagaatcgcttgaacccaggaggtggaagttgcagtgagccaagatggtgccactgcacttcagcttgggcgacagtgagactctgtctcaacaaaacaaaacaaaacaaaacctcagttagataccatttcacaccactaggattgctaaaataataaaccaggtattaagtgttcatgaggatatagagaaattagaatcctgatacattgctggtgggattataaaatgatgcagccactttaggaaacagttaaacatagagttagcatgtggcccagtaattctactcccaagaaaaatgaaacatatgttcctgcagaaacttgtatattaattataatagcagcattgttgattgattgattgattgattcagggtgttactgttacccaggctggcaggacatggctcaccgcagcctccacctcctgggctcaatcaatcctcccacctcagcctcccaagtatctgggactgcaggcatatgccaccatgagtggcaaaatttttttttttttgagacagagtctcactccgttgcccaggctggggtgcagtgtggctcactgcaacctccaccccactggttcaagcagttctcctgcctccgccttccgagtagctgggactacaggyacatgccaccacgcccagctaattttttatatttttagtagagatggggtttcaccatgttggtcaggctggtctcagactcctgacctaagtgatccatccgcttcggmcttccaaagtgctggaattacaggcgtgaaccactgtgtctagcmccrcgttatttataatagccaaaaagtagaaacaatccaaatgtctatcaactgatgagtagataaaatatggtatatccatataaaaggatattattcagcaatactactgaaggaatgcagtactaatacatgcaggagaatactacattgtttatggccatgtgtttatatagtgaaagtatttaaaaatacaggggaatgataaacaccaaattcccaattcttctgaggaggaaaggaaatatagcatttccccaggacagacttcttaaaaggattggagaactacttaaacatgtcagatcttgacactgtcctgatggcctcctgtcactaataacagaatacaaaatggggtttacaaggcccaccatgaactttcccatccctctctgacttcatatcctgccaggtcactgctttctagccaatccgggctttctgatgttccccaaacacattgccatcaagcacccctccctggggccttattattattattattattattattattattattattattattttgagatggagcctcaatctgtcacccaggctggagtgcagtgatgygatctcggctcactgcaacctccgcctccaagttcaaatgattctcctgtctcagcctcccaaagtgctggaattacaggcgtgacctaccacgcctggggtccctggggctttagcctttacagttacctcagcctggaaagctttttcacagagttctcttccctactccaagtccatctgcttacaccttacctccaccctgtttaaaatgctctttttccacgattttattctgattgtagcagtgtgatctgatacagtatatctatttgyttatctgttgtctgcctctctcacaggagtgtatttctagtgctcagatcatgcctagctcatagcagggactcaataagtattgaatgaataactttaatgttttatttaatggaaaaaagatctaaagcatrtaagctaaatcttaagttttgataaagctagatgttgaatacagttttatttctatttttttgatgataattactgtgtcatatttcatacatactctgctggttgacaaaaactagctccctaaaataatgttacagacataagtaagaaatggattgtggtgacacataagctgttaaagaaacccrtagcctaatttatagtgtatcaggtttgcaagyggtttaaaacaatagcggtttactgaatgttcttactagcgtgaggggagagcttgtgagaagtaggaagaggccagagaaggtcctggggtctggcacactctgatatgcttcatcacctctccctaagctctccctacagggcagtggggccagtggtgacttttgcggcaccctctccattgtcttaccaagggcttcagctgtgagacgccggttggtgctacaaggaaggggaaacgtgtcagctctttcctctgctcttttctcacattgatttcaaatgccaagaagctgggctgagaaaccgggcttgtgatcctggttgtactgcagtccaccatgtgctggagagctctgcaggttgtgctaaagggtagtgtctttattgcctcctgtataagcttgacttttacataggcaagcaggttatttccaggacaactaaattagttggtgcgaaacctcatttcctagaaacccattttcttagtagaggaaacccatataaccatttgtctccatgtaagtgtagctaataacatgaataacaaaaatagctaattatttaaatagcaaaaataagtatggaagatgaatttgcagtaaaattctaatattaagccactgattattttaaaacaatcagattaagttgtagtacctctgaaataattaaaggaaaatttgattcttagaaaatctcaattyattggaaagccatggaattaataaaataaaaaaagaaaatctcaggcaatataaactaaggaatggcaaatggaaaatgtattgattggtggaaaagtaattgcggtttttgacattgaaagtaattacttttgccattacttttaatggcggaaaccatttaatggcaattacttttgcaccaacctataaataattggactctagttccaactttgatatttagctttcccatgactgttgacaaattgcttaatctactttccttgattttgtcagtcaaatgaggaggaagagacagcttgagaaacatttgtaagagaaatgcttattactttgtatgtgtttttcgtcttacatattaaatataaattcctttaggtgatattctttaaaatgatttccttactcccttttatatttacatccattttctcttaaaaaaacaaacaaacaaaatactgcacaattcttgaagacaaggattacctcttacctcttatttgtttcatgaaatatagagtacaattttttttttttttgagatgggtcttgttctatcacccaggctggagtgcagtggcgccatcatggctcactgcagcttcaaccttctgggctcaggagatcctcctatctcagcctccccagtagctgggactacattcatgcaccaccacatccggctaacttttgaaaatgttgtgtagagatagggtttcactatgttgtccaggctggttttaaactcctgggtccaagcaatcctcccgccttggcctcccaaagtgttgggattacaggcgtgagctcctgtgcccagcctagagtacagttcttgacatatagatagaaattaagtatttgtagaatgagtggaaaaaaaaatgaaatgattatgttgattttgagtttctcggtggaatagggctttggattcctagaagagactttaatgttgaaaaattatttttgtagttttgaaaatgttaaaaaattgaacatgagaaatctccacttctctgggcatgtgaaattaaagggagggatgatcaagttgtgagagattccctaggccagcagtgctgatgcaagaaggtgaacatgtagactgctgtattctgtacacacacacacacacacacacacacacacmgtcccctccctcctgggaaagcaaaagttgttgttgttttttgagacagagtctcgctctgttgcccaggctggagtgcagtggcacgcggttttggctcactgcaacctttgcctcctgggttcaagcggctctcctgcctcagcctccccagtagctgggattatgggcgtgcgccaccatgcctggcaaatttttgtattttcagtagagagagggtttcaccatgttggtcaggctggtctcgaagtcctgacctcatgatcagcctgcctcggcctcccaaaatgctggaactacagacgtgagccactgcgccaggcagcagaagtttttgacgatttcyagacaatgtgtgtaaagacctttagagtctaaagttaatgtttgcattttgcagtcttaggcagatacaatgaggtataaaacacctctatccaaacaactgagttggactgggctgaagatttaagtccttcagttcggtgtagtatcccaagagtgggatccrttgtatgtttgttasaggccactccctctagctttatctgctaagcactgtgagattgtgcttaatttcactttgsttttctagttcaggcctccagcctggaggtgaatgtcctgtgtagaaaactggccataaatttagggctgttatgaaatttagtctgtcatgccaacccatatagctgtcataagttctgctggtttttctttctcttgatggagttctgcctatggcaagccccagttatcatcactcacgctaaagctctacaagtaccacaagtagagagaggaaatggctggcactttcagctcacctagagaggcctcttctccctctggaattttaattctgctagtcctctttgctatgcatagaagacagctcttcaatctttaaagccatttatttakttgaataatctatttagttttatctagttgttactgtgaaagcactagcttgcctctctctattaaagctaacctggaagtctcattattttttgaatttttgttgccacaaacatgacataagaataagtttgttctgggccaggcatggtggcttatgcctgcaattccagcactttggaaggccaaactgggaggattccttgaggccaggagttcaagaccagcctgggcaacatagggaaacctcatctaaaaaaaaaaaaaaattaaccaggtatggtggcgggcacttgtatagtctcagctactctggaggctgaagtgagaggattacatgagcccaggagtttgaggttacagtgagctatggttacgccactctactccagcttgggcagcaacagagtgagaccctgtctctttaaaataaataaataggccaaatgtttaaagtagaaagtcaaagtggccagccattccactacaagataaccagtgttttcagtttgatttatagctttccagattagcatgtgtgtgcatgactttgtcattttaccttttttttttttttttttttgagaaagagtcttgcttttttgcccaggccggaatgtggttgcaggatcttgactcaccgcaacctccgcctcccaggttcaagcaattctcctgcctcagcctcccgagtagctgggattacaggcatgcaccaccacgcccggctaattttgtatttttagtagaaatggggtttctccatgttggtcaggctggtctcaaactccygacctcaggtgatccgcccgccttggcctcccaaagtgctagtattacaggtgtgagccaccgcatctggccgggaaatattttttaaaaatttcttgaagcccttaaagtttacaggctctgctaacatgataaatacccaataaaaatatagaaaagaaattctaagagattttaatatagaatcattatctgttaactgttttagttgagagcaacagaaactgagtctggttaaactaagcaaagagtgatttattggaaggatgataggtatacaaaaatgggatgggggatgaaattgaacaagtctcagaaaggcaggaattggcacagctcttgggacctcagtggcaggagtttgtgaaccctttcttcaggacattggagacycactgcccttcagactctctccccattgacattttaaatccccataaaagagggttgttggatttctttcggcagaggtgtctgtgctgcatcaatcagttatggtccaggaaatatagtcacaacaaagcatacacgtgaccaccaggggcgcatccctgcatatcagggagtattcccagagaagggaagttgacacaaaccggattgcctctccagtggtgtgcaccacaaaaccagactggagcacgtggtgggggcagagtggagggaatggtattacaggctcagaacgtgtcagcagtggaggagaactcagatgaagatgcagaatttgtggcagagctgcacttgtactccagtcttcaggctcttgcatctcttacaccgtgatgcttatctagagatggaaaagtgttacagcggaggcttgggtggccagtgtgataactcctgggcagacatcagtgcccagtgtgtacaggatgccactgaactgaaatggaaatgttccactccatatatgcttgaagatctccttttgggggttttcaatagcaaaatggtaatgtcaaaatataaatgtgtttcacagctagttttggaaacatttttcattccattccacatgagatacttactgacaaaaactaaggaatttatgctgcctacacgaaaaactatggacttctacttttcagaatttccctgctgaaaaaaggagacacttctggacatacacattcagagcacagtatagcctrtgtgatttgtgtaaagctccaaactgttctctctagtatgtgtgatatgcagtagggagaggccagtacatttcagtaaaattgcaaggacagtttcagcagaactgattttaaggagcaacagaaacatagcacttgaaaatgaatagggttcgtttaatggacaaarcatgataacagttctttgattgctgaagaataatgggtggttcacattagacattaagtttttaaaaataaagttccaaaccattcaccagctgggcaggttctgttatcctgctgtagcatgcagctggaatgtgcttatttgcttaaggaaattatgcttttgtgattttgtattcatatcagaaatgtgtgcttctgtttcctaataattacttcactgttattggattataacatagttactccctgtcctttcatgggattcttgaaacctttattcaggatcatttcttctgagtcagtttacagtgcaataaaaactgttttattttaattatttttaaaaaattttcctgaaacttaagagacagaaggcaacatataatccagggttttcttttgctatagaggatatcattaggacgtttgacaaaatctgaataaacttgtagactaggctgggcacagtggctcatgcctgtaatcccagcagtttgagagaccaaggcaggaggatagcttgagcccaggagtttgagaccagcctgggcaatgtagtgaaatcccatctctacaataaatcagtaaatatttattgtattaatcttatgttatcttatgttaatctcttattgtgctgtggtcccagcttcctgggaggctgaggccggaggatcacttaagcctgaaaggtagaggctgcagtaagccatgatcacaccactgcactccatcctgggtggcagagtgagatgctgtcaatagaaaaaaaaaaaaaaaagaaacaaaccttttcaacctccttaaaattctctcgtgccccacaggaagctcttggactaaagcacagaaagtcattactaattctatctggaagccagaaaataaggtggagccaaagatgactccaaacttgggagactgggtagactggatggtgatgctgttgaccaaaataggtaatagaagaggagtatcaggttttaactgagagggagggttaggatggtgagaagaagttcagctttagacttgttgagtttgaggtgcccatgaagtctaagtggagctatgtagaaggcaggtggaaatgcgaatgtggagttctggaaaggaatttgggattgcagtgtagacttgagcttacttgtagcatctgaggtctagctgagaactcctmagtagatgagaattcactagagaggctatagatagtgaggcaagtttaaagagaagggtagagacacggagaagggggttggggagcagccaaagcaggcgtccccgcagttgacttgccaccaagggaatgtgggtgaatgaccaaggcaggcgtccccatggagatcagacaccaaaggaacgtgggtgaataatcagagaggcatcccygcaatgattaaacaccaagggaaggctgccttcccgagtccgtgaccggcaccggagttttgggtccacggataaaatgtgtctcctttgtctctatcagaaaatgaaaggaattgaaattaagagaagggagagattgaagggtggcgccaagattgaaaggagaaagaggttgagggatagtgagagaggttggagaaaagagtaaaaagaggccgcttacccgatttaaaatcggtgagatgttccttgggctggttggtctgaggacctgaggttgtaggtagatctcttcacgaagtgaggatgaggacaggggactggtctcccgaaggagtcccgctgaccctggtctttggcacyaaatgtttcacgtgtgcatgtgaagagacccccccaaacaggctttgtgtgagcaacaaggctgtktatttcacctgggtgctagtgggctgagtccaaaaaaggagtcagcaaagggcgggaattatcattagttcttataggttttgggataggcggtggagttaggagcaatgttttgcaggcagcgggtggatctcacaaagtacattgtcaagggtggggagaattataaagaaccttcttaagggtgggggagattacaaagtacattgatcrgttagggtggggcagaaacaaatcacaatgatggaatgtcatcagttaaggctattttcatttcttttgtggatcttcagttgcttcaggccagctagatgtatacgtgcaggtcactggggatatgatggcttagcttgggctcagaggcctgacaatatatactcgtaaaaaacaagaaaagaaaaatcaaagcagtttagaaggttataaacaaaaaatatgccatcttgtcccaccctactccttaccacattttcttgtgtctccttcgagacaattttagtcttatggaaacatatgtattacacatatggcttatcttttattatactttcccaatattgctttggttaggagtgccttttcagctgcttaataaacatggttgacagcccacaggcatgtggacaaaatggcccattagattgattttttttccttctcttgttctgtaatgtgttttatgatggtgtgcttatagtcttgtcggaaaaaaatttcttcctttgcatttttattttcttttacattttcttaaacagtaatattactgttcaagcaaacatttcttgatattcctaaatctttccttgattaataatgctaatatagtgtcacattcttgtttgcttaatgtgaacagactgtgaacagactgatacgaaatgttattaagtgttaactatttattaagacttcataaatactaccctgggtgctagacgtgcaataatgagcaaaacagacctggtgtttttcctcatggattattacctatgtataagagagtaataccattattgtttgaatcatgtgaaagataagatttagcatcagttcttaaaggtgaagtgattttgttctctcagagtttaaagacttttcaccttggagaggctcgcgtgtcagttggcgtgcccatctgcctccctgtatcatcagtcactctgttttgacagaagccacattccaaagtcayttcttttcacaggttctgaaggtggaaaaaaagaaaccccagccacttcctagttgaacctaaattctttaaaatacatttaattttgaataaggctttggtaaaatcacacagttcttcataatggtttagcatcctccttcctagagagtccagcctacagtatgaattgacctgatcctgcctgtgtgggtgtgcctgaaatcaaggcggatatctttaaaagagacccacccatagcattcctgacctgtaaactcgctgcatgttggattragactgcggtgggkgggctctgtaatttccaggctttttaatgatgtgtacagttgagagtaaatagtttaaataatttcatagttagggagagttcagcactggtattaaacagagttcttaaggcaaaatattttcagatacagttcttaaagagatgatcagaatgttaatttttcttgtcttttaaattgcttttcattttgctttgcccagcttaataacttttttatattgttatgttgttaatttttaaacaattttctgccttaagatattggctcaattttaggtattctgttctaaacacattacagtcttactcccatttaaaagtttaagtattaaatattgacaccaaactttttctgctgtgtggaagagattgatgaagacccaaatgagtttgtgaatagttttcagaagttatttagatcatcaagttgaatcagtaccaacagattccatccatcttccatgcctatctgaatgcctgtcctttgtcacatacaactgtgtctttccgaactattccagtctgtaacactgaagcagctttccaaaactaacattacsgggataggatattctaaaatatctttaccccttggatatgtataacaattgattgtatagttatgtaaattttattaatttgtttttatttgtttatatcgtatctctgatcagattgcctgagagggcaagaaaggatcttttagttctttgggaccttttgtaatgcttaattgacgatatgcccctggtaaattttgtttaaccatcctcactgcagttgttccaaagttaagattaaagttaacacacaaacttgtctagcagatttcttctataaagcaagatttccattaaaattgaccaagaagcaaaaagttttcatctatgagatcaaaagtaaagtagcttggtttttgtgtattaaaatccaagtatcccaaaggttaaarcaagggataatcttacratgtttgggaatgaatacttaagatgaagggggacagaaaaattcatgtcagttactaacaatttttccccttgttttgggtttcactttctttttacttttatataatgctgggccacacttttttttttttttctgtatcacctaggctgtagggaagtggcatgatcatggctcactgccatctcgaccttctgggytcaggtgatcctcccacctatctcctgaggacctgggactacaggcatgtgccaccatgtccagctagtgtttttgttttttgtttttgtagaggcaagattttgccatgtgcccaggctggtctcaaactcctgggctcaagttatctgcccaccttggcctcccaaagtgctaggattacaggcatgcgccactgcacccagcctggaccacacttayataaacatcttagttttttgcatgatttacttgtgttatcactaccaacaaaggttaatttgaactacgtgtttctgcaggggcctactgctgataattatttggaatactatggctgggtggctttaagaatgtgtggtagtaaaacatttacaaatattttacattctaataaagctgaatttacttttgaacttttgatctcttcatctgtaggccaatatagtacttttttgggacaggctttctctttgttgatttatattttttgctttttttattagaacaaaagaaattatgctagcattttagaatctatttaagraaatcaaataatgataaaaatcagtgttaggtggtgttcttatgcagtccttcttgctccccttcttttactgttcatctgaagggcatataatttataagttatttctattgaaaacaagtagccctgcttatctcttagtgttagatttgactgttgcttacaaaattcttttttttttttttttttgagatggggtttcgctcttattkcccaggctggagtgcaatggcttgatctcggctccccacaacttccatctccaaggttcaagcaattctcctgcctcagcctcctgaakagctgagattataggcatgcgccaccacacccrcctagttttgtatttttagtagagatgggttttctccatgtgatcaggctgggcttgaactcccaacctcaggtgattcgtccgcctcggcctcccaaagtgctgggattataggcgtgagccaccgtgcctggcctaaaattctttttttttttttttcttgtttccagtgaggttggaacttagaaaattcctttttttttttgacacggagtcttgckctgtcacccaggcaggagtgcagtggcgtgatcttggcttactgcagcctccacttcccagattcaagcaactctcctccctcagcctcccaagtagctgggattagaggtgtgcaccaccaatcctggctaatatttgcatttttagtagagacaggtttcaccatgttgaccaggctggtcttgaactcctgacctcaagtgatctgcccgcctcagcctcccaaagtgctgggattacaggtgtgagccagtgcgcccggcggaacttagaaattcttaaggtataattcagcaaatctctaaggacctagattttaggtaggaatgtttttcttgccatgatggaaataaacatttttaacctctcttttagatccatcatgttacacaaaatggaggactatataaaagaccgtttaatgaagcttttgaagaaacaccaatgctggttgctgtgctcacgtatgtggggtatggcgtactcaccctctttggatatcttcgagatttcttgaggtattggagaattgaaaagtgtcaccatgcaacagaaagagaagaacaaaaggtaactgttagagagtttttgattctgtaaatagaagccttttatggaaatcttagtatttttgcacaaaagctttttctcagaaattkgggtacacattaaaattaaactattccagatgcagttaaatgaaaacattctacaaagaaagctgaaaaataacaaggttaaagatatcaaagcattcatcatgggtttaatcaagaagaacctaaggaggtgggcggcactatccctgttttatggattagaaatcaaaaagtcacaagttaaacaacgtttcccaagatgccaggtgtcagagctgctgtgtggacagaggactgtgaagtgaaaaagccttgctctttctgttcataccagcatgctgaatcccaggttgtgtttaccattttctgaaaaggttgtattctttggaattaataatgtgttttctcatagatacattatacatagttgggtgattcacacatcagctcctctccccagacaaacaagctgtaatacagaatgtggccaaccgattctatttacrgtaaacaacactcttgttttaggaatggcaaacatatgagcatggttgtctggggaagagggcttcttcattcacttcacttttctctgcatgttcctttgtacctctgaaggkttttttgtttgtttgtttgtttgttkattttttgagacagagtctcgctttgtcaacccaggctggagtgcagtggtgcgatctcggctcactgcaagctctgcctcctgggttcacaccattcttctgcctcagcctcccaagtagctgggactacaggcacctgccaccacgcccggctaattttttttttttktttgagacaagtcttgctctgtcgcccaggctggagtgcagtggctcggtctcggctcactgcaagctccgcctcccgggttcacaccattctctggcctcagcctccccagtatctgggactacaggtgcctgccaccgtgcccggctaattttttttgtgtttttagtagagacggggttttactgtgttagccaggatggtctcaatctcctgaccttgtgatccacccacctcggcctcccaaagtgctgggattacaggtgtgaaccactgtgcctggccagtttttttgttttttttacttgttattgacttgaagctcacttctggagttgtatacattacatatgtgttacctagtctccataaataaataaaatgagggttaaagatgcctaattttactaaaaataaaacaaacctgtgtgttcttggcatgtcccacatggcaaaaggttgtcttttagcccaggcaaatgtaccagattagagaaggacttaagacattagagtttttttgtggttcctgtgcgtccgaggaaaagaggcaggtgtggggtgagcaaagtcaacgctgagacgagccagtgaacattgattgtagaagaaacaattattcaggtaatggatagtggtcatgtgcaaatgggaagagtatatcacgaaaacattgtcagttactaggaagacaaaaccagtcagtagatacatggattcaaaagtggctcctgggagaactcaagattaggcatcctttctctctcatctcaaccatcttgtactccatccgagccccagcacaagttggccatcctactcattgccctgcaagttaatttcacaaagaaggtaaataagttttttgaatgcaaagccctgcattcagaagttggtccagtaaccctaagtaatttttatcttttaaaacccaaacacatttttaacattttttattttattatcattattttttagacaagagtctcgctcagtcacccaggctggagtacagtggtgtgatctcggctcactgcaacctccgcctcccgggtccaagcaattctcatgcctcagcttcccaagtagcagggagtacaggcatgtgctaccactcccgagataattttgtatttttagtagaaacgaggtttcaccatgttggccaggctgttctcaaactccttgacctcaaacgatccacctgcctcggcctcccaaagtgctgggattacagatgcgagccactgtgcctggcccacatttttaatacgttttgatcccccttctccccctgagcatgtccactcagagtgcatctacagtacgttgattttgtatagccctcagtgacagcttaccatacccttcctaggttgtacagtattgtagttacttgttcacaggcctgtatcctcctactagactgagttgatggcagttatgaccgmtggtagctgaagttttatttaaatattcaaactaaaaactctttatctgcagggacctctcctartgtagatgcatagtcgaaacttgataattgacgtgtattgctggtggtgagggaagtgctgattgtggtgcagacagcacattcctggatgaggggatagtataggcaaaggcatgaagaatgtttgggagaatctggaatgtagacagaagagaaatygtgttttgaaaatcaaagtaagaagtttggtaggcaatgaggagtattgtttttgtttttgtttttaaatagagacagcgtctcgccatgttgcccaggctggtctcaaactcctgtgctcaagcgatcctcctgccttggcctcccaaagtgttgggattayaggagtgagccaccatgaccccaagggcagtttttgatcaggggatttttcatacagcttgtgcagctggtgctcaaagtgtgatgaatgaatgaaaccaacaagatgtatctgaattactttgtgagtacattatctttggaacttgtttcatgtttacagaaagtaaattggtggtttaagtgttgggagctgcctgtgtatcctttgtgtgaaagaattagaacacacagattttattcttaagtagtttctaattttgttgaggaaacaaacatttgaaagttatgggcctttgcaaaaccattatacaagtaaataatacttagattatatgaagatatagaacaaaaaaagtatctgagtagcatagggttaatcaggaaacaattcttggaggaagtaatacaaggaaatgggaggctgaggagagcatttgcctctgcagtttatggagaggattttattaaattattcaaattcatttcaatagaatattcccagtagataacattagcatttaaaacagccaacttctgccattttcttacaaaaattcagcttttagagggaaaggaaaagtcattcctttcctgtgatagatcatgtttgttttctaatgttggattagagatggggaaagagggaggcaaattaagtgttaaactggaaggaggtgagggaaagtggttgcttgggatcataaaatgcaaacataatgttgctacttcctcatttcactgagagagtggtattcataaccacatcctggttttcttcctcatttcattataaaagagagcccagtttaactrtgttaattctttgatgtaaggaaataccgtatgttgctttgaatacaactaaatcacatgatcataccaataaagatgagttaccatgagtttgttctattttatatacattgcataaaattcttggaattctttaccccttaatcctctgttattcgtggtgttttggatgagaatgttgtttttctcaatctatggattatttctttgtgatgtgaggtgaagctagtagttcagaaacacgtacgtgacagatacagcaaaagcttgaattaataaagatgttctaggctgaggcaggaggatcactcaaggccaggagtttgagaccagctgacacaacataatgaaacctcatctctacaaaatgaaaaaatttaattcagaaaaaaatattctaatatttagataggaaatagctaggaacgtaaggagtaaattatggtaggtagttaccacacactgacaaaattttaaactaacattttgcctccacagcttgttcatgatcagatatttaaaaacgggaggaccaaataccacattctcacttattttttaattttttwaattttttttttttttgagatggagtctcactctgtcgcccaggctggagtacagtggcgtgatctcrgctcactgcaatctccgcctccacggttcaagtgattctcttgcctcagcctcccaagtagctggaattacaggcatgcaccaccacgcccagctaattttttgtatttttagtagatacaaggtttcaccatgttggccagcctggtctcaaactcctgacctcagcctgccttggcctcccaaagtgctgggattacaggagtgagccaccgtgcctagcctgttctcacttataagtgggagctaaatgatgagaacatatggatacaaagaggaaaatgacacttgtggtgggtaggaagagggagaggattagaaaaaataacccattgggtgctaggcttagtacctgggtgacaaaataatctgtacaacaagccattgtgatgcgagtttacctgcacaacctgcacacgtacccctgaacctaaaataaaagttacaaaaaataagtagattaaaaatgggagggataggatacggcgaagggacattatatgtttatatcccaataggcttattttcaagatacaaaagaaagaaagaaattcaaatacattactaggaattcccagagggattttattcttggcctccttcaaaaagtagcgtacagccgggtgcgatggctcacacctataatcccagcactttgggaggccgaggtgggtggatcacctgaggtcaggagttcaagaccagcctggccaacgtgatgaaaccccatctctactaaaaatacaaaaattagccaggcgtggtggtgggcacctgtaatcccagctacttgggaggctgaggcaggagaatggcttgaacctgggaggcggaagttgcagtaagctgagatcttgtcacagcactccagcctgggcaatagagactgtctcaaaataaaaaaaaaaaagtagcgtactaagaatattctggtmcctgtcattttggtgcattaagctaggggattgattgtttggtttgtcttctttaattctgtgtatgattctacatttaaaaagaacacaactggctgggcacggcggctcacgtctataatcctagcwctttgggaggccaaggcgggcggatcacctgaagtcaggagttgagaccagcytgaccaacatggtgaaacccsgtctctactaaaaatacaagaattatctggggcgtggtggcacatgcctgtaatccctgctacttgggaggctgaggcacgagaatcacttgaaccagagaggtggaggttgcagtgagccaagatcacaccattgcactccagcctgggcaacaagagagaaactccgtctaaaaataaataaaatacatacatacatacatacatacatachgaagagcactacttagctcccccagaatcatctgaacctgggaggtggaagttgcagtgagctaagattgcaccactgcactccaccctggacaatggagcgagattgtctaaaaaaaataagaagaataaaaaataaagagcactgtatttcattgttttgtgttagttgctgggcacaggacagcagtagtctttttamataattgacatatcataaaggttacctatttaaagtgtacgatacaatggtttttagtatatctacagagttgtgcagccagcaccacaatttaattttgtaatgtttttctcttctgaaaaagaaaccatgaaccattagcagtcactccttcctcatccaccctccccaccctcggcagccamtaatctactttctgtctctgtagatttactattcgggacttttcatataaatggatgtttcatgtaaatgggatcatacagtgtatgttcttctgtgtctggctcctttcacttggcgtaatgtatttgaagttcatgttgtagcatgtatcggtacttcattgcttcctattgctgaataatatttcatcatatggagcagtcatctctacttactatagggatttctcactggtaaaaaactatactcaaaataaacctttcaaagaagctttgtgtagtaggtttaccactgtatctgtttggactagtggcagtaggtttacctctgtatccgtttggactagtgccagtgttaggtttgcaagagtttccctgttacctgttttccctgtttttcatgccaggaaagcttttccttcaaatagtcccatggctagttccytcacttccattttatcctctgttctacccagggcaccccagctaatttgcagcatgtctccccctttcctttttgcttttgtttctgttggtatttgtcactgtctaacatactttatttatttttatttttatttatttttattttcttgagacagtgtcttgctctgttgcccaggctggagtgcaatggcgcgatctcggcttactgcaacttctgtctcccaggttctagcaattctcctgcctcagcctccagagtggctgggactacaggcatgtgcaaccacacctaatttttgtgtttttagtagagacagggctttgccatgttggccaggctggtcttgaactcctgggctcatgtttatctatctgcccacctcggcctcccaaagtgctgggattacaggcgtgagccactgagcctggactagcaaactttgtattttatatgtttatctcttccaccagaatacaaattccaagagggcaaggattattacctttttgtttactactctgtactatagagtgcttggcacatattagacgctcggtaaatgtttaagatacaaggccagaggccaggcgtgttagctcacacctgtaatttcaagcactttgggaggctgaggtgggaagatagcttgagcgcaggagtttgagaccaacctgagcaatgtaacaagaccctgtctcaacaagaaaattaaaaaattagctgggtgtggtggcctacacccatagtcttagctacttgggagactgaggtgggaggatcacttgtacctaggagttcaaggctgctgtgagctgtgattgagccactgcactctagcctgggtgacagagtgaaaccttgtcttttttttttttttttttgagacagggtcttgctctatcatccaggctggagtgcaatcgcatgatctcagctcactgcagtctctgccttctgggttcaagtgattctcatgcctcagcctcctgagtagctgggactgcaggcgtgcaccaccacgcccagctaattttttgtatttgtgtgtgtgtgtgtgtgtgtgtgtgtggagacggactctcgctctgtcgcccaggatggagtgcaatggcgcaatcttggcttactgcaacctctgcctcccgggcttaagcgattcttctgcctcagtctcccaagtagctgggattacaggcatctgccatcacacctggctaatttttgtatttttagtagagacagggtttcaccatgttggccaggctggtcttgaactcctaaccttaggtaatctgcccacctcgacctcccaaagtactgggattacaggcatgagccaccgtgcctggccattatctctaaaaaaaaaaaaaaagtttaagatatgaatggtattgtgagtggtggtaacagtaacaatgtaaagtattttgaagtatttgtagtcgaggtaggtgtgtacgtacacacatgcacacacaaacatacaaatgactgttttagatgtaggaaaaaccagtgtttttttatcttgaaatctcattctgcgctttcatggacagcatagaaacagcaaggaagtggcttcctgtttttaacattaaaaacaggaaaggacagacggtggtatgacctatatgaacagtaaggaaagtcgttaattaaccatggttgaaaggtttaaaagttgtagtctgaaaacctttcattgagtatttcacctacttttcttcattaagtagagataaaaacagaattattggtttataaaatacttttagaatttataatgctttccttttycctttttcttttctttctttgtgtgtttttttttttttttttttttttttttttttgagacaaggtcttactctgtcacccaggctgaagtgcagtggcacaatctcagctcactgcagcctcgacctccctgtgctcaggtgatcctcccacctcagcctcyggagttgctggaactacaggcacgtaccaccatgccctgctaatttttgtgttttgttgtagagactgggttttgcccccaggctgatcttgaacttctgggcttaagtgatccgcctgcctcagcctcctaaagtgctgggattataggcatgagccactgtgcctgggccagattttttttttttcttttcagagacaggatcttgctctgttgcccagggttgagtgcagtggcacaatctcagctcgctgcaacctttgcctcccacgctccagtgattctcccacctcagcttcttgagtagctgggactagaggcgcacgctaccacarctggctaatttttgtttttttttttttgtagagacagggtttcgccttgttgcccaggttgatcttgaactcctgagctcaagcgatccacctgccttggcctcccaaaatcctgggattataggcatccaccactgcgtccaactataatgaattttaactgtgtgatgactccattttcaacacttcctcaggtgggaattatttgggatttaaaaattcttaatttaagttttgaaacaactttgtcatgtttcagttacttctaaatctatctcataaggctatttccttctttagtagaaaatacattttccagctgggtgtggtggctcataccaataatcccagcagtttgggagactgaggcaggaggattgtttgaggttaggagtttagactggcgtgggcaacagagagagatcttgtctctacaaaaaatttaaaaattagccaagcatggtggtgtgcacctgtatgtagtcctggctacttgagaggctgaggtggggagatagcttgagtccaagaatttgaggctgcagtgagctrtgatcatgccacttctctccagcctgggttacagagtgagacactgtttctaacaataacaacaacaacaacaacamatgttgcccaaataaaaattcaaaacgttatagattttttttttactatcttgtctttgatatgcaatattatgtttataatgaaatgtcttgaaatcttttagtagtactatcataccagcaaacagcattagttattattattattattattattattattattttgagacagagttttgctcttgtcgcccaggctggagtgcagtggtgcgatctcggttcactgcaacctccacctcccaggttcaagagatcagccttccgagtagctgggattacaggtgcctgccaccacacccggttaattttttgtatttatagtagagacgggtttcgccatgttggccaggctggtctcgaactcctgacctcaggtgatccacctgcctcagcctcccaaagtgctgggattacaggcatgagccactgtgtctggccttccttcattttaataataatggatattgaggcttttttcatttcttgtcagtgatgaataaaactactataaatgttctgatatatgcatttcctgcatgtaaatatgagtttctccagggttggaattattgagttatagagttatagagtatgcatgtcttcagtttcactagatagtgccaaattgttttccaaagttattgtactggtttgtacacctaccggctgtgtttgagaattcttttttttttgagactgagtctcgttctgtcacccaggctggaggagtgcagtggcgtgatctcagctcactgcaagctccgcctcctgggttcacgccattcttctgcctcagcctcccgagtagctgggactacaggcgcccgctaccacgcccagctaattttgtttttgtatttttagtacagacgggtttcactgtgttagccaggatggtcttgatctcctgacctcgtgatctgcctgcctcggcctcccaaagtgctgggattacaggtgtgagccactgcgcccggccaagaattgttccacatctctttactaacactcagtattgccagaatttaaaatttttgccagttcaattggtatatatgtactagtgtctcattgtggttttaatttgcaattctctattgcccagtgaagctgaacagctttttatatgtttaatgaccattggaagtgctgatttcatgaagtctctgttcaaatcttttgtccgtttttctactgggtttgtgtatttttctaagtggtttttaggaaatatttatgtatcctacaagtattttgcgtctaccatccctcttttgtggcttgtctttcgcttagcatagtgttttcaagattcatgtaccattgtagcaagtaacagtacttcattcctatatcactgtatactattctgttatgtggatataccacattttgttaccaccttttggctgttgtgaatagtgcttctatgaacattcacatacaagtacttgttcgagtatctgtttccaattggtacgtacctaagaatggaattgctgggtcacatggaaagtctatatttacctttaaaaaaattattttttggctgggtgtgatggctcacacctgtaatcccaacacgttgggaggccaaggtgggtggatcgcttgaggtyaggagtttgacaccagcctggtcaacatggtgaaaccccgtctctactgaaaatacaaaaattagcgggatatggtggtgcacacctgtaatcccaactacttgagaggctgaggtacgagaattgcttgaacccaggaggcgaatgttgcagtgagtctagattgcgtcactgcactccagcctgggtaacagagcaagactccatctcaaaaaaaaaaaaaaagaaaaaagaaaaaatttatcacgttcatcgttgtcaaagtctacatgtacctttgagaaaccaacacacttttccaccttggctgtgccattttgcatgtccaccaggaatgtattaaggtttttctgagtcttatagttttatattttacgtttagggctatgctccttttgagttaattgtataaggtrtgaggtttaggtcgggtcatttttttggccagtggatgtcctagtgagaaagtttttaaaatragtatggcatttaaaagtaatctgtgaaggtctaaatactttatagttttgtagatttaaatttttctcccackttttcctttacttagcaagttttgaataaaagtaaagctgaaataaatttgttccttaaagactgctagagttggtttacttgtcccagttttttttccctgcactggatgcataggtcaagggtcgaactttaaatcatcctgaccttgagaagacactgagacagttctaagcatgttttccaagctttttatcctaacatcaaagcagtgattgtttgcctcaaatgctcatgtttgagagaaattttgtcttttgttatatcgagattggtgccccagactctaaaataagtaaaagttattaaattagaactgacattgagaattcttaatggaattagtagtaacactaccactaatagtgttagtttggaataatactagtctcagttttggctttgtcactgcattgttatgtgacttggacaaagaatttaaattttattcagtgactctgtaaaatacatctaataagttattaaacatctatttctcaacaataattataatgaccacgttgttgaaatcgtcacattattggtagagttaccaaaaacactgtaggtcattcaagccaacagagaattaggcatttatggctttgtggaggggcgagagcagtgaggttagggcctccctcccctaactgggcagctaccccaaactaggaaactgctcctgccgtgagtactctgagtgctggcatcacaactgtcgcactgccagaggctggtgaataggcagtggcacatagaatcgcgctggtgccgacccarcactgaggtctgcaggggcttgcctcctacgctggtgcaaagcrtggcccctgccatccagctgttgtatgtgcttctcactggcagaccctacatcacatccgcaacccgatcacaagggtgtccaggaaatacagtttttagccttccatctcctaagtgtgtgtgtgtgtgtctgtgtgtcttgtagggggtttgttatgtgtgtgttggtcatatgcagaacataggaaaagaatgggaaggacaatagcacagtggtcttgaagtgctttgaacgctatcaaagtatttcagattgatttagtagcatcaccaaataagaggcagtgtggcattggggttgggagcacagagtaaagttagaaggcctggatcatcagttcctggctctgcctctggctgctttcctaagtgggaaagccatttagcctttctgaaagtgtaagaaatatcttccttaagagtgtgcagagtatgtatatttacatacttacatatataagtatataaatatgtgtgcatgtaaagcacttggcaagtgcctggtatgtcataaatactcagtagatgggcactcttgctgctgttgtgattattcatcatctttatcatcatcatgtaaacatatttgactatctgtrttggaccagaatgatgcttaacaaagggacagttgttagaaagtggacttcaaaaagtgatagcatccagctttgccccctgtgttcttaatgcctgtataggtgctacaataggtggtacttatgtatattatattaaacaatatgggatattttctagaaggcttaccttaaataggcttaaccagtaaaggatatttattggcttcttattgagatgtccctagactacttttgataaggtcttcattgatctctaagcagcaaatccaagagtttgagttgttctcttgagttgagaaggctcttaagtgaggagtatttcaagcccagtgatccagcatttagtcgcgagtaggtattgttttccctctccttacatgtgctaggatatgggatttgtgaggatcttcaggaagaatgtttatgagtatatccttaaggctgcttggacttgactttaccattgtcactcccttatcagttaggtattcgctccttctctggacaaacactcttttatagtacttattatattgtatttatttgtgtgtttctccactacactaagagttcttagggagtgtagaggttgttcttactcatttttattcccagtgcccagtttagtgcctggaaggtactgctcagtaaatgttcaataactgagtattaggtcaatgatgatgagtattacataagccttaactaaagtcacttcacagtgaccaaactgaggaggaggaagagagtggtggagatgggggaatgagggtcggaatagtggggctatcactctttgyggagagaactgtcttgttctttaacgtatcctgaaagtctggcatacaacccagtatgtatcgagtactcactaagatatatttgaatgaatgaatgaaaagattacccccctagtttaactgtggtcttagagtgtttaaagttaacctgatatttttggaaatacactcccattgcctagaactggaactgcaagtagtgacccctcccctcctttttttcatggctaagctgcagggagtttggtttgctgcccttctcatcttttttaaaattattatttttatttatttatttatttatttatttatttatttatttattgagacagcttttcactctattgcccaggctaaagtgcagtggtccgatcttggctcactacagccccaaccttctgagctcaagtgatctgtccacctcagcctcccacgttgctgggactgcaggcacatgccaccacacctggctaatttttgtattttttgtagtgacagagtttcactacattgcccaggctggtctcaaactcctgggctcaagcgatccacccgccttgagcccaaagtgctgggattacggcgtgagccactgcgcccagccatgcctatcaaatctttctgctgaacctrctgactgagatcagagctactaccctggagcttagctaaggagtaaaggggagctgagatttcggccgtaagtccctctctcctaccattctatgccacccgcttttggtccctaacatccctggttgtgacagcttctcctcctttaccctgtgctactgtgacttaatcacttgttaaggagagatggaaatgcctgaccatggcaggcacaattctttgttcaggaaattggaacccattgcttccttcctaatcccagacagctgtgcctctggttttctttgtttagcccaaggctgaggggtgaagctctacttcattctggcctgcagtcttttttctatcttggggtttgataatccctctggtatttggagcagactctaaggtttttctgttttatatagtaaaacaaaaaatattgcttttgttgctaataaaaatttgtctgtaaggaaatatttctcttaatattggagttaatactttgaacattaatgtgcagtgtttagaaagrttataaagaaatgagattggccgggcgccgtagctcatgcctgtaatctcagcactttgggaggctgaggcaggcagatcctttgaggtcaggagttcaagaccagcctgaccaacatggtgaaacactgtctctgctaaaaaatacaaaaattagccaggtgtggtggcgggcacttgtaatctcagctasttgggaggctgagacaggagaatcacttgaacctaggaggcggaggttgcagtgagccragatcacaccattgcactccagcctgggtgacagagtgagactctgtctcaaaaaaaaatttttttttttaattaaaaaaaagaaatgagataatcagtactgtcatttccttcattagaagcgttagtactgttacccttttttacatgaatgaaaaggattgaagactactttttgttttttcctttgggaaataaatgcatggataataacagccaaataaaaagttttaattagaattggatatctctattcctattttcattcaaccagtatacttgttggaaggctatcaaaatggacatgccatttaaatgaaaaatttccaattgtgatagacatgttatttatgaatattttctgtcctgaggaaaattaactattagaaccagttgtaaaagagatggtggctgggcatggtggctcacacctttaatcccagcactttgggaggccgaggtgggtggatcgcctgaggtcaggagtttgagagcaacctggccaacatagtgaaaccccgtctttaataaaaatacaaaaaattagctgggcatggtggcagagtcctgtaatcccagctacttgggaggctgaggcaggagagtcgcttgaacctgggaggcagaggttgcagtgaggygagatcacaccattacactccagcctgggcaacaagagtgaaactctgcctcaaaaaaaaaaaaaaaaaaaaaagagagatggtatcaggtactgcaaattcttagagtagcttctgactttgctcagccttatttataagatttatctactgggaggctcattcaataggcacttgagagtccggtgtcatagaaagttgttaattttagagttgtatgcagccttctttagcaatgaaaatcttttacagaataaggcttaagctttttcaatgtttttgactgatttagttaacagcttaatttatattggcaccaagcccagatctaatggttataaactcagtagttggctgatacagtaaaaactgtagtttcgttttcttgttgtttggtttaccctttacattcaagagtttaagtagatctcatatggtctggtcacatgtgttctgagtagtggtcataccacaccaggcatagcatttctgctccgctgtgacttgattttttacagacttaagttttagtacaacttaatctctcagaggaagggttaagttcctgagcataggaattcattttgggaatgtattttcttttctttctttttaaaaatttatttgtagagacagagtcccactatgttgcccaggctggtcttgaactcctgggctcaagtgatcttcccgccttagcctcccaagtgttgggactacaggcatgaaccactgtgtcctgccttcttttctttttgagacaggttctcgctctgttgcacagactggagtgcagtggtgtagtcatagcttactgtcacttcagattcctggccacaagcgatccttccaccttagcttcccgaagtgttggggttacaggcatgaaccattgtacctggcctctttttttttttttttttttcttttttaaaaaattcctttctaaagggaaaagaacctaaggtgggtggcttcctataaccatttttttttttttttgatatggagtctcattctgttgcccaggctggagtgcagtgaccacggcccactgcaacctctgcctcccaggttcaagcgattctgctgcctcaagcctcccgagtagctggaattacaggcacccgccaccatgcccagctaatttttgtatttttagtggcgatgggtttcgccatgttggccaggctggtcttgaactcctgagacttcaagtgatcttcccacccacccacctcggcctcccaaagtgctgggattacaggtgtgagctaccacacccggcccctatatcctrttttatagtgtttcttgtttattattttctctttggatttgtttcattttgatccttgaaaatatgcaaaggatggaatcttaattttggaattgtttttcttggttgaaattggaattatgtggtttttatggcatttcccctaatctattaatgtgggaggaggcttgtggggagggaagagccgtctttttgagattattagggagggaaaccatttaatgacagaattgtatgactacattttatttttatgaggactactttgttaatttacattcttgtgctctacattcatgaagtcagttatttgaaaccatgtaatatatgtcaactattaaagttaagtgacttttatctgataagagttgtgttaaaataatcatagagaattgatgcctttccagatgttttcctgatacatcagggttttttttgttgttgtttttgctgttatccagcttggagtacagtggtgccatcatagctcactgcagccccaatctactgggcacaagggatctccctgcctcagcctcccgagtagctgggactacaggtgcactgcacctggctaatttttaaaatgtttttgttgagacagagtctcgctatgttgcccaggcttgtcccgaactcctgagctcaagcagtcctcctgcattggctttctaaagtcctgggattacagacgtgagccaccaagcctgtcctgatttagcagttaattaaatataagtggcctctcattctcaggtgctcttacagtatgaaaatggaagttgtaaagtttgtttttaaagtaactcagtggaatgatagacagtggagacttggaagggtgagggagtgagggtggatgatgagaaattacttaatgggtaccatgtgtgttatttgaatgactgataccgtaaaatccctgacttgtccattacacaatcttgcacgtaatgaaattgcccttataccccataaatttacataaataaaagatcatgtcatctgttaaaaaawtttttaataaagtaactcagttamatttatggtatgtcaccatttcttggcaggactttgtgtcattgtatcaagattttgaaaacttttatacaaggaatctgtacatgaggataagagacaactggaatcggccaatctgtagtgtgcctggagccagggtggacatcatggagagacagtctcatgattataactggtccttcaagtgagtcttggttgggaaattatttgacaacaattacaaaagggtttcttcatttgagaaaatatgttattataaattgagtattctctcaaaataggagtagcagctgaggatacaatatgattggtttccttacatattcttcattgttgagctttttaagatatatctttctattacatttgatactgtgttggattatagttcagaagaaaatttggcwtatttattttttgagatggagtttcgctctgtcacccaggctggagtgcagtggcgtgatctcagctcactgcaacctccgcctcccaggttcaagcaattctcatgcctcagcctcccgagtagctgggactacaggcatgcaccgccacacccagctaatttttgtatttgttttagtagagatggggtttcaccatgttggccaggctggtctcgaatgcctgacctcaagtgatctgtccccctcagcctcccaaagtgctgggattacaggcatgagccaccgcgcccagcctggcttctttatttttaaaaataactcctattgataagaaacagtatacaaaagtttagtctgttttatttttggtcttgactttaaaaaaaaaaaaaaagaaaagctatcctttccattatgccacttatcagaatcaagtatccaaatttatttctggatattttgatttctcaaatgatttaaggatgatatgtagagtgtttttacttacatggattgaatagtttggaaaactttttgtatttttaacattgtatttgtttgtttgtttacttattcatttatttgagtcagagtctcgctttgttgcccaggctggagtgcagtgtcacaatcttagcccactgcaacctccacctcccaagttcaagtgattctcccaccttagcctctctggtagctgggactacagagatgcaccaccatgctcagctactttttgtatttttagtagagatgaggtttcaccatgttggccaggctggtctcgaactcctggcctcaagtgatctgcccaccttggcctcccaaagtgtcagagtcttgctctgtcacccaggctggagtgcagtggcaccatcttggcttactgcaagctctgcctcctgggttcacgccattctcctgcctcagcctcccgagtagctgggactacaggctcctgccaccacacccggctaattttttgtgttttttagtagagacagggtttcactgtgttagtcaggatggtctcaatctcctgaccttgtgatccacccaccgcggcctcccaaagtgctgggattacaggcgtgagccaccgtgcccggcctacagcttgccttcttagcttggtcaaatattagtgacaccccttctcatgtgtatattcacagcaagtttattatttgtagtgactacattgtattttacagtatacatgtgccatggtgtgacatgttgggctgtgttaataatctcaaaatctcagggaattaaaacagtaacagtttatccttatcgatacttcatgttcatcctaggttggtggggcccttgaaccattttgtccttagttaggggcccaggctgcctcagcttccattgtatgaaatgtcactggtctctgtatctgaagaacagatgtggcaaattgtgcagtggctctcaaaggatcctcatgtgtatatattctcatgtgcgggagttactgagtatgtatatcttttaatggataagtactgccaaactgccctccaaaaaacaaacctgatattcttatgtacagtgtcctgtaagataaggtgattgtcctggccaacactggatatcattagttttaaaatctttatcactattaataaatgaaaattgattattttaacttctatttccataattggtagtgtgtttgagatttttttaatatagactttgttctctctgcttccttttgtgtcaccagttcatttaatattacatgtaagtacttttttgctcatgagtttcattgttttatgctattgatgcacaggtatacagggaatataataaagggtgttataaacatgggttcctacaactatcttggatttgcacggaatactggatcatgtcaagaagcagccgccaaagtccttgaggagtatggagctggagtgtgcagtactcggcaggaaattggtaagtgaaagctgtatttggccagctgctgtttttgacattgttttagtcaggggcaaataatagtaatattgacctagagtattaaatatctacactttgtcatgtcatttagataaggtgaagaatgctttgtttttctgaagtgtgatggatgatttcaatgctttcaacacattttgagatgtgtttatctttcccaatgtgttatacatatagaatgtccctcgaaaaatcctgccagtgtttgtttcatttataactttaatgttgatttcattggcttttgcaaatgttagtggttaagagtgccacttattaggatgttgggcatatgagagttaatctgctttcatactggtacatgggggctaataataattcctgccttatagagctcttttaagaattacgtaagctaatccatgtagagtacttggaacatagtagacaataaatataaactctttttattattgttttaagtttgtaaaatataaaagagtaataactttatataaagagattcaatttattttaattcagcggaagatttcagattgttccaatttgattcagagaactgacaaccctggaagttatgaaaactttccaaatacttattactgtaagcmcagtagattaaaagaacagttcattgttagttatttctcagggttctagggattggcaagcacagttgggtgcttyttacccaaggttcctctcmcggttgcactcagtggtggctgtatggctggagacatgaagccttcttcattcgcatgtttcacctaggctgcggtggctggagctctgtgtggcctctccatgtttctagcttgggtttcttcataccatggtggtcttggagagttgttcatcatgcatggctgcaggcctctagagcaagcatgcaaagatacctgactgaagccaggcacggaggctcatgcctataatcccagcactttgtgaggccaagataggaagatcagctgaggccaggagttcgagaccagtctgagcaacatggtgagacctgttctctaaaaaaataaagataaagtagccgaacgtggtggcgcatgcttgtgatcctagccattcaggaggctgaggccagagcatccctcgagccaaggagtttgaggctgcagtgagctatgatcgtgctactgcaccctagcccatgacagagtgagacactgtgtcaaaaaacaaaaacaaggatacccagttgaaagttggaaggctttttatgccctagctgtacaggtcccaaagtatcatttatgcctcttctattggccaaagcgtcgctaaggtcagcccagattcaagggttgtggggattgccctcctccacctccaaatgggaagaataacaaagaatttgcatccatatttaatcttccatagcaactctgtcagctcacgaaatttaaaacaacatgaagacagggaaaaaaataaaattgtgcagatttttatatctatttatttagatagctagatacatggatatatagatagattgatgcatagatggatgcagggtctctgttgcccaggctggagtgcggtrgtgcagtcagctcacttcagcctcaaacttcggtactccagccatcctcccacctcagcctcctaagtagttaggactataggtgcacgccaccatgcccagctgattttttaatgtgatttttgtagagatggggatctctttcaagaggctatgttgcccagggtgttcttgaaatcctggcctcaagtgattctcctaactcagccttccagaacactgggattataggtgtgagtcaccatgcctggccccaccatctaattttaaatattttcattcctcctaaaagaaatgctatactcagtagcattcattggatactgtttcccttccccctacaagtcmttggcaaccagtagtctactttttgtctttatagatttgcctattttggacattaaatataaaaggaattgtataacatttggtcttttctgtctggcttccttcactagcacaatattttcaaattcatccatgttgtagcctgtaacagcactccattcttttctatgactgaataataatcctttgtgtgagggtgccacgtcttgtttatccacttatcacttgatggtcatttgggttgtttctactttttggctattgtcagcagtgctgctgtgaacgtgggtgtacaagtttttgtatgatatatttttgtttctcttgggtttatacttactagtggaattgctaggtcatatggtaactctgtgtttgactttttgaggaattgctaaactgttttccaaagagacygtactgttttacaatctctccatcgatgtatgagggttcctattcatttttatatcatcttccagtcatcttgtttgtagcccaactttaacccttgattactttgctacctgttccctctggtttttaagcttctctagggttccatacagtgaatttacttggttttcaaaggattccactctataagggcatagatatgaccttcttctaactctgtcattttccagttgtattagtttcctgtggctgctgtaacaaaatatcagaacagagtgacttaaaacaacaaaaatgtctagtctcataattctgtgggttataagtttggggtctaggtgtcagcagggccatgctgtctgaygctctggagaaaccttcctagcttctggtgtcgacagcaatccatgacgttccctggcttatagcrcatcactccaccacacggctgtcttcctgtgtgtcaaacattgtcgtcttctggccgggcacagtggctcatgcctgtcatctcagcactttgggaggccaaggcgggcagatcacttgaggtcaggagttcaagaccagcctagccaacatggtgaaaccctgtctttactggaaatacaaacattagctgggcgtgatggaaggtgcacgcctgtaatcccagccactcgggaggctgaggcacgagaatctcttgaacctgtgaggcagaagttgcagtgagccgagatcacaccactgcactccacctgggcaacagagtgagactctgtctcaagaaaaacaaaaaaacagcattgtcttctgtattccttctgtgcatgtctatcactgtgtccaaatttcccctttctataaagacattagcatccccctaatggcctcattttatttatttatttatttatttatttatttatttttaaaatctttgtaaaaattttttattgatacataacatttgtacatttgtgtggggtacatgtgatgtgttgttacatgtatagaatgtgtatagaatcaagtcaaggtatttagggtactcgtcaccccaagcatttattatttctatatgttgggatcatcaagtcctctcgtctagctatttgaaatatacaatacattgtttttaactatagtcaccctactctgctatcaaacattagaacttatttcttctaactcwatatttgtacccatttaccagcttttcttcatctcccccgctccccctacctcatctcaacacacatccttccagtattgttttactcgctacctccatgagattaaatttagtgaggaaggcatgttaaaagctgacataggccaaaagcgaggcctcttacaccaagcaattagccaagttgtgaatgcaaaaaaagttctcgaagaaaattaaaagtgctactccagtgaacccacaaattataagaaagtgaaacagccttttattgctggtagagagaaagttttagtggtctggataaaagatcaaagcagccacaacattcccttaaacccaaatctaatccagaagaagatcctaatcgcttcaattctatcaaggctgaaagaggtaaggaagctgcagaagaaaagcttaagcctagcagaagttcattcatgaagcttaaggaaagaagccatccccacaacataaaagtgcaaggtgaagcagtgaatgctgataacttcagcaagttatccagaagatctagctaaaataattgatgaaggtggctacaataaatcacagattttcaatgtagatgaaacagctttaaattgaaagaagacaccatctaaaactttcacagctagagacaagtcaatgcctggtttcaaagcttcaaaagacaggttgaccctacttttaggtgctaattttaagttgaaaccaatgaatgacctcattttaatttgattacctctggaaagttccagtttccaaagaaggtcacattcttctgggaatgaggacgtcaaaatatcttttttggtgggacacaatggaacccgtagcatcatccttctgtatattttccattttcattaattgtgttcagaattacagatgtccactaattaataaaaaattgagcttttagcttttatttcttsgttatccagttgttttgtratgattttcaagaggaagatgggagtagaacatttttatttccccctgcctttaaaacagagtttctaactggcactccagaaatgacaagccttgtgatctaatcctgtggttaaaggagcattgtgcagtggcgacatatagtaaggatacattatgcytttatggcatttgatattttataaagtgctcggctggatgcggtggctcacgcctgtaatcccaacactttgggaggccaaggtgkgtggatctcttgaggtcaggagtttgagaccagcctggccagcatggtgaaaccctgtctctactaaaaatacaaaatagtcaggcgtggtgrtccgcacctgtaatcccggctacttgggaggctgargcaggagaattgcttgaacccaggaggtggaggttgcagtgagctgagattgygccactgcactccagcctgggcgacagtgcgagactctctctctcaaaaaaagaaaaaaagctcaaacgtattatctcttttgatcctcacaacaatgtcatgaggtagatagggcaaattattattgctatttagaagtatttagcccagagagttcctaagggctttgattaagcaagccttaaggacacatggcatccaagtttagcattcttctttcccgcatcttttctctctgtaatgtcatttagtccttaaagatttgagtaccaatataaaattgcggtacaaatttaccagtcagttcacagtgagggaagaacctttttttttttttttttttgagtcagagtctcgctctgttgcctaggctggagtgcagtggtgcgatctcagctcactgcaacctctgcctcccaggttcaagcgattctcctgcctcagcccccgagtagctgggattacaggcacacgccaccatgcctggctaatttttgtattttgagtagagacaaggtttcaccatgttgccaggctggtctcaaactcctgaccttaggtgatccgccctccttggcctcccaaagtgctggaattacaggcgtgagccactgcaccctgccaggaagaaacgtttttacctatcttttgctgtataacaaaccatctcaaaacttagtggtttaaaacagcaacagatttatttgctcatgattctgcaatttagggagggcctgatgttatcttagctccatgtggtattggataggcaattatgactgtgtacagggtatccaagatgtcttaactcacrtttgacacttcagctgggtggcaggaagggctaagggctggctgggcatctctgtttctctttctctctgtctccccctctccttacgtctttctctcctccttccatagtctcttatccctcagttcccatccccccgcccatgttctgtttttgcaacaggccagttagattgttttacatagcagctgacttcaaaagtgtaaaagcagattttgctaggcctcctaaggcctagacctggaactagtatgcacaaacaggaatgggagaaatttttcgcagccccctttggggaaattccactgcaggtgctgaatcagattttattcaactattgtgttctttatgagcacatattactcttcacaatattatgaagaatattactcttcataatattgactccttcatagatcttagtctgaaaaggacacaacacatayactatgatttcttttaataaagtgatgagtaattcttaaattcaggattttgtgatactgactttattaacttcttcacacaggaaacctggacaagcatgaagaactagaggagcttgtagcaaggttcttaggagtagaagctgctatggcgtatggcatgggatttgcaacgaattcaatgaacattcctgctcttgttggcaaagtaagatactctgtcatttatgaaaactccctcatgtatatcttcttttgttttgaaaagcagtcagagtgagctaaaagctgttataaactttaggctaaacatagtttagccaaagatatttctaccacaaattgtttttcttttttttttttttttttgagatggagtcttgttctttcgcccaggctggagtgcagtggcaccatctcagctcactgcagcctctgtctcttggattcaagcgattctcctgcctcagcctcccaagtagctgggactacagctgtgtgccaccacgcctggctaattttttgtatttttagcagaggyggggtttcaccatgttggccagcctgggcaacatagtgaggcctcgtctcaatttgattttattttttaaattaaaaacaatttgtggccaggcgcagtggctcacacctgtaatcccagtgctttgggaggctgaggcaggtggatcacctgaggtcaggagtttgagaccagcctgtgtttatatatttatatacatatatataatattgtatattatatatatatataacatatatgtatgttacatattatatatattacatattacatattatatatataatatatatatccccaagtgggtagtgtgtgtgagagggcacaatctgtatgtaaatgtaaattatatttcagcagattggtactctcatcctgaaaggccccttgaggttatttattctcatgtttaacatgacacttaggaatggtatattgaaaacgtggtggattaactcaagyaggagaattgagtttttgttttttggttgtttatatggtcacacttagctgtgtgactgtgagcatgtcaaataatctttctgatcctccaagtttcttttgtaaaatgaggtggttgagctagattaactctaaagtcctttttagttatgcagtgtatgggtctgtaaggtacagatgggacaaatagaaaacaaacagcaagataggagatttaaacccacctgtgttgataaacattaaatataaatggtttgtacattccaatgagaagacaaagattgtcggataaaattaagtaggtttcctaatrtaaaatagcaacctattttaaatatgaagacacagaggttaaaaggaaaaggatagaaaaaaaatacagcatgcaaataataatcagaagaaatgtgaagtgcctgtattaatataaacaaagatttcagagcaagaaatatttctggtgataaagaggaacattgtgtaatgattaaggaattaattcatcaagaggttataattttaaatgtgtaggtgcttatcccwtttatgcctaatgttccattattggaacgctaagcatgtgggagttatttatatcctactgctcaaggtcatcgccagggtctgattttgcaattcaaaaaattgtaacctctggcataaatgggttattaacagagcktcaaagtacgtgaagcagagattgatgaaactaaaagaagtagacaaatagaaaattgtaattagagacattaacccctctctctcttttttttttttttttttgagacagagtctcgctctcttgcccaggctggagtgcagtggtgtgatttcggctcactgcaagctctgcctcccgggttcacgccattctcctgcctcagcctcttgagtagctgggactacaggcgcccaccaccacacctggctaatattttgtatttttagtacagacggggtttcaccgtgttagccaagatggtcttgatctcctgacctcatgatctgcctgcctcggcctcccaaagtgctgggattacaggcgtgagccactgtgccctgccctaacccctctctcttaattaacagaagaatgaaacagaaaatcagtaatgatatagaatgtttggaaaacactgtcaaccagttgacctaattgagagtcatgaaacacttcactcaacaacagcaaaacatttactaccaaagaccatattctaggccattaagccagttttggtaaatttgaaagtattaaaattattcaaagtatgttctgtgatcacagtggaatttaaattagaaattgataacacaaagatatctggaaaacctttgaatatttgaaaattaaacaatatatttctaaataacccatgggccaaagaagaaaaaacaggggraaataaacatattttgaactaaatggaaatgtaacctattatagtttgttggatgaagctaaagcaatgctcagatggaaatgtatagcattaaacgtttatacaggttgagcattcctaatcccaaaatctgaaatctaaaatgtttcaaactcgtaaatattttgagtgtcatcatgacagctcaaagaaaatgcttaggggtgctaaaccagtaaatataatgcaaataatccaaaatccataaaaatctgaactctgaaacacatctggtcccaagcattttgaataaggaatattcaacctgtattagaaaaaaagtaaagcagccagactccatcttaaaaaaaaaaagtaaagcttgtagcttaaaaaattagaaaaagaaaaacaaattaaacccaaactaagcagaaggaagaatataatgatgataaatgcaaaaattaatgaattagaaaatagacaataggaaaattagtgaaaccaaagctgattctttgagaaaatgaatatagttgataaatctstggccagaatggtcaggataagaagagataaggtgcatattaccagtaacaggaatgagagagggggacatcactacacgtcctatggacattaaaggataataagggagtattaagaacaacttcatgccaaaataytcaacaacttagataaaatacacaaaattccttgtaagacataaatgtatggttctttgacttcacgttataatacgttgctgtcctgcattttgaagtacaagcctgagattcttatttgttagaatttttaacactagaggattagagaatctcatcttgctcttctctctgtatgcttacaagctctatcagaggattatctagaattagacgttttctacacagacctggaagatacaaccataaggatttatattccagggccgggcgcggtggctcacgcctgtaatcccagcactttgggaggctgagacgggtggagatcgagaccatcctggctaacaggatgaaaccttgtctctactaaaaatacaacaaattagccgggcgtggtggcgggtgcctgtagtcccagctactctggaggctgaggcaggagaatggcgtgaacccgggaggcggagctggcagtgagccgagatcgggccactgcactccagcctgggggacagagcgagactccgtctcaaaaaaaaaagatttatattccaaatcaaactataattgaaatattattaaatattgtttaatctgttaaagacagtaacttatccagttttaatgatcctttgaatctgatactgaatttccatgtgaggtggttaattgctcagtttgatggcagggtggggcagtatattgattaagagcataggttctggaagcagacacttgtcttatttaataattattttgtggccgggcgcggtggctcacgcctgtaatcccaggactttgggaggccgaggcgggtggaacacgaggtcaggagatcgagaccatcctggctaacacggtgaaaccccgtctctactaaaaatataaaaattaggcgtagtggcwggcgcctgtggtcccagctactcgggaggctgaggcaggagaatggcgtgaacccgggaggcggagcttgcagtgagccgagattgcgccgatgcactccagcctgggcaataattagtattgctattattattttgttactgtgcttgtgaccttgagcaagattctaaactcctgaacaagagtgtcctcatatgtaaagtgggagtgataatagtgtctgctacatagaattattgtgaggattaatagtaataatgcttttaaatcttttaacatgatacctgaaacattaagcgcttagatgttaactgctagtatgaataccttttatttttgaaccaaagatttaataaagcttaagaataagttctaagggaaaaagacagattgatacattgaaatgctgaataaggctgtctaaaaaaggctgtctaaaaagagttcctttttgccagaaaaaaagaacataatgcttttgcaggtttgccagaaaaatatttagctggaaagagaagaaaataaaattttgtgcggaggggaagggaagggagggttctttttaagatagagttgaatgccaagagtggtaagtaaagaatttgacttgctgaagagaaatctgacttctctttattttctcccccagtttcgctttttcaattttaacacttttttgaaactttaatttagacttacaaaaagagttacaaaagagtacagagagttcctgtataccattcattcagcttccctttatgttaacatcttgcataacagtggaactgtttcttacagctaagaaattaactgtgacacaatactataactaaagtacaggacgtatttggttttcaccagtttttccgcttcaggatccaggtgaggatccacattgtctttagctgttgtagctcctcagtctcctccaatctgggatagttcctgtttttctttgtctttcatgaccttaatacttgtgaagggtactggtcccttattttgtagaatgtctccaatttgggtctgtctgttgtgttgttatggtttgattgagtccgtgcgttattgagaaagctaccacagaagtgataccattctcagtgaatcatgcgagagactatgtggttttgatacatattactgatgatgtaaatcttaatcgcttgtctcaggtgtcagcagggattttctactaccaacttactgcttttctctttgtaatcaccatatattgtggcagagatactttgggactgtatatagcattttggattaaactttcacccactaactttagtatgcatctgtgatcttgcctgtggcagttattaccttggtgttcttttttttttttttttttttttttttgagatggagttttgctcttgttgccctggctggagtgcagtggcgccatctcagctcattgcaacctctgcttcctgggttcaagcaattctcctgcctcagcctcctgagtagctgggattacaggcacccaccaccatgcccggctaattttttgtatttcttagtagagatggggtttcaccacgttggccaggctggtctcaaactcctgacctcaggtgatccagccacctcagcctcccaaagtgctgggattacaggcgtgagccaccgcacccggcttaccttggtgttctaatggtgatttttctatttttctcattctttctatacttactaattagaatttttgtgtaaggaagagttcttgcttctcccttatttatttctgtcgttgtgggtttgtgaatatttttattatttggcttataattcaacacaattgcttcttttttgttgctcgagttttagttttggccattgggagctgcttcaggtgggtacctgtgtcctttgaatatataataactttttttttttaaagcattcttatactttctggcatgataaaatgctccaggatcatcttatattttccctatcccagttttggaattaaccagttctccaagaagtgctggttcttttttttggagaatgatatttagaaaccaaggtctgggaactaggtgtgtttattgctgaaggagtatcactgcttctcacctctcagtgactagagctagaaaatgtatgtatatatgcgaactcatgcatacacacacatctgtgtgtgtgtgtgtgtgtgtgtgtgtgtgtatgcatgcataaagatttgaaagccaggagtctattgatactgccggctctagtcttctccttttccttattctccttcttctccttctcctccttctcctcctcttcctccttttcctcctcttcctcctcttcctcctcctcctcctttttttttttttttttccccccagacagagtctccctctgttgcccaggctggagtgcagcagcacaatttcggctcactgcctcactgcctcagccttttgtgtagcagagatttcaggcgcctgccaccacgcccagctaatttttttgtgttttctttttagtagagatggggttttgccatgttggccaggctggtctcgaactcctgacctcaagtgatccacccaccttggcctcccaaattgccaggattacaggcatgagccaccatgcctggccacttcatttttaatctgtacatttttaaccaggtagcttttttatcttaataaatactatgtgcataataaaaatttcaaacacaactactgttacaagtttcttaagtattcctttaagaatattctgtaataaataagcatgtatatatatagttgacccttgaacaacatggtttgaaccatgcaggtccacttacacgtggatttttttcaaccaaatatggagcagaaatacagttttcagccaggcacagtgtctcacacctgtaatcttggcacttcgggacgctgaggcgggtggatcacctgaggtcaggagttcaagaccagcctggccaacatggtgaaaccccatctctactaaaaatacaaatattagctgggcctggtggtgggctcctgtaatcccagctagctgggaygctgaggcaggagaatcgcttgaatctgggaggcagaggttgcaagtgaaccaagatcgcaccactgcactccagcaacaagagcaagactccatctcacacacacacatacacacaatatagtattcatggaacacaaaacccaagtatatggagggcctgcaggtcccacagggccaactgcaggacatgagcatggatggatttggataaatgtgagggtgaggcagttctggaaccaagtcctcctgtagactgagggatgactgtgtgtctttgtatcttctctcttctttttattctcgtgggagcatgctatatactttctgcacccttttcatctaattggatattatgaggctatttttgacagagaaaaacctttttctgagttgagatctgacaggttgaagggccccctgagagatggaagagtaagaactgcagtgaaaaaaaaaaccaaaccgagatcttcaaccttttcttagttgccttagcagaaactgatgtttgtgtgttaaagcaaagcttgtttggggatttttaagacaaaactgaagcctacagtccatgctatgtggggaaaaagttaataagtaggatcttccctggactctggatatgagtagtagtgagagaatgcaccatttccacagacatgaccccatcagctgccatttcccacagataaacagaacatgatactaaaactacatggaattctctcacgtaaagaaaccaaaacgttttagagacggatgtgtcatgttttagatacaamtaaagacctgttgccatatatctgartatttacatcagtcatgggactgaagatattaaattaaaaggctagaattttgcatctacttttaaggtgtctttacaaaaaacaaatgatcgtgtacacctttttcctcttcttaaaattgatcactgtgctgttgtgcacaatttccttaataagatacagctattagtgtttgtggcattttgtgatttgtgtaactaaccctttcccctccagcttcttacctttctgttcctgtgatgttgcagggttgcctgattctgagtgatgaactgaaycatgcatcactggttctgggagccagactgtcaggagcaaccattagaatcttcaaacacaacagtgagtttgctgaagaattcactgctggccttgrttttgctattctttcgatccatggtgggagttaacattagttatattagcacttgaaagtataaatgaagacaaagtagcaacatttaaaatgttcttccggtccagtcttttaaaattagaggttgatggaagcctcttgtacaaatataatactatccttttatttgaccatgaagttttccatcccatttccttgtttacagatccgttactcaaatacatttactcgatgactatagtgtatcttgccataagactaacagtatttaagtgaataaatcaagatctctgactggttaamgaagagacttaatagataagccartccttacaatatagtggacaggtgctgaagtacagctatgaatagatgctgtgggagcacagaggagggtggccctgagccagacctttcctccctcagtggaaatatctttgtgtattattaaaatgattatttagaataaaaatgcgtaactttcatagttaaaacacacacataggcagaaaaggtgaccaaactgtatgttaatagcatcttttcccaaaatgtgtacaggcacagacaaaagtttggaagaatgtataccaaaatgttaggtgtgtacccgtggatggaaggatcatagatgataacatcatttttgtttttgtttttgtttttgtcttgtctaaaatgttttacagtgagaaatgagatcttattaaatatcactatgtaacctgttattttcttttttttttttttgaggctagagtctcgctctgtcacccaggctggagtgcagtggctcaatcttggctcactgcaacctctgcctcccgagttcaagcgattctcctgcctcagcctcccgagtagctgggattacaggagcgcgccaccacacctgactaatttttagtatttttagtagggacggagtttcactgtgttggccagactggtcttgaactcccgacttcagttgatcctcccgccttggcctcccaaagtgctgggattacaggtgtgarccatcatgcctggcctctttttacaatacacggtgattgttgtttgtcattacatgtaactctatctcattcttaaataccagtgtggcagttagtgcctgggtgtgccctcatttaattgccccctcaattggacatcggggctgtttctaaatttttctactgggaacagcactacagttacagttttgtaccatcatctggttagtgccttaggataaatttctagcagtctcagaatgcatggttaaaagagtatacatttttaatacttttccaaattgcctctaagcattatatgaacttttttttttttcacttttattttaggttcaggggtacatgtacaggtttgttatataggtaaattgcatgtctcgggggtttgtgtacagattatttcgccacccaggtaatcagcatagtacctgataggtagtttttcgaaccttaccctcctcaacctcccctgcctcactctcaagtagaccccagtgtctgttgttcccttagtcgtgtctgtatgtactcagtgtttagctcccacttacaagtgagaatatgtggtatttggttttctgttcctgtattagtttgcttagggtaatggcttctagctgcatccatgttgctgcaaaggacatgatctcattctttcttatggctacatagtattccatggtgtatatgtacatatatatatatatttttatttttatttttgagacagagtcttgctctgtctcccaggctggcatgcattggcatgaactcagctcactgcaacctctacctccccagctcaaccgatcctcccatctcagccaccctagtagctgggactacagatgtgttccaccacgcccggccaagttttttgttttttgttttttgtgttttctttttgtattttttgtaaagatggggtttcaccatgttgcccaggctggtcttgaactcctgggctcaagcaatccacccaccttggcctcccagtactgggattataggcataagccaccacgcctggyccacatttttttaatccagtctactgttgatggacatttagattgatcctatgtctttgctgttgtgaatagtgctacaatgaacatacacawgcttgcatcttgtatgaatttttcctcaacaacatgagattgactgttcctactcactggccaacataggctatggtgaatcattttaaatctttccaaatctaatgaggaaataatatgttagtttttatttcattgcttattagatatagaacaactttttgcatttttactgtttttttaactctacttgtaagctaatgtgtttgtatttctttataaattggccattttcaaattgtttctattttttactgattataagagccctttatattaattatcttttcctttatgttgcattattttattattatttttttgagacagggtcttgctgcatcacccaggctggagtgaagtagcagaaccacaactcaccacagccttgacctcctaggttcaaatgattctcctgcctcagtctcctgagtagstaggactgtaggcatccaccaccatgccggactagtgttttttattttttatagagacaaagtctcgctgtgttgcccaggttggtcttgaactcttaggctgaaacgatcctgctgtctcagcctcccaaaatgctgggattacaggagtgattcaccatgcccagactgcactatttttatatttttgactttgttttcagtgtcttcctgtacagactcatgaaaatgtttttgttgccacacttactgttttacgactttcggattttacacaataccctcctcattctcagatcataatgttattctttcatgttttcttctgggagttttgcgatatattttttatttaaatttatgtggaatttgggggcataacattggagagrttgaatttttttttctaagtagataatatggttaagcattctgctataggtatttcttttttttgaaacagtcttgctctgtcacccaggctggagggcagtggcgtgatcttggctcactgcaacctccgtctcctgggtttaagcaattctcatgtctcagcctcccaagtagctggaattacaggtgcccaccaccacaaccggctaattttttttgtatttttagtagagacagggttttgccatgttggtcagtctggtctcgaactcctgaccttaagcgattcacccgcctcggtctcccaaagtgctaagattacaggcgtgagccaccacacctggctgatgcttcttttatctaaaattttgaccagtattatttttctcctccttctatatataaacagagaaaactaaaataattcctgtgtttttacttgtcttcagctgatcgccatacattgctctctgcctaagaactggaggctttgcaggacttggggaggccaaggagggcagatcacctgaggtcaggagttcaagaccagcctggccaaaatggtgaaaccccacctctactaaaaatacaaaaattagctggatgtggtggcatgcacctgtaatcccagctactcaggaggctgaggctggagaatcacttgaatccaggaggcggaggtttcagtgagcagagatcacgccactgcactcctgccttggcgacagagcaagactctgtctcaaaaaaaaaaaaacaaaaaaactggaggctttgagtcaggacgtaatttacttctgyagggaacatctcctgaatcttgattaggtcgtatgcagatttttttcttagaaattactgaatgtgtaagcacagtcacaaccttagactatcttatttgtgtttgtgttctgtgtttttattaccttatctctttttctgtcaaaattgttttctgcaaagagcaaaatcatgtacttttataactccttcctccagttacaagcaatacagaatacaaaatcagattttatgatagggccaggcgtggtggctcacgcctgtaatcccagcactttgggaggccgaggcaggcggatcacctgaggtcagaagttcaagacaagcctggccaacatggtgaaaccccgtctctacaaaagtacaaaattagcctggcgtgatggcgggtgctggtaatccgagctacttgggaggctgaggcaggagaattgcttgaaccttggaggtggaggcctcagtgaggagagatcacaccattgcactccagcttggatgacagagggagactccatctcaaaaaaaaaaaaaagattttatgataggatgtctcccacccctattaagtattccccagacttaatgttgcttaaatttgggggagttttttttaaggacttcatttcagggcaggtattttaagtatgaaatctgtagtgtggcaacaatggtcttcaaagcatttgtctttaacaaggaaattatgatcatcattaatggcagtagcagccaagttgtttccaggcccattaaccaccataagaaccaacagagccacaagaacttggttgtttatggacaactgatgaagtcaaacatggaacaatttcaactgattgtcaggcttgcttaacacacagacttatacatgccccagacgggtgtatttttaacccagtaccaaaataaaactctttaacaagcgtttattgagtacgtcctgggtgaaaggaaatggagcacgcactgtgaagtttttttacgccttgcgtttgtttttttaggaggagtatgtgtctgtgatggtttattcacactctctcgctctgtcttttttacgcatttatttccgaatgactcactgggattagagatacagtttgattctgtatttttcgataaacacacagaagctaacttaatgrcagggtatttaacatgagacactggtcrttttataaggaagctaatgaactgagttagccaccaccgycctttagtcaagtttcgatggttttgaacatttgttacattttggatttcaattcaaggtggcaataattcacctattttgccctgcttttttctgcccaactctaattatgtcctttgctatctgaggcatsgtttctgaatgagaaatatatctctgcatttccggaataaagttaggaaagaggaagatgcsgtataactgttcttttttgtgctctgtagatatgcaaagcctagagaagctattgaaagatgccattgtttatggtcagcctcggacacgaaggccctggaagaaaattctcatccttgtggaaggaatatataggtaatcctgctttattattcttacctttgtgacttggccccatgaagtcatagaattttttaactgaagggaacattagtctrtccccctctggaaactaaggagacagtgtttataagtcgctaaaatacctggaaacagagtcagcattagaacagaagtctttttgtctagttcttcgttattctttccataatactacatggtcaccaaatcccctttctatttgagtcttttatttttctagtttgtagagggaacctatatgtaggggcaagaattggaatatatattttaatatgtcaaattacacaccatttaattttaataaatattttattttaggctgagtgcagtggctcatgcctgtaatcccaacactttgggaggccaaagtgggaggtcgctcgaggccaggaatttgagaccagcttgggcaacatagtgagaccctgtctctgtaaaaaataaataaaaattaaaaagaaatattttattttggttaacctttacagcttttacacgtattttaccacctaattttttttgttcttttgtgtcattttaattgcctgtgcaacgtgatgcaaagtctcatgttgcctgtaattacaagctttagaagaatctgctgtgaccttaattatttttgtcgtgaattaagattgcttgtgtttggtgcttgttttttgttttttggtggtttgggtggctttttttttaagatggaatctcgctgtgtcacccaggctggagtgcagtggcgggatgtcggctcactgcaacctccgcctcccggttctcctgccttagcctcccgagtagctgggattacaggtgtgtgccaccaagcccagctaatttttgtatttttagtagagacggggtttcactgtgttggccgggctggtctcgaactcctgacctcaagtgatccgcctacctcagcccaccaaagtgctgggattacaggtgtgagccaccgcgcccagccagtgcttgttttaaaagtccagttttctttcccctagtcttttgccttgccatggcttcatctacctttgtcagtttaagccacagatacagttgtcagaccatttaaaacccaataaactcagccgggcagggtggcttattcctgtaaccccagaactgtgggaggccaaggcgggtgtatcacttgaggccaggagttcgagactagcctgggaaacatgaggaaaccctatctctactaaaaatacaaacattatctgggcgtggtggtggcgggcacctctagtcccagctacttgggaggctgaggcacaagaatcgcttgaacccaggagtcagggattgtagtaagccgagattatgccactgcacttcagcctggacaatggagcaaaactctgtcccaagaaaaaaaaaagaagcagtaaactcaataataatgaagtgccaaactcccaattttgatttaaaaagtctcagtgtatatgtgtatatatatattttttcatgttttgccagcatggagggatctattgttcgtcttcctgaagtgattgccctcaagaagaaatacaaggcatacttgtatctggatgaggctcacagcattggcgccctgggccccacaggccggggtgtggtggagtactttggcctggatcccgaggatgtggatgttatgatgggaacgttcacaaagagttttggtgcttctggaggatatattggaggcaagaaggtaaacragccatgagaatgagcgattagagataaagtcactggcaattagatttggtacctcaggcctagcagatggggccctgaactgggatgtccgcaaatttgcctctggtttaggctcataataccagtgagtgactctaatgtctcctcactgaactaaaggctggttctgttcattgtttgttgttttcttatttgagcttctttctaagctacatgctgatctgagatatagaataccctcttgtgtgaaagaacacacagtggtgctccctgcccgccccagccttctgttgggtttgcattgtgctcacagtttcaaaaacagtggggttgtcatgggagcccatgggaatagcaggtcaccttgcccttggacacaaatatatcatgagtgaacatggagacaggaagcaaaaaagttgtgccagctgtggggtactacaaagcattgtatttttcaatttttaaactatgaagttgccttttctgggtctttgtagtcagaaaaaaatcatacrgtgaattttgatgcaggtaagaatctgtggtgtggtcgaaatggtgaaccataaagacagaggcctgggtctgaatatttctcggcttactttgttagacctcagggaaaacatttaacytcccagtttccttgtcagtaaaatggagataaatatgcccagcttgtaagattgtagtaagggtttaaaaagtaatatatgtccatgctacaacgtgggtgcaccttaaaaacattatggtaagtgaaaaaagtcacaaaaagtcacatattgcatgttttaaaatatgtgatacctagaataagcatagaaacagaaagtagattagtagttgccggaggcggaggggatagggaaatggaaagtgaatgctaatgggtatgagrtttcctttcagggttatggaaatgttctaaaattagtggtaaaagtggcacaactctggatatactaaaaaccactgaattgtgctttaaaacggtgaattctgtgtatgtggcttatatcacaatgaagctgttatttttaaacgttgattgcaatgttagggaaaaaataatgtatgtcaggtatttgtatatggcacagaggaggtgctcataaatgttcttaattttgcttcaccactcaatattcggagtattaaagaatggttatgctgggcacagtagctcacacctgtaatcccagcactttgagaggctgaagtgggaggattacttgagcccaggagttcaataccagctgggcaacatagtgagacttcatctctacaaaaaagtaaaaaaattagctgggtgtggtggtggcacatgcctgtagtcccractatgggggaggctgagatgagaggattgcttgagcctgggagatcaaggatgcagtgagccgtgattacaccactgcattgcagcctgggcaacagagcaagaccctatcacagaaaaaaaggtcattcttttaatacttgattgcctgttagagagaactcattttcagtgacttttaatcagctttgatagattttttttttttttttttttttgagaccaagccttactccattgccaggctggagttcagtggcacaatcttggctcactgcaacctccgcctcctgggatcaagcgattctcctgcctcagcctcccaagtagctgggactacaggcacgtgccaccatgcccagctaattttttgtatttttagtagagacagggtttcaccgtgttggccaggatggtctcgatctcttgacctcgtgatctgcccgcctcggcctcccaaagtactaggattacaggtgtgagccactgcacctggccaggtttgatagatttttatctcaaatattacctttttgttaatgggaccaggctcactttggagagttgttttttagtaagctttgtggctgtgaaccaaaggatagaaaaataatactctgggagatcattaaagtacaatatatttgtgcttttggtttttttagtacaatttttaatatttttkagataaaactgtttcatagccacatttgtgtccccctaatttgttctggtacataagcttcttgtgtgtgcattttaaagatttggtgaaattaaaagatatcagagaatagggatatacaattaagtttttttgaaatccttgtaaatgacagagttttactttattcagtgagatgtcattggcattttaataaaataccttgtaagtttctatttcacatttatatcattttatacatttctgcatatctggaggaagttctaatgctcttaaagttgatgttagagaactgttatttaggggtagaaggatgggctttataggcacacagagctgcagatgacattttctgtgatacttggaattaaatcattatatctaaaaagcaatccaaacaccttgtttaattcagctgtgttcatttatttttaactttttttttttttttttttaagacggagtctcactctgtcccccaggctggrgtgcaatggcgcaatctcagctcactgcaacctccgtctcctaggttcaagcgattctcctgcctcagcctcccaagtagctgggattataggtgcccgcctccacgcacagctgatttttgtatttttagtagagatggggtttcaccatgttggtcaggccagtcttgaactcctgacctcagtagatccacccaccttggcctcccaaactgctgggattacaggcatgagccaccatgcacggccatatttctaactttaaatgatacattctccaaatttagaggggttgttttaaaactagtttttctcttatgttgttccatgtttaaaaaacaaaaccaaacctaagaactttgccatgtttctgacccagttgttgccagcggtatgcttcgaccatgttggttgaccttgtatctcagattagtgtccctattccagtgccattgaagtgaggagtcctctagaacttagaaggaaaggactgacattgccrgtgaatgcaagaattgtctctacttatctgcctctgtgaactccccaggagctgatagactacctgcgaacacattctcatagtgcagtgtatgccacrtcattgtcacctcctgtagtggagcagatcatcacctccatgaagtgcatcatggggcaggatggcaccagccttggtaagtctttcttttcttgaaacattgcataagtccacctagcagccaaacgtgctgtttttcttgagcttttttcctaaaataaatagtcaggtttactaataggcagagctggctggtgtgtggtttccatggacacttttttagtgtgtttgatacatatgccatgagaacgaccctggctcactttctrtggaattttcttgtttatagatgggaggctttactcttactatcctacataccctcttaactcagaggtaatataccttcgaggtttttcttgaattacataattttatgtgaaggtataattcactgttagtgatgtttcattaacagcatagttaagagctgctgttttcataaattagtattcctgatttaatgcctttttaaagagtttctactttcatatacggtagataataaatgacatcctgaatcagtttattttgtctttgatgggatttgtagtcccaactagatgccttgatttaaacatactactgtgaacagtgaagttcagtgttcactttctgacatttgacttttattctgcaacaccagagggcagtattgactgcagaacagtggtactaaaaggggagcaactgggtgtctgtctttactttaaaaaatattttcattgcatgtatgagacaataatttcacttgtcgctttttttttttttttttttttttgagacggagtctcactctgtcacccaggctggagtgcagtggtgtgatcttggctcactgcaagctctgcctcccgggttcacaccattctgcctcagcctcccgagtagctgggactacaggcgcccgccaccacgcccggctaatttttttgtatttttaatagagacgggatttcaccgcattagccaggatggtctcgatctcctgacctcgtgatccgccctcctcgggctcccaaagtgctgggattacaggcgtgagccaccgtgcccggcccagttgttgcttttttaatgcttgtaaagtcagtttggcatttgtaaaagatttcacattatcagccatgagctctccactctacagttatgtaatactttattgtaagattgatttggcttgcatcgaataaagtggcacatctgattttggttggtttaagactgttttctttctttcttttttttttttttctggtttttgtttttgagacagagtcttgctctgtctcccgggctggagtgtagtggtgcgatctcagctcacagcaacctccgcttcccaggttcacatgattctcctstttcagcctcccaagtagctgggaccacaggagtctgccaccacacctggccattttttttgtattttttgtagagatggggtttcaccatgttgcccaggttggtcttgaacccctgggctcaagcagtctgcctgccttggccttccaacgtgctggaattacagctgtgagccaccacacccagctgactgttttcttttcttttcttttcctttccttttctttcttttgagatggagttttgctcttgttgctcaggctggagtgcaatggcatgatcttggctcaccacaatctctgcctcccaggttcaagcgattctcctgcctcagccttcccgagtagctgggattacaggcatgcgccaccacacccggctaattttgtatgtttagtagagaccgggtttctccgtgttggtcaggctggtctcgaactcccgacctcaggtgacctgcctgccttgayttcccaaaatgctgggattacaggcgtaagccaccgygcccagtcgactgttttcttaaatcagaattttaccttaacattttttctgatctgtgctagatccttgttatctctaatgagagatttttggaaatagtgaaatgtgatcattttcagttttgtgaattaattccttgaagaagttgttttattaatgttgcaaacacatagtggagcctgtgaatagctccctgttaataacagctatatctcctctccttctgatgtggtgttagtggaaactgtgtgtgaatctgagagacagacatatatacacacatatatatacatacagctagcatttctctaggtacttcacataggcacacttaccttactgattcagcacacaggtttaggtgactaagaartggctaagagctatcaaagttaacattggataatttatttgccctgttccagaacatggatctgtgtgacacattacccccagataaatgacttatctgtactaaatgatgaaatctgggctgtgctagtagtgagaaaatgaaacatggtaattatatataggctttggatcagcacaagttttctagtttttgcctctagccacccccaaagcttagtgatgtgacacarcagccatctgattatgctcacagatgccacaggtcaagaattcggtcagggcacagcagggatgacttgtctttgctctgttgtctggggctggcctggaagactcaagtgtctggaaagactgagatggttggtggttggratcatctggaagcttttccactcacatgtcacctgggctggagtgacttggagccaggctcagctgaggctgttgaccagagcaccttcatgcatgtatcttttcaatgtggcttaggctcctcatgacatcgtgactgtgtacccagaaaggatgcttcagagagcaagcattccaaagaacctggcggaaaccccatgaccttttctgacctgttgttaacaagcaggtcactaaggccatcccggattgaaggggtggggaactagattccacctccccagtggaggcatgtcaaagaatttgtggctggtttttttttttttgagatgcagtctcaaggagaagtaccatgcttttttaaacaaccagatcttgggagaactcagagcgagaactcactcattacccaaggatggcagcaagccattcacgaggatcctccccatgatccacacacctcccaccaggccctacctccgtcattggggatcacattccatcctgagatggacaaacatccaaaccatgtcagtgaatatattacatttatcattaaaactttgttattgttggattccagagtacattaagkacctggtattgaaagtaaggcttaaacatgtatatgtggttgcttattgttaaatgttttcatctttttgtgtgaagaaatgttgctctttggtgagagtacagagccttcagaaaagctgcagcatgtaagggaaggtgagatccagtttccacacgactttgtgagcrctcctttccccttcctcccaactttttcygcatttcccctccagtttctatccttttcccaaggaagaacaggacatatgactaggttgacagatcttgaaaggcaacttcactaggatctcaggtgagataataatgaatgggaattgtgctgccaggatgcctgtacctggagtgggaatactgagcacaggccagggagtagaaaaaatgaggcctaggaaattctgttaaattccactagacatttgaaattctaacttttactttacacatcactaatccatgtccactaatggaaatttagctgtagtatctacatacgaatcaaggcaaagtgtttgaccaaatcaactaaaattttgcttttccattttccagagctgtgctttgatgtattttatttctgtccaaaggtgtagttaataataacatgcatagcacccagcttagtgtgtgacatctaggatcctttcagtaaatttattgaatgactgaatgaatgcacgcatgattggcaataccagaaaatcagtgggttcttcaagtactttattgtaacattgcttgaatagttgaatgttaagccagaatgaccaaattatggaaccaaattaactagataggtayattttaatagatacatttttaaataatgtcagaacgctttatagagttttgtacttctttgttttgaaaggaactgggtccttgcaggcagctactgatgtaggagaaaaaagactaccctgagcagattgaggtttaattaaaactaggtttggctcatttgaattaattccagtaatagacttgttaattaggtgttaaatgatcaccttgagaataccggggaactgtcaaaaactaagagaactgagacacttaaaaaaaaaaaaaaaaaaaaaaaagacattccaggacaatgcagtggcacatgcctggagtcccagctactcaggaggctgaggcacgaggatcgcttgagcccaagagtcctgggctgtagcacactgtgccagagaygtgtctgcaccaagttcagccatcagtatgatgacctcccagaagtaggggaccaccaggttgcctaaggaggggtgaattggcccaggttggaaacgaacaggttaaaacttcccctgctgatcagtagtgggattacgcctgtgaatagccactgcactccagcctgggcaacatagcgagaccttgtctctttaaaacaaaacaaaacaaaaaaacattccaagattcccatgcagaagggttagaagtgttgaaaaaacacagccttgctgggagggggtcataaagagagactttcctgcctgtcttcagggctgacagcttttaaccctcccgtcaagcaccatacttcctgagcccaagaacgtttgggtgttgactttcttctttgttgtgctttaaagtaatttatttcactattagaaattcatcgaaataaaaattaagttttctggtaagcacagttttgttcttacccacagtagagtttagcagtttatctgatgctgggaatcagactcgcttcctcctgttttgtgactttctgcctagaatgctgttgtttggaaaaaaaaaaaaaatacttgtttccgccgggtgcgatggctcacacctgtaatcccagcactttgggaggccgaggcaggcggatcacctgaggtcrggaattcaagaccagtctgaccaacatggagaaaccctgtctctaataaaaatatgaaaattagctgggtgtggtggcrcatgcctgtaatcccagcactttgggaggccaaggcaggcggatcacctgaggtcgggaattcaagactagcctgaccaacatggagaagccctgtctctaataaaaatacgaaaattagctgggcgtggtggcgcatgcctgtaatctcagctacttgggaggctgaggcaggagaattgcttgaacacaggaggttgcggtgagctgagatcgcgccattacactccaacctgggcaacaagagcgaaactccatctccaaaaaaaaaaaagtgttttaccatttgttaaacacttatcaagcaacaagcaactactctctacatagtggtagatatgctgtgtgggagatgcagagttgaacaataggtgatctttgcctttgaaaaaacagtccagtggtaggggtaagattcccgggaagaastagtctcagaggcacagataaattcttcctttgttcagcttgtcttttctcaatttcctcctccattctcttctacaacctcctccttcactcactcccactcccctaaaaccttaaacttccttaaaccagctaagtttttgaagcaaactcatattttagatttcttatataataactttctatataaatgaaayttttctgtggatactgtcactctagtaaattatcagcaatcaaagcagcttcttgattattttttaaagcagcttcttgattattgagcacaaaaggccttttaaccaatggcttaagccttctgaaatcagcaagcaatatgaccaccttacaggtggagaaatttgagctcatgtatggaacaagttttctcaatatcttgtctccaactagaatgtagcttttctaactccatctgcttctacttctgaggttgcatgatgatagttagcattttattaaaacagactattttataatctgtttctaattttctgctaattttccaaagtttaattgtgagtaatcagcccaacaaatgaaagctcttttgggcatttgcctccctgttttctctccatggatcagtagccctttccccacctttctgcttcagaaatggattctgaatactcaagagcttttgcaacatggtgtgtctattttttattccactgctatctttttcttccaaatccaaatgctattaaaagtttcttgcaacaagaacattctctccttttgtgcctcgtttcagagttagtttgaagctagcaattaggatgcccagtgtctattgtttgttgaagaataattctaactttctaaaccttcacataattggaattgcttttctcccccccagaattatgtctgagggctttatttttcatcaaatagacttgatcctagctgttccccaactttatagcagatacttaatatgtataaaccagtgacctgatagatggaatctgctcaaagtaagaacctgatacccggccgggcacgatggctcacgcctgtaatcccagcactttgggaagctgaggcgggtggatcacctgaggtcaggagtttgagaccagcctgaccaacatggcgaaaccctgtctctacygaaatacaaaaaaatttagccaggcatggtggcgcatgcctgcaatcccagctacttgggaggctgatgsaggagaatggcttgaacctgggaggtggagattgcagggagccgagatcacgccattgcactgcagcctgggagacaagagtgaaactcccatctcaaaaaaaaaaaaagtgcccgatacccttctaagagcttgccggatttgaaagctttccaaaaaggaattgatttttttttaattgtcacctatagtttttctaattatctaaatattttatttgtatctacctccctgctatctactttggcagtagagtgaggtgttaaagaaaaaattattcctgtcacttgtgaaacatgataagacagacttccttcaagggggccatggtaataagcatagggatgactgcaatggggtcttccagtgggggagagagggtgggctgcagtctgactccaataaggacagatgaggatttacagccaaggaacagggtgggagtgagtagatagaaaaatactaagaggaaacatcaggggtaagggggatgcttgccttcagcattcttgttraaggtaggccagggtgataagataccaggggtagtcatgtaggggattttctctaatctgacttagcaggattattgctcaaactggattctgcaagaatggagaaggaggcgcaacgtcaggactttatcagaaaggactccaagaggagcctgactcaagtttsgtcaaaggagagagtctttgtcaggttcagaatgacctcattaacatgaactctttaagcccctgttctcagactttgtccatggaccacctgcatcagaggtacttttagtacagtggttcataccttgcttacacacaggaaagcttaaaaaaatagtgccagtgttagagaccttctgtagacccattgagtatctcaaggcgaggcctccctgccatggcatggtgttatttaaaagcaccccagatgcttctcatgtaaggccccatttcagaaccactgctgcttgttaaaaatgaagattctagtttgttccacccaccctactgagtcttggtggatgaggccctagaatatgcattgaaaagaaaaccttaggctggatatggtaatcctgacattttgggatgtaatcgtaacattttgggaggctgaagctggaggatcacttgaggtcaggagtttgagaccagtctgggtgacatagtgtgagcctctgtctctacaaaaaattctaaaaattagccaagtgtggtggtacacgtctgtaatcctagctacttgggaggccaaggcggaggattgcacaaacccagctatgatcacaccactgcattccagcttggatgagagagggaaaccctatctctagaaaataaaaaagaggattgtctttttgacaatcctctttttttccttttaacttttttacctcagtaccaaagcagctctactgattgatggtaattgaaaaaggaaaagaaactggaagtcaagatacaaatgagggagatgtttggcttgtaagacaggcatttgctggcagagctaagttgccatttttggttgtttctggaactctaaatgcctgggatgctgacactcccttctgaacagctgatgattctggctgattgaatcagtggcataggtggagaagttagaaaccagttaggtgcagcaggaaaacagaactaagcattcagagatctgtggtcatggttcctaaggctagttggaattaattatttttgttttactttttttggggggggctgcttgtatttttataacctattaatcctcaaattacttagtacataacctacaaatggccttgcccactataaagttgttaaaatgtttagtattaaccgttttgtaaaactctgattgtcttattgtrttgccttctacctctaaaactgttaacttaaatccaagccaagcctttaccagagattacctttatttgctagctgtcttcatctgtgggtagatacattactacagtgtttacgttccttatctctttgtctcagagtagcctgtgatatgttccagccccaacagaggacagtagaatggtccattaagactttctgaggccaaggtgggcggatcactcgagatcaagagttggagaccagcctggccaacatagtagtgaaaccgtgtctctactaaaaatacaaaaattagccgggtgtggtggtgcacgcctgtagtcccagctactcaggcggctgaggcaggaaaatcactggaacccgggaggtggaggttgcagtgagctgagatcgtgccactgcactccagctcaggcaacagagtgagacttggtctcaaaaacaaacaaacaaaagactttctgtcctgcctgtgggttggcacccgttaaaactcagttccttgatttttcacaggcacttggcctcttttctgccttttgtggagggccctctgtttctggctgtgcattagcaaccattcttttaaacttctgattatattgaatcagcaactttaagcttgcccctgctgcttgtcatacatcctgtggcagtcctcaggaaatcctagtttttggcattgaaatgaattaaaggattaagccacaagagggtgggggtgataaactgtgcttttaagaggaatttactgtgcagtacttggtgttagcaaaagcagttctagttcttacagggagataggaaaccaaggggctgctttagaacagcatccctaggatatgaagacgcagatctgtctgctttgatgttctttagcttgacagtggccccggctgagcactttgatatttgtcgccagtctagcaaaataggggttgtgtcttggagatggtaaacctagttcccgttgctttgcttcagtgttagaaaattactgaactcttgcttcctggaagtcccttataaatctcccttttacaagactgttctctggggcacgaaaatgcctttgcttataaagagcctgttgaaggtccatttattttccttttcttaacagaaagattttccagtgccatttagttaggacttacgggaaacatgttgttaaaatcaatctgtcctgttagctaatatttcttttattttcattttgagcttttagataagattctttatstttctgtgagataatgtgaaaaaaaacacaaaagaaataaattcaaataccagtatactctggtttttaaaaatatcttcactgactttttttttctttacatgctctactctccctctcaccctacttccttcttcacttttcacttggtactttcagatattctttgtgggtttttcttggtttttttttttttttccggacacagagtctgtctcactctgttgcccaggctggagtgcagtggcacaatcttggctcactgcaacctccgcttcccaggttcaaaccattctcatgcctcagcctcctgagtagctgggactacaggcgcgtgccactatgcctggctactctttgtatttttagtagagacggggtttctccatgttggccaggctggtgtggaactcctgacctcaggtgatccaccygccttggcctcccaaagcactgggattacagtcttgagccactgcacctggcctagatattcttagatatattcatgatgcatcccatctagatgcttgtgatgagtatataatttactgatctggaaagtgtgacaagagtttaaagtgttatctgctgccttctccccccactttagagctgttcaaagaaagtgaccattgatcattttaaaagatgagcaaaggaaagactgcttcttttttaaaaaagaaaatttgatgacytactgttagaacacatttccacatggacccccygcttctaaatgggtgtatatccagatcatccagtctgtgtgcacagagtccttgcatttctaagttcaaaatagtaatttaaatgaaagtaggccatcataaggcattgctaggaagaggttactcttgatagatgaatgtgctgcttttggtaagaattagtttgttatttatatttaaattttgtaggccgggcctggtggctyaaacctgtaatcctaccattttgggaggccaagacgggtggatcacttgagcccaggagttcaagaccagcttgggcaacatggtgaaaccctgtctctacaaaaaaataaaataaaatacaaaaattacccaggcatggtggcttatgcctatagtcccagctacttgaggtgctgagacaggaggatcacttkagcctggcaggcggagattgcagtgagctgagatcacaccactccagcctgggtgacagagtgagtccctgactcaaaataaataaataaataaataaataaataaawaaaatgttttgcaagcataccttctgagtacagttacactttgccttattcttagattttacatgttacacatatttttggttctgtgaacagattatatatggcatatttgtagttctaaactacttctgcaactaaacatgcattatatcactcatttcccctcagtggaactggtatatatggacttatgccataattaaatgttagcaatgagagagatctacctttaaaataataaaatgtgctgggtgcggtggctcacgcctgtaatcccagcactttgggagtctaaggtgggtgatcgcttgaggtcaggagttcgagaccagcctggacaacatagcgaaaccccatctctactaaaaatacaaaaattagccaggtgtggtggcggccgtctgtagtcccagctactcgggaggctgaggcaagagaatcacttgaacccaggaagcagaggttgcagtaagccaagatcacaccactgcactccagcctgggcaactgagcaagactccgtctcaaaaaatttaaaaaattaaaaaataaaagtaaaaataaataaaatgtatttcaaaatcaaatggagaccatttcttgatgatctgggctgctgtgccttcctcttcctgcatatgcacagctaattgagaatgtggtgttaaatttattagcagataagaactctgtccattacattttttttgtatgtttcaggccttttaaggcatattattcctttattgctgtctgatcttcaaaacatatccagaggaccttcttattacttttttttttttttttttttttgagacagagtttcgctcttgttgcccatgctggcaggctggagtacaatggcacaacctctgcttaccgcaacctccgcctcccaggttcgagcgattctcctgcctcagcttcccgagtagctgggattataggcatgtgtcaccacacctggctcattttgtatttttagtagagacagggtttcttcatgttggtcaggctggtctagaactcccgaccccaggtgatctgcctgcctcggcctcccaaagtgctgggattataggcatgagccaccttgcctggcttaattgtgtttttttattagttcaagccacaataagaagtttattcagtcagcaatctgtttttgactacttaaccacgtgccagctacaaaaaaataacatatagcttcaaaagcctcttaagcggctgggcacagtggctcacgcctgtaatgccagcactttggaaggccaagactggcagatcacttgaggttaggagtttgagaccagcctggccaacatgacaaaaccccatctctattaaaaatataaaaattagccagacttggtggcaggcacctgtaatcccagctacttgagaggctgtggcaggaggatcacttgagcccaggagccagaggttgcaatgaaccgagatcacaccactgtactccaggctgggcgacacaacgagaccccatctccaaaaaaaaaaaaaaaaaaaaaaagcctcttaagataaaattttcatttttttgaattctcagaataaacaacagtttcttagtgttagattacaattatttcttaataccacttagatccttctttttttaattaattttttctctttttggtgtctgagtgggccttagagttagaaaataactgtctcctgttggcttgccttttctctttttcctcaaggtctttaatatctccctagaagataaaaaggatatatgcccatttgtttctgttttttcccaatttgatgatagaagaataggccttaaaatattataggtcttgttataggtaaaataacaaaaatagaaaataatataaatgatcttacatatgtaaatataaaataagtttttaaagaccgtttgtttaagcatttcattaagtgctttaatggagtatcccattttcttaaaacagccttatctagtaggtagttatcatcatcatcatcatccccattgccattcccattttgcagatgaagaaaccaaactcagaggttaagtgacttggctgtagccatacagctactagatgctcaagccaggatacaaacgtagatagtctgacttcagaagtttatataccacaggctggggatagtggctcatgcctgcaatcccagcactttgggaggctgaggcaggtggatcacctgaggtcaggagtttgagaccagcctgagcaacatggcgaaaccccatctctactaaaaatacaaaaattagccagatgtggtgacgcatgcctgtaatcccagctacttgggaggctgaggcacaagaatagtttgaacccgggaggcagaggtagcattgagccaagatcaagccactgcactccagcctgggcaacagagcaagactctgtctcaaaaaaaaagtttatatagaaccaaattaaagctactaataagtgaaattcaggaagatggtgaaattattagttctctctttctttctgagacctgcattactgctttgatgtatgacatccaaaatgactgtcttattatttcaagtttaaaatgtcctccatgcaagcatatctctgtgcctattctagattattagatgtgagaataaaattagctcaggtagagacaggatcccatccccattatgatggggtgtgcatgagtggtagttttcagaaaaggacggtgtctgcttgccatcttgaacactcagatttgcaaaggtaatttgcctcacctggatgataattactgggtgatgtgatggtagaggtactctaaattggagaataaaggaaaacctcaaaagctttggaaagttcatagcatcgtagagggtaaaatatatgaagcttgtttataaactataaatcagagcattagagaatgaagtgattatatgttagtaaaatcagctgtgtccttgtgttatgtgttaaaattaataagagtgtgcacaggaaatagaaaatggagaattggaaacaacaagggaagtaagatagtcgttcatttcatttttcaaagttaaggctaagccgaagggtcggaacatgttgtatggaagataggaacagcatgattttaagagaagaatacatgaacaagtgaaataacagtggccgtttattatctgcttaccatgtagttagcactgttctaactgcttttcattaaattctcagaacaagtattaaatgttagacattattttccctcttttacaaaaggrggaagctgagaggttaaggaaacaaagaggttaagttgcttacccaaggacacatagttactagtgttggagccagtttgaactcatggatccagttccagaatgctttttgtgtactagatatttattaatgtattagatgattgtttgccttaatgtaattgactatataggtaattttgctttgtaatttaaattagttcgaatacataacgtgttttcattttcccagcgtatttcaacttggcttatctgctcagtgttcttgggggagttactagggaaaaaaatataacagtatttgtcctcagagtttgcagtttgttctggcaacactagaccacacataaacggcataagtacagtaacaggaacttataaacaagagcaaattaatgaattacaaagtagagacatgtcttaaaatgtgccatagggaatctttccataactttttttttttttttaacttctgccctttatctttcatagtgttctttggtttctttggggtttttaaagataagaagtacataggccaggtgcagtggctcacgtctgtaatcctagcactttgtgaggcagaggcgggtagatcacgaggtcaggagttcatcagccttgccaagatggtgaaaccccatctctactaaaattccaaaaattagctgggtgtggtggcaggtgcctgtagtcccagctattcaggaggctgaggcaggagaattgcttgaacctgggaggcggaggttgcagtaagccaagattgcaccattgcactccagtctgggcaacagagcgagacttcatctcaaaaaaagaagtgggggggtgggggaatacatagacattggtagaaaataacaaaaacaaaattaaaatttacaaattgcttgtatttactgatttgcatgattttcacctaaactgcagaaaattgtccataggagtttttactagtagtattttatctttaccactgatctaatggtagaaaaagaaatagagctctaagagaggtttttttttcttctttttaaaagttatcacttgtcttttgtttacatagaaaagtgtggctttggaataaattatattacttgacccacctcccacaaaagttttgcttaaactcggcctataggctggaaggactaggatgaaaaggggtattgctaatggatactggtttctttttgagtgatgaaaatattctaacatttattgtcataagaggtgcagaactctatactaaaaaacatttaactgtgtgctttaaatgggtgaattttatggcacgtgatatatatctcaataaagctgtttaaaaaatcacctggtgaygtgaatccattggtcaaaaataaaataaagagaaaaaaaaaaccaaaaaatacctgacctacagtgagcaaacagtgtcacctataataaatttaaaacttttttattgtggtaaatatatataacaaaattaatcatttttcggtacaattcagtggcattacatacatccagtgctgtgcaaccatcaccactatccatttatagaaccttttcatcatctcagaaaataatttttaatattctagttcaagtttggaagcagtagtcttgacctactgcatttcaaaatctaggctctagaaatacttgctccaccaaaattgagttgtgtctccacagtttttagcctttttgctggtttcccctcaaaccaactttttcttttgtgtttcctatctcaggtaatggcatcactattcatgaagttgtccaaacaagaaatacctatcatcgtttctctcctttatcccctgtatttagtcaccagtgcctatggatcatgcttccttaatatctttgaacctgtctacttctccatatctcattgttatttacttgacttagatttctgtccactttcacctggttttaatagccagccagtcataatagtagaggaatcagtcaagcaaaaatgctttggaagaattaaataagcaatgctgaacatcaggaattgtagatatccgtacagagagttccagtaaaattttatgagtccacgaccccttttctaagcagtctggtccatgytggtctcatacctcatatgcaggattcattcattcattaaatatttgtttcataccttgtttgtaacacttctgtctgccttctaaatgtatcctcagtccactttctaccacttgctactgtgttcatccaagccaccatcttccctcctgtggtgtctctgcttccctctttgcatctattctaaatatagatagctctcagtgtgatcctgatgggagatcatatctatcttctgtttaagaaccctccccaaaggccttctcatcccgcmtaaagtcagtgaagacctgtgggcccttgggatctatctgtctgttgacttcctctatcccactcttcccctcactcgctgttccatatttcttgcatatgctgggtgtgctttttgctccgggtcttggcagtttatagaaatagcacttggggctgggtgtggtggctcacagctgtaatcctagcactttggaaggccgaggcgggcagatcacctaagattgggagttcgagaccagcctgaccaacatggagaaaccctgtctctactgaaaatacaagattagccaggtgtggtggcgcatgcctgtaatcccagctactcgggaggctgaggcaggagaatcgcttgaacccgggaggyggagggttgcagtgagccaagatggcgccattgcactccgcctgggcaacaagagcgaaactccatctcaaaaaaaaaaagaaatagcacttggctgcatcaggtcttttcctgaaacacttctttagtgagtattaattttgtttgttgtccatctcccacactggaatgtaagctgcataaaggcaggagttttgtctgtttcatttgctgcagaatgtccagggtctagagcaatatctggtgcatcatgagtgctcagcatatgtttttttaatgacatctgcttccctagtgcacaatatgttctcccctttttgtgtagtcttctttttgcctttggtgaaatcaatttttttttattttgcctttggtgaaatcaatttctatttcttctatgtttagcatatgtgtgtgtgtgtgtgtactgaaatatgtgaaatgtttattatttaattttatataccagatttctgtgttaaaaattttttatatcataaagttagactgccctgaggcttcagaaatgttagtagcctcctaatttgacttctttagtgtttaagtttctttcagaaatcctgaaacatatccacaaccgctgtatgtatacagtttcttttaacacttatttggtgaatttatcaatatgaatttgtcatgtttctcaaaatgagcacttttaaaaaattggtaatattgaatttgatgaaacctattatttatatggagtaaataatatgaagtggaacaaatttacatgttccctttgagactttttatagatatgcatttgtgtgtgtgtgtgtgtgtgtgtgtgtgtgtgtgtgtgtgtgagagagagagagaaagagagagagacagggtctcattctgttgtccaggctgtagtgcggcggcatgctctcagctcactgcaacctctaccacccaggctcaagcagtcctcccacctcagcctcccaagtagttgggaccacaggcgtgcgtcaccacacctggtaatttttgtattttttgtaaagacggggttttgccatgttgcccaggctggtcttgaactcctgagctcaagggatcctcccgcctcggcctcccaagagtgctgggattacaggcatgagccactgcgcccagcccatatttattctaaaagaaagaagtagaggttataacaggaattcaaaattcagttggcaccagcaaaccccagagacttaggaatattttttgttacttttgctatcgaatctaaacgttcatttgcccaacctacttcccctttcttgaaagaagtaaaaattacttttggaaatttcctgaataaatggagtcaggaatcccagcagttcttactgttaaaggacgtgcttgcacacgtaaagaagggtctgtttacctaaggtttatttagctctggaacatcgtaagccctggtacaagtccagccttcccgaaactaactgcttgcgtgtacactccctgctcagcttcgccccttttaaaatgaagtcaaaacattctaatttggtaaaggtgttaggtcctgagaaattattactttgtcaatattaccgtatttgcttttcagaatttcagattccagtcatcctagagagcatattatttctacaaaaactgttttaggaggactttgttatacattgctattatactcacccagagacagttacttttttttttttttttttttgcaacggagtttcgctcttgtcacccatgctagagtgcartggcacagtcttggctcactgcaacctctgcctcctgggttcaagcaattcttctgactcagcctcccaagtagctggaactccaggcgtgcaccaccacgcccagctaatttttgtatttttttagtagagacagggtttcaccatgttggtcaagctggtctcaaactccgaaccgcaggtgatctgcccaccttggcctcccaaagtgctgggattacaggcgtgagccactgtgcccagctgacatttaaattttttaatctgaaactgaccttttctgttaacatgaagcatttgttcatgctttgctactatggtggtgtcattttaactttttctttgctgaataattttgtactccattgtatcctcataatttcaattgtagtgtcccatagccctccaaaaaaggcagtcagaatcagattttttattttatttatttatttatttttatttttatttttattttttgagacagagtcttgctctgttgcccaggctggagtgcagtggcactatctcggctcactgcaagctccgcctcctgggttcacaccattctcctgcctcagcctcccgagtagctgggactacaggcgcctgccaccacacccagctaattttttgtatttttagcagagatgggctttcactgtgttagccaggatggtctccatctcctgacctcgtgatccacctgcctcggcctcccaaagtgctgggtttacaggtgtgagccaccgcgcccagcccagaatcagatttttatattaagttactaattttttgtgccagccgtccatcagcctccccatcttggcagggtatgcagaagaaaaacctaatagtaaaatatctagggaaaatgtcttcatgagaattaaagcaaatgcacagataaaaaacgaatatttttattaccaggattttctattctgtgtattcattcacgtgagcatttaaagagagaaagggaaagaagggaaggccagctttcatttcttgcctcaggacatttaagtttgaagtgctgttttcctaacacttaccccatcttacaatacaaattcccggaatatgcagcaccaaaaatttcagtatttttccagatttgtcttaaaaccaaaggttaagaggagagttcctgagcccacacctgtaatatttagatggttctgttttgttgttgttgttgtttttaagtaaaaggggtattattaaataatagttggctgtatttaaaatcatcaatagagagatgagaaatttaacctcaattccatttttgtttaactttgggtgattttccaagtattttaaattttatttttattcttattgaagtattgacattcatacaatgaagtgtacagatcttagacatacagttttcataaatatactcatctaatcaccacccagattgcagtataaaacattccaggctgggtgcagtggctcacgcctgtaatcccagcactttgggaggccaaggccagcagatcacctgaggttgggagttcaagaccagcctgaccaacatggagaaaccctgtctctactaaaaatacaaaattagccgggcatggtggcacttgccttaatcccagctactcaggaggctgagggaggagaatcgtttaaacctgggaggtggaggttgcggtggaccgagattgtgccattgcactccagcctgggcaacaaaagcaaaactccatcacaaaaaagaagaagaagaagaagaggaggaggaggaggaggaggaggagggggagggggaggaggaggaggaggaggagaaggaggagaagaagaagaagaagaagaagaaagtcatggtccctgtgaagaaataactttcagggcttatggtagagaacagtcaaccaggaagagtaccatcttcctgagaagcatatggaatagtctagaggtatttttggtcacagactaggttgctgtggcactgttggtatgcacagcccagaggccagtgatgctcaatgttgtgcaaggcactaaacagcctaaacaatgaagaactgttttgcccaaaatgccaacaacaatcttactgagaaactctggaaatggttgactgaaattttgcagggtgccctctttggaagatgcaggatggcagaaatcctagattaaaatgggaaaggagaatgcaggatggaaggaaatctgtgggcaccacctctttccctgggattctgcatgatgtagtagactgaaggagaagcagtgtgatgtggcggaggcggtgttagggaagaattcacagtaggtagatgagtctcaacagggtgggccaacgtgcattgttgattatttgtaatgcaacaaagttactcacttattcctcttctaaattcctacgttaaatacttaacattcccttttagtcaatcctagcaatacaggagctagaatacatcattgagtcattcaaagtccagtctttgaaaccagaagaaccagggagtcaagtcttggtttctctattttaagatatgtaacctcactgggcatcagtttagtttcttagctgtaacataactcttaaatatgccttgcttctaaaagggagaggtgggaaagcctactaagtctgttcttcctctcagaagttacttatatggtgtattgaaagatcttgtggtttaggcctggtggatcacttgaggtcaggagtttgagacgagcctggccaacgtggtgaaaccctgtctctactaaaaatacaaaaattagctaagtctggtggcgggcacctgtaatcccagctactcaggaggctgaggcacgagaatcgcttgaacctaggaggtggaggttgtagtgagctgagatcgtgccgctgcactccagcctgggcaacagarcaagactccatctcaaaataaataaataaatatwtwttttttttaaaaaagatcctgtggtttaaatgttgagcatgatggaaatttgaaatgtttttaacccaggtttgcttatctttttttgaaagcattacctgatttcatctgagattttctactatgcacactatttggagttcttggaaatgatgtaataacaatagtcactcctatctcctcctccacataagtccaagataccttcagctgagatgagattaagctgttgttctaacatgtggagttagctgtagcaccataaatgcaagagaattcttaatttaaattaatataaatcaacatattctttcatttgtttatgatagactataaartactgtcttatcaggagataaggcaggctagcagttgacttggtaatatttagagatgtagtaaccaaagcaaaatgtaatattcccctgcttagaaattgctttactgggccaggcaggtggatcacattagcccaggagtttgagaccagcctggccaacatggtgaagtcccatctctactgaaaatacaaaaatgagccaggcatggtggcgcacatctgtaatcccagctacttgggaggctgaggcacgagaatctcttgaatccaggaggtggaggttgcagtaggccaagattgcaccactgcactccagcctgggcgacagaatgactctgtctcaaaaaaaaaaaaaaaaaaaaaagaaagaaagaaattgctttcctagaaaaagtgaaaaaaagcaaacattaattgggcctagcactgtgctattttctttactcactttgcttaaagggagtcagtactgagagcttccataattactttggtaatagcctttgaaaacgtagtttgctttgacttatctgatgttataaacacttgtgtaagaggtctttaagatataagttccagttttagatttcaatagagacacacaacgcaggcaaagtaaacatcaagggtatgtaagtttatttctatcagtggagaacatactttgtcatgtcctggtttaaactgtcctagaaaaggcatatttgttaaaaaaaaaaaaaaaaaaaaragaagaagttttcaaagagaaacttcacaggaatgaaatgtgttctttctctctctatagtataatccaaccaaagtaaaatatgagaaaaggtrtacttccaaataataaaaataaggctgggcacagtgactcacgcctgtaatcccagcattttgggaggctgaggtgggtggatcacttgaggtcagacgttcaagaccagcctggccaacatggtgaaaccctgtctctactaaaaatacaaaaaaattaaccaggcatggtggcgggcgcctgtaagctcagctactcagaaggctgaggcaggagaatctcttgaacctgggaggcagaggttgcaacgagccaagattgcaccattgcataccagcctgggcgacaagagtgagactctgtctcaaaaaacaaacaaaaaataacaaaaataagacctttgaaacagatgattaaagtaaaagattgacagttagcttcaattcttataaaaaattgttaaatgaaagagatatgaaataaccacaatttgctattatagtatatattagagctagatgatgggtagtatttttccatattttatcctgctttatgtcaattaattcctagttaatgctgaaaactaactgaaaccattcttggagctatctatttgagggaccctgagctgatatagaaaacttttacctgctttgagaatataacctttaagaagaaaagggggggctgggcgcagtgcctcatgcctgtaatcccagcactttgggaggccgaggcgggcagatcccctgaggtcaggagttcgagaccagcctgatcaacatggagaaaccccgtctctactaaaaatacgaaattagccaggcatggtggcacatgcctgtaatcccagctactcgggaggctgagtcaggagaattgcctgaacccgggaggcggaggttgctatgagccgagatcgcgccattgcactcctgcctgggcaacaagagtgaaactccatctcaaaaaaaaaagaagaggaaaagaggggtggggaagttcttcaatttcaaattctttcagtgcactgtaattaattggaaagtataagttggaggagtagcagtaattttattttattttccccaggaagacagattatatatcagcatattcaggaaatctaagaagattaggagctgtgtaatgaagtataatatgagttaggagatcaactctggctgaacatccttaatatttgtgtcctttattttgaaagatttcagttaacaacagaaatgttatttttgaagctgcaggctcaaacatgtttttgttggttatggtataagttgtataaaagctcatcagctaaactggaaatcatattactactgaagcagctgagtgcatgctctattctttgaagtataatgctaaatagtactagtttaagasaaaaatgtctgctgcctttatattccttactttattacatggatcttttcctggctttcaaaaaaacaaaaaaaaaaagcagtcttgagcgttcagaaaatttatagaacactgtctgttctaagtcacacctatctaggagggcttatggagtttatttcagtaataatatagtagttccttctaaccttaagattacatgcatggctgagawtcttgagaaatttggattaagacttgataaaatattccttttaaaaatgactgaaaagcaattggtacaccttaaatctgtttggcagtgattaatgtagttccctaaatctaattctgttttgtaaacgtgattgaaggttatcaatatctagtggttatcagtaggtagataattgtggcgctccttcaacctctaccctccatccttttcaaggccttctagttccttaagagaactaaatctaggcctggtgcgatggatcagttgagggtcaggagttttagaccagcctggccaacaaagtgaagccctgtctctactaaaaatacaaaaaattagccaggcatggtgrcacttgcctgtaatcccagctactcaggaagctgaggcaggagaatcgcttgagcctgagaggcagagattgcagtgagctgagatcgcaccactgcactgcagcctgggcaacagagtgacactccatctcaattaaaaaaaaaaaaaaagaggccgggcgcagtggctcacgcctgtaatcccagcactttgggaggccgaggcaggtggatcatgaggtcaggagatcgacatcatcctgcctaacatggtgaaaccccatctctactaaaaatacaaaaaattagccgggtgttgtggcgggttgctgcagtcccagctactcgggagtctgaggcaggagaatggcgtgaacccaggaggcggagcttgcagtgagccaggagcacgccactgcactccagcctgggcaacagagtgagactctgtctcaaaaaaaaaaaaagaactaaataatctaatgatgctgttacagcatattgatcttttatatctattccttccttcctgagaataagatttattgtaaagaggttgaagactaaaaatgacctgttaaagttatctrcattttccaagaaattaactacatatttacttttctctgtctcttccatgccaagctgtagatttttttacagtagagttcctaaaaatagttttattctaacaaaccatattgaagtccaaaaggacagccacacagttaagtttatttgtaaaattcaagagtcagtacagatttttctcctccaaattgcttttatgctttttatcacccttaaaagtaaagatttatgtttgaaaagtaggaaagaattctgacctctttatatttccatctgtgttctttcggagccaaagataaaaacttcttaagagcagtatttttttaaacagtgctaaactttcttctttgtttcaagtctgtattagaccagatacttgctgaaactctgcagtgaaaaatccttgggactgagctactacactggcgttaaatagcaattggtcttcttgcataaatattaactgctattttatatgatactcaagtcaaagtgggtaactatgttgtctgttaagattcagtttcactttaagagcaaaggataactattttctaacatgtgtaaatgccagggcttactgatttgtctacatttattttactgcttttattttcctgttattctctttgaaattagtaagttaaaccataagaaatttcctgctttaaggtcaaaaatggtagcatgttggcagtttgatggttcagcctagcaattttaaaggataacaggccactttatttttatatatttatttatttatttgagatggagtctcactctgtcacccaggctggagtgcaatggcataatctcggctcactgcaagctccgcctcctgggttcatgccattctctcgcctcagcctcccaggtagctgggactacaggcgcccaccaccacgcccggctaattttgtttttgcatttttagtagagacggggtttcaccgtgttagccaggatggtctcgatctcctgaccttgtgatccgcccgcttcagcctcccaaagtgctgggattacaggcgtgagccaccatgcccagccctcctttttaaatttttttaatttttctttttttttttcgagacggagtttcactcttattgcccagggcagagtgcaatggcgcagtctcgctcacggcaacctctacctcccaggttcaagcaattctcctgcctcagcctcctgagtagctgggattacaggcatgcaccaccacacctggctaattttgtatttttggtagagatgggatttctccatttggtcaggctactctcaaactcccaacctcaggtggtccgcctgtctgggcctcccaaagtgctgggattacaggcgtgagccaccgtgcctggctcatttttcgtaagtgacagagtctcacactatgttacccaggctggagtgcagtggctgtttacaggtgcagtcatagctcactacagccccaaactcctgactcaagagatcctcctgcctcagccccccaagtagccagaatcacaccactgtgcctggctttcctttttttaaaaattgatacataatatttatggggtacatatgatattttgatacatgcatacggtatcaaatattctgatcaaatcagagtattttggatatgtgtcaccgcaaacattatcatttctgtgtgtttagaacatttcagctcttctagctattttgaaatacacggtaaactattgttaactgtagtcatcctgtgctatcaaaagctataatttactcctcctatctaactatatgtttgtacccattaaccaacctctcttcaatccccctttccctaccattcccagcctctggtaaccactgttctactctctacctccatgagatcaacttttttagctcccacatgagtcagaacatgcgatacgtgtctttccgtgcctggctcatttcacttaacatcatgaccttcagtcccatccatcttgtgcaaatgacagcatttcattcttttcatggctggatagtattccgttgtgtgcatctgccacattttctttatccattcatccgctgatacttagaatgattccgtatttggctcttgtgaatagtgctgtagtaaacatagctgtgcacacatccctttgatacactgatttccttttatttggataaacagcagtagtgggattgctggattgtatggtagttccatttttagtttgaaaaaacttttttttttttttttaacagaggctagttaatttgtgattagatagctaaaaggtttgtgatttttttttaaaggtggtggctgggcagcatggtggctcactcctgtaatcccatgccacaatcaaggttagaatattttcatcgtccctcctggaagttcccttctgcccctttgctatcagccgccttcccatactttctggcaaccatgaatctgttttctgtcattacagtatgtctttttagagtttcatacaaacgaattcatacagtgtgcagtctcatgtctggcttatttcaatgaacattatattttgagattcatcagcattgttgccttagcaatcatttgttccttttcatatatttcctttctctcctcatgtttcttctacctttttgaacatatagatcatatttataatggcctttaacatccatatctgctaatactccgttatttttggtcggtttttattgactgacttttcccytggttgtacgtcatattttcctgtttctttgaatgcctggaattttaaaattatatgttggacattaattttacattgctagtttctatatcttgttgttttcctttaggtaatgttggactttgttcttggaatcagtaggatcctttcaaagcttgcttttaaggttagggtgggttcagaccaatttttagtctagggttcatttatctccactactaaggtgwtaggagtagagtccccttctgaggactctgttagataacccacatattataagatctttatattttggtggacaaaaatacaaactattcccagctccatgtgagtgcaggaattgtttggccyattgctttctgayggatcttttccccagcctcygctagtttcttttcatgcgtatagaaatcagtacccttcccaaagttcaaagggacccttcagcagatctctaaagctctctcatcgcaccscacctccctgctcctgtacactgcccaacaaattctagcccccgcagcctccccagctctgatctcaactgaccactctccactccaatctcagatgtcctcagctggcaagactgggccctccttccctgtgcagcagcctgcaacctgccttcaggcagcacagtctggcattccccgtggttcaawgtctaaaagtcattgtttatgtactttgtccagtttcctattgtttacagcaggaagataaatccagcctctagtactccatggccagaagaagtctcatcttctaaatgtaaattaagcatgtattgatacttctagggggaagttaggggacttggctcatcagttcccaacatacttaaatataacacactttaatgtctgctttcttctttgtaacttaagcgatgacataaatgatgctcttcagtgctcacactaggctaatctaagcttgagtgtttttctgtgatcaacttgaaattatctacataaagagtattaattttgacttatttgtggccaacttatatagagtagcttcccatgaatgatggatatgttagtattctgattctaaggacattgttagctatctgtatgtctggttaatttgtcataagaacttatgtcatgtatcatgcttggacttttaaaaatatgaacttgctgattttataatctatatatgaaaattactgcagccttttctattcatgagtattcatggttgagaagattctaaaacagttcttagccctttccaagcagatcttttaaatttattgctttgctctgtataacagaacagttgtttggatatcttttcaaagattgacttaccataatgtcaaaacctgcccaaatatttagtcagttggcaattgcagacagaaacgtgtgttttaatctatttgtgttttagggaagatgagcaaaataggattaaagatacgattttatactattacagatatgttactgttgtctggtaagaattttaaggaaacaggccaggcgcggtggctcatgtctgtaatcccagcactttgggaggccaaggtgggtagatcacttgaggttaggtgttcgagaccagcctggccaacatggcgaaaccctgtctctactaaaaatacaaaagttagctgggcgtggtgatgtgcacycgtaaccccagctatcaggaagctgagacaggagaatcgcttgaacccgggaagcagagattgcagtgagccaagatcgtgccgttgcactccagcctgggcgacagagtgagacaccgtctcaaaaaaaaaagaaagaaaaagaaaaaaagaattgtaaggaaacaacaaaatgaaactcagaagatgaaaatttgggggtctaaaggcttcatctctggtcttatgtgtaaaatttatttgcagcacagttaattagaatgaatcttaaagttagaagatgtaaattctagttgcagctatgccacttgctacttgtaatgtgccacacactattgtgcaactgtaggcatgtcactaccttggtgagagtctccccacctataatatgaagataatcataaatatcctgcctactgtcaagggatttgtggagtgctcagtgagggggtatggctgaaattctttgaggatgctaacgctccattaaacgttttttacattattataacttctgctgttaacaggtagaatgacagaatacaaaatgagacattttacatttatattccrtrtggtttactstgtaaaatattttatggtgaaatggaaaaaaacgaaacagaactgattagatagaatggagatagaggagatttactgtcttttttccattcctttttacttagkattattttgttttctctcaccgtgactttccaggtaaagagtgtgtacaacagttagctgaaaacaccaggtatttcaggagacgcctgaaagagatgggcttcatcatctatggaaatgaagactctccagtagtgccyttgatgctctacatgcckgccaaaattgggtacgttttgttgcagatcacagaccagtctgtccttatccttatctgtgatgtgagaccagggcttatgtattttgttagggaaaatggtcttgtccttactgtgttaaccttcatttggtacatatgccatagatcaaatagtggattccaaattgtaaagtatgttaatttgttcttctttcattaaacatttgagtttcatgtactctctaggggcctgggatagatcagtgaataaaatacaaacatctctgtccttgtggagcttacagtctagtagggggcaacagtcagacagacataataaacaaatgaactgtgtacgatgttagaaggtgtcaagtgctatggaaaaaaatagagcaggacctatatggggagttgagagtgccctgtgggcgggccgataacactattaaatagggtggtcagggtaaggaagcctccttgggaaggaaaatgacatctgagcaaagatttgaaggagctgacagccactggagaaagaagcatctgtgcaaaggccacagtacagaagcgagcttgcttagctgacggaagagtagcaaagaggtccctggaattggagcaccgtgccccagggcgagcagtgggccatgaggtcagagaggttttatcagagtgtgttattggatacttaccaggtgtgcagattacaccagcttctttggtttgtatgaggcatacataatggaaagccctgccctaggatagctttcaatgtatttgagaagtccagatgtataatgaaaccagaagacatttgaaaagcaaatgaacagtaattatactgaacaaattttattatatgcaaagtggccctgaagatgtagaataaaggagtgacctgcttagtataggctcagtaagaaaggcacatcttgttggatgggtgagttttgagctggatcttaaagcatttctccagtttgattgaactcattgaaggagcaatttttgtaaatttttgaatccccagtgtccaccacagtctccgacactcagtaaatgtttactgaaatgaatatgggagaggaaattaaatcagggaacctggaagtaatgtgattcaaagagaatgaaagggaagtaaggaaaaggtgctccctgagagaaaaagaagaatttgggtttcaacatgaagtcatatgggcagttggtattatggcttcagaggggatggggaaggattttcttcattcttctttaagtggaattctcataaacaaacatgaagagttatcagatccaaaggactcagtctagagctctctctttaaagaaggctgtgtctcctttattctacataggtgcaactgactgtgtacactttaattaggaaagatttagagaaggtacaggacccaaaagggcacaaaaaagcaataactactaaatataaggaaaacaactctgtatacagcatgtataaagaaaagcaaggtatatttggggagataaaagttgtaaaggcattaagatgtgtgtttgttgagaaaaaataaatttgtgcatttaagaagttaaaaaaaaaagatttagagaaggtaaagaattagaataaggcactagacagtttgggagcatgtgctgaagatacagggcacccaggttcatgctgacacaaaggaggtatgttgaggaagatgtactggtactacagagagtgggaaaaggctgtgaaaagactggcattaatgtaatgccaaatgtgcaggatctgtatagcccaggctggagtgcaatggcgtgatctcggcttactgcaacctccacctcccaggttcaagcaaatcttgtgcttccgcctccccagtagctgggattacagatgtgtgccaccacacctggctaatttttgtattttttagtggagatggggtctaaccatgttggccaggctggtctccaactcctgacctcaggtgatctgcccgcctcggcctcccaaagtgctgggattacaggcacgagccactggcccggccacatttttttattctcaaacaaatgctgtaaacagcttaaaggaaaagttgaaacataagggaggtcaataagaggaaaagacaaaaagcaacataatttgggccaggcacagtggctcacacctgtaatcccactttgggaggccgaggtgggtggatcacaaggtcaggagatcgagaccatcctggccaacatggtgaaaccccgtctctactaaaaatacgaaaatcatctgggtgtggtggtgcacacctgtaatcccagctgctcgggaggctgaggcaggagaattgctagaatctgggaggtggaggttatggtgagccaagatcgtgccactgcactgcagcctggcgacaaagcgagagactcaaaaaaaaacccacataatttagtagacaaaattaactaaaagttagaatgtgttatttagacaagatacagatgtggagtaaggccacagggcctccaatttggcttacgataggggtgggggattgttaaatacgaattgtgtggtctgagtaatcagctgaagccagcgggtgaactggcctgacagacaccaaaggaagccctgaattctgaagcagtgttgttcccaagacaattaaagaaacgtgtgatctggagagctcatgccagtcagccattctgctagcagaaaagatgtgccgtgttacagcagatcccccacagctgcagaatcctcagaatttgcggattaatgttaaactgccaagcttaacatttcaaggaccagattttaattaaatacaggttcattttgaagcctctgaaccactattacatatcagggacactttttttttttttttgagacagagccttgctctgttgctcaggctggagtacagtcgtgtgatcttgccttactacagcttctgcctccaagcttcgagagattctcatgcctcagcctcctgagtagctgggactacaggtgcatgccaccacacatagctaattttttgtatttttggtagagacgggatttcaccatgttgcccaggctggttatttcagttttgtgaaggacaccatataggagaagactgctttaggattgactttaaaagtatttgtgagctgtcaattttaactttaaaaggagttaaaggaaactcctattagaagtctccaatgcctgcatcaccaaagagttgaaatctttgaggacagcargtcctctgtaatgagtgctttttcactcctcctggtttctgttcttgttttcccctttgcagcgcctttggacgggagatgctgaagcggaacatcggtgtcgttgtggttggatttcctgccaccccaattattgagtccagagccaggttttgcctgtcagcagctcataccaaagaaatacttgatactgtaagtaggcactttcaccttgatataaatatgccttttattaaaagggcctgtatattagatgaaattcataatatattgatcttgatgttcttgtgagcacctaagacagagggggtgacagtgctaccaaaaacattggcatttacaaaaaaactgtcacccaccacacctgcatcatgagagctctggagaattttccggctttgtcttgctctactgtctccctcactatggactctacaattctctttccactctagctatttctacattaagctttctcatatgttgttctgtctaaaattttctctcttgagctttctctcccctctgcctggctgactgccactcattcttcacatctccatttaaaggaaaattgctcaggggcgccccacaccttcttgctctgtgttcccttggaatcctgagattctcccttactaaattcttcacacctataattatttaatagcagtcttctccattagataaatattgaggataggaataagtctgttttactgattctatatcccagcacccaccacactgccaggcatctagttggggatcattattactaagcttaattatttattatctcaagatattctcatctctatatattctcttaatatgttattgttgcaagtctaagatttcagagtttaaatcattattgccatctgggagtttataaagctttagaacatgacatttgcataaaattagttgctagaaatatccattaatgagttagagagctactaattttttttttcttttttgagagagagttttgcccttgttgcccaggctggagtgcaatggcgtgatctcagctcaccacatcctctgcctcctgggttcaagcaattctgcctcagccccctgagtagctgggattacaggcatgcgccaccacgcccagctagttttgtatttttagtagagtcagggtttctccatgttggtcaggctggtctcgaactcccgacctcaggtgatccgcctgcctcagcctcccaaagtgctgggattgcaggcgtgagccactgcctggcaagagctactaatcctaaagaacattatgaatgcttctttataaaagttaattataacaatttgatggacattttgtattcctgaatagccgaagacttgacttttcttctctgtttctacacagcaaaatttctatgagtataagtgtattcccttttaaaaaacaaaattgtagtaagaacacttaacatgagatctgtcctcttaacaaatttttccatgtcgaatacagtattgttaactataggcacagtgttgtgagcatattcttaattacattctgacaatatccaattagattcaactttttgatattgtatcttttttttctttattttgattatgcctgtcagatttttccaatggatttttctcatttctcagaaattttactggtgaatttctgtgatgattttttttaacctagagatttcagcttttctttccttcctactctattgatgttttaagaattttcttttttctttctcaygttcacctgttaactcagaatttcaatgtgcctttaaaaaaaagtctgtgtaactataaccagtgtctatggcagtaatccatgccttctgaccacaactttgacttctgagaactgtacacattcatgaaagaatttagatgtaaccaggatatctccttaggatatctaaggagatttctgttgccaacaagtatgtttgccaactgagagttctaatccttttcataagattctcttgagggattgttgggctttgcctcccatttagttttttaaagcataaagtgcattttttgaaaccatggatttgttaaagtcattttgtcttatgatgttttatggaactaaacgtgtactagaccattatgagatacaaattaattttcatttaataatgggcctcatgacatgattctgtatatagaaagtgctgtaaaatacacacacacacagctagagctcataaatgaattcatcaaagttgcagggtaaaagatcagcacacaaaaaattagtgcttttatacaccagcaatgaacaaatgaaaagaaaatttcttttacaattttcaaaagaagaaaatacctagtaataaacttaagaaagcctttcctggctgggtgcggtggctcacacctgtaatcccagcactttgggaggtcaggcgtttgagatcagccttgccaacacagtgaaacctcatctctactgaaaatacaaaaaattagccaggcatggtggggggcacctgtaatcccagctactcgggagactgaggcggaagaaccacttgaacctgggaggcggaggttgcagtgagctgagatcgcaccactgcactccagcccgggcgacagtgcgagactctgtctcaaaaaaaaaaaaagcctttcccttgtacactggctaatttacacttgtacactgtatttttagatgtgtgtattgaaaactataaaactttgctgaaagaaattacagaagacttaaagaaatggaatgacatcctgtgttcatggattggaagatttaatattgttaagatggcagtatagcaacctacagatcctgtgttcagcatttctcagaaaaaaatggactgggagaccctaagccactggcccttttttgcagaaattaaaaggctgatcctcaaatgtatatggaactggcagggaatagctaaaatagtactgaaaaggaaaagcaaagtgggaggactcacacttcttaattttaaaacaaagctaattactacaaagctacagtaattacaacagtcgagtactagcataaggatagacgtatagaccagtgaagtagaattcagagttcagaaataaagcacaagcatctatggccaatttgttttcaacaagggagccaagaccagtcaatgagaaaagaatagtctcttcaacaaacagtactaggtcagctggatgcaraagagtgaagttttaaccctacagcatggataaaccttgaaaacrttaggctaaatgaaagaagccaaaacaaagactacgtaacttacaattccatttataagagatgtccagaacaggcaaatcatagggtcagaaaatagattggtggcagccagcctgagaggagggggagtgaggattgagacaacgagtattgggttgctttttagggtgataaaaatactctaaaactagatagtgacaaaagttgcacaactctgtgaatatacttagaagcaatgaattgtatactttaaaagtgaattttgctgaatgtgaattgtatctcaaagctataattttgttattttttaaaatgggaagcgcaaggatattggctcaggggagcggcaggatggctgtcctagaggattcggttactcagctctataatgaatacatgtttttctcctagaaacccaccttacctgtgatctagaggttctgtgtagactgttaatgaatggcgatgcatgtaatggctgcctgtccctaacatacccaaataccccacacaagagtcagcactcattagaatgtcatcttatattcacatgacaccgatttgtctgaaatatttggagtgggatcaaaggaaatcttgtaatctagatccccttgggctactgaggatttctttttctatctaatgattacttttctacattgatgaaaaaattctagattcttctaaagtttataaatgtccattactttgtgatcttagtcatgtgcacttttgtcttattattattattttgaggcagggtctcagtcacccaggctggagtacagtggcatgatcttggctcactgcagcctccatctcccagcctcaagggatcgtcccacctcagcctccagcatagctgggactatgcctgccaatttttttttcttttaagagacgaggtcttactatgttgcccaggctggtctcaaactcctgggttcaagcagtccgcctgccttggcctcccaaagtgctgtgattacaggcttgagccaccgtgttcagccttgacttttttttttttttttttttgagacagagttttgctcttgttgcccaggctggagggcaatggcatgaactcaactcaccgcagcctccgccccctgggttcaagcgattctcctgcctcagcctcccgagtagctgggattacaggcatgtgccaccacgcccagctaattttgtattttcagtagagacagggtttctccatgttggtcaggctgatctcaaactcccgacctcaggtgatctgcccacctcagcctcccaaagtgctggaattatacagacatgagccaccgygcccggccagctttgacttttgtcttaaattattacatcttgtcacagaggtcaggtgaataaatggtcgatgggttctcccagcttaatttcagacttaaattgtttccatgtggagctttcacttatacctcttctcagaggtaccgctgttgtgatagcacattgacgttcagctcttatttgcttttatatttttcacattttgaaatgaagaatattttttcttgtgctacaatacatcmgtaatactggtggttttctctctccaaacactgattttttaaaaaaatgaagtttaagatgccaggtgtggtggctcatgcctgtaatcctaacactttgggaggcagaggtgggtgggtaacttggtgccaggagttcaagactagcctggccaacatggcaaaaccctgtctcgacaaaaattagctgggtgtgatggcacgtgcctgtagtcccagctactcaagaggctgaggcagagaatctcttgaacccaggaggcagaggctgcagtgagccgagatggtgccactgtactccagcctgggtaataaagcaagactctgtctcaaaaaaaaaaaaaaaaaaaaaaaaaaaaaagttgctgggttcgttggcttacgcctataatcccagcactttgggaggccaaggtgrtggatcacttgaggttgggagttcaagaccagcctggccaacatggtgaaaccccatctctactaaaaatacaaaaattagctgagcatgatggcgggcacctgtaatcccagctacttgggaggctgtggcaggagaatcacttgaacctgggaagtggaggttgcagtgagctcggagggcgccacagcactccagcctgagcaacagagcgatactccatctcaaaaacaaaagggagagatgacaaattgtattcggttttgtaagttcagagtgcatataactttttctaccaagcatatcatactttgaattatagcctttattctgcatacctggctattcacaacccattattcatggtgagcttgaaggccttgttcaaaaagcagctccttccacagctgtattgtagtctgatcttgtaaatgcactagacataagtcctgccgaaggataatcttgccatgattgtttttagcaaagtaaaacaccaggcatgcctgcatcctactggctctgacagacctctactttgtcttgtgtattttaggctttaaaggagatagatgaagttggggacctaytgcagctgaagtattcccgtyatcggttggtacctctactggacaggccctttgacgagacgacgtatgaagaaacagaagactgagccttkttggtgctccctcagaggaactctccctcacccaggacagcctgtggcctttgtgagccagttccaggaaccacacttctgtggccatctcacgtgaaagacattgcctcagctactgaaggtggccacctccactctaaatgacattttgtaaatagtaaaaaactgcttctaatccttcctttgctaaatctcacctttaaaaacgaaggtgactcactttgctttttcagtccattaaaaaaacattttattttgcaaccattctacttgtgaaaycacgctgaccctagcctgtctctggctaaccacacaggccattcccctctcccagcaccttgcagacttgggcccatcaagagctactgctggccctggctccgcagcctggatacttacctggccctcctccctagggagcaagtgccttccacttacttcccatccaggtctcagaggtctcaaggccaaccttggaatccttatttaaccattcaagtaatcaacggaagttttcaccctttaatcttaagtttagccttttaagaaaaacagtaagcgatgactgctgaaaggctcattgtgtaatctcccaagggtttggtcttattccattttcttctggtcaccagatgatttcttcctttaccatcaaatacttcttcataatggtcacagtctgaggatgtgcgcaaattctggttcttcccaagctctaaccgtaacacgtcccaccccctttttaaagcacttactgttttcagagcacccatatcccaccctggtgagaaggccactctcacatctgagtgttgggtacaaagctgctccgtagagtgatgtgcactcctggtgggtgaggggcaggggcagtggcagtgtgcaaagaattgattactccttgcagagcctgtggcttgcatttcctactgctttctacgtttgaaaattatgacagtctctggctaggtctgggtccagattaggatttaaactgataaaggaaactgttggtaaatcctctgctcagaaagcatttatcatgttcctatttaaggattaggtttattaatttaggcctcttagaagctaacccacttaaatattactcttctgaatgctagttctcttttattcttgatgtcctaagtcaattgaatctggcatctggggctagggtctgcctgtctacatattttttatttttttctgagaaattctgaacacatagatctctttcctaaactgacattttctattttgactgttttcatactataaccaggtaaagggacttctttcagagagctttatactgcctgaccaaagaacaaatctgaaaatcaccattttaaagttattttttcagttgaaccaaagtttaagtgaagaggacttttggcatattatacccaggatcagtttgtctttttgtatccatcaagtattacaggagaaggattgggaacagaatggaaaaacagtgtatgaaagtcatgttacaggccgagtgcggtggctcacacctgtaatcctagcactttgggaggctgaggcaggtggctcacttgaggtcaggaattcaagaccagcctggccaacatggtgaaaccccgtctctactaaaaagacaaaaaattagctgggcgtggtggcgggcacctataatcccacctacttggtaggctgaggcaggagaatcgcttgaacccaggaggcggaggttgcagtgagacgagattgtgccactgcactctagcctgggtgacagagcaaaactgtgtctcaaaaaaaaaagtcatgttacacatttaagtttttgaaattgctccttttatcggtaaagattctcaatccaaattctcctgggtgtgttgtcatcagctgtgatatgtttgtgcacattacgtatagcagaggatgtaagcaatattattgtttgtgaagttttgtttttaatgtcttgagtatgagttatgtttagtcactgtcagcatctgagaactttaataagcccttgagatattccaaagttttattttacttttttaaagaacagaaaaagatgaatgaaagaaccaaggagagatgcagagactatatttagcatgtataggttaaagtaagaaggaggttgtggtaactaaataggagtcctataaaatcaaatacattgtcaaccttttctgcacatctagtttcctaccatagaatcccactggaataccacatagcttttgcactgcagttactatttactaatgtaaacgtagggtttgtaaaagtcacaaacttgtaagcaatgaacttacctgctagtctttttattttggcttgcatgaagtcactgcaaattcaaatgtcagtaccggcatttaaaatatatctatatcactttgttggtacaaagttatttcaagataagtgtaattttgttacaagtttattttgaagagacaaatctcctgtgatctatgcaggacctctgtactttctaaagaacaaaatgttatgtagacattatacatggttggttgtctcttcttgaaactgtaatgtaaatctagggtccagtcatatcctaggtatcatcatttatccaagtacttggaggaatacaagtatatataaatacagtcattgagaataagtcgatttgaggcatacaagagtagtttcttacacagtttaacacggcctgattcaagactctgataggattcaaacagataccggttaaccatgactaccaaaactgatcatctgagtcgattgatagaggtgtgactagtccttagcactttttctcattcctctttttattcagcattgctgttacctatttcaggtttataagacctctttcagcagatcacatcagaagccaggaaatgcatagctaggagatgtcaaaagcccatatgaggagtggaccaagcagcagtggcggtttctcctcgcatctttttttttttaagctttaacttagcaggggcatggactttatagcactttttcaactttttgctttgctttggataagaaatccttacctttaaaaaaagcttctagtctccataacccccaaagtactgcttatttgtttgaagaatccagccatcgtagtgctttagtcactatcgtaaacattcatgatagggcaaggattttaaaacaggattcttgcttctgtagtcatcaaggtgaacagaagcatcctacacaaccactaagggctctatgtttgtgtcatgcctcttcaaacaccaaggagttgaacatgcttccagtgatttgtctccgtaatgccttcttcctttatttggcctttctttctttctgtaccttcaagttcttgatttttaaaattccaactctagagaaaaccaatatatggtggtgctgggctttgaagatagcatatcagacgccttggttctgtttgtacacttagccttacatttcaggaggaggcttttcattaggggcttaagctagctcctttggcttttaaaaamaattttttttcaaatttcttcattacctaagggagcctgcatctaaatttctcaactagttcagcctagctgaattttctagtgtgtwatacactttgcttccttcttattgrtgaaaaccagggggatgagtggcttccatggagagatttcctgatttctcagggaggaaaaaagtgatgacatttaccactacttttatgtttttcccctttttccaaattgataaggatttctggttcctagtgatccgggattgggcaacagtgcagaactgccagtcatgccgtaggccgtgaagaaagaatgtgagtaactgttgttttgcaaggatttgtagggttatgggcagttgttgtttgaagcattgctatgacctaattcccaaggtatctttcctctcttggtgttctaggtaagccaatgagctttaatctctacttgctataaccgtgtgcttagaaaaagaggtgagagtagtggttttccttcaaactgtccacattcatgaagattatgaattgttaggacagccagggcaagatagaccctgtctctacaaaaatttttttctaaattaaccgggcatggtggtgcctgcctgtagtcccacctgtgtgggagaatcacttgagcctgggaggtcaaggctgcagtgagccatgattgcacccctgcactccagcctgggtgacagagtgagaccctggctcaataagagggggaaaaaaaattgttaggagctgggtgcggatgcagcctgcaatcccagctacttgagaggctgaggccggaggattgcttaaacccaagaatttgagcgtagcctgggcaacacagcaagaccccatctaagaaaaaaatgttttttaaatcagcttagcccaaaggggttgtgaatggggaggtataaaaagcaaakattattttttggctactaagccaagaacttacagggattttttttttcagtcccagaacctacagataccctgctacttgcttcacgtggatgctcagtgcccagcagccatcttaatacattaaaccagtttaaaaaataccttccatgtggagaaaaacatgtctttttctcgcctcaactttatccacatgaaatgtgtgcccatggctgggcgcagtggctcatgcctgtaatcccaacactttgggaggctgaagcaggcagattgcttgaggccaggagttcgagaacagtctggccaacatggcgaaacctcatctctactaaaattacaaaaattagccgggcatggtggcacatgcctgtaatcccagctacgtcaggaggctgaggcacaggaattgcttgaacccaagaggcagaggatgcaatgagccaagatcacaccactgcactccagccttggygacagagggagactctgtctcaaaaaaaaaaaaaaaaggtgtgcccaggcccctagccattgccatgtgcccagccagagagccaaattagagggctggcttccctatcacacagaataaatgctagtgctagccaatgatccctttgcttttaatgtatagaaaatactgttgttccttttgtcatttccagtgacatctgttttctaagcagctcttttctagggaggaaaccaaaggggctaggttaagaccctaatagaaatgttttttctaatctctggtgagtctggaagtgtcacattcacagtccacccttgggagtggcttggtggagctggggacaaggttttgtttactacatagtgcacatgataaatggccttaaactgtgattctttctggtaggataagttataataaactgaccctaaagaatgcaatggcttttaaactgcagttactgtgttcttaatgaagsaatacccaaagctctgttcttttggagcacttgaggggagcttgaatgaaaggtgcagataagagcagtaccttgatcttatgctttctgagtgtcctgccttgttgccatctgcatggatgagtgaatgcttctatgcacgaggagactcaagccaactcrgagtctgctttttccaacgctcttcccaggtttcttttgcaaagcttggtcatttggcccaggtcttcctggaaagtggagtacatgtcactgactagggtggcgtggtgtctttacccttaacattaagtcttgttacctcagtgatgtgaagccaatggttggaattataaaaagcatccttgctggttcttcacaggacactggaacccaccctgtcaattcagctagcatgtccacacagtcttgatgatccctctctgtaacaggcagctaacattaagagaagggggaaagagaagaagagagcaatagcttatgggagagctgagatcttacttcgttgacccatatttttcccctgaccaagttacctgtaaactggaatttgcaaggggatgctgtgatgataacccctttctattgctgtaatgttcatataacctgggaaactgagagaaggggatgtgtaaataaaagcttaaacattttagtaatgtgttaaaatgtcactctctcttaccctgtttcccttttttgccagatgatgatttttttatttttattttgtactttactggatgactgtgaagcgatgagtattgggttggggtaggtgtgttgattttgagagtgcatgttaagaactgaaggggaactacttgagatgacttaagaagcatcccatgcaaatatcttkttttgccctaataaaatattcagaaagatatatctgcctttattcattcaaccaatacatattgagtgctatctctctgatgggcagcacactgagctttgtggttcctacttgctagtaaacagataagcacatgaacatacatgtcattttacaaactgttaagtgctatggaggaaaagtaaagagcttggtaaaagtaaccaggccgggcgcggtggctcacgcctataatcctagcacttcaggtggatcacttgaggtcaggagtttgaaaccagcctggccaacatggcgaaatcccgtctctactaaaaatacaaaaattaaccaggcatggtggcacgtgcctataattccagctatttgggaggctgaggcacgagaatcgcttgaacctggaggcagaggttatagtgagctaagatcacaccactgcactccagcctgggcaatagagcaagactgtctcaaaaaaaaaaaaaaaagacagtaaccatgatctggtttagacaggggtgagagagaaaactgaggacgtggagggtctgaaataaagtacagttggagcttgattaaaaactgtgtggggaggtgaggtagtggggaggtggtagaggcagactcactgggctttgtagatcttggtgaggtctttctcttatgcagggggtgggggtcagactagtgaaagggctgggtttttaaaaaattttttaaattattacctaaagtggagacagagtttcactgtgttgcccagtctcgaattcctggcctcaagcaatcctcccgtctcagcctcctgacatactgggatgacaggcatgagctgccacacccggcccagtgaggagtttaaagtatggaaacagataactctcagtgtttttgtagacatggacaatttgataaagtttatatggaaatctaaaggacctagaatagtccaaacaattttggaaaagaacttacactacctgatttcaagactttctgtaaagctacagtaatcaagacactactgttggcattaagatagtcatgtagatcagtaaaacatactagagtccagaaatagacccacacatagaaggttggttgattttcaacagagttgccaaggtagttccagtggggaaagtacagatacttcaactaatggtcccagaacaactaaatatccatatgggcagaaatgaccttcaacccttaactcatagatatacaataattaattcaaaataaatcacctgaacacaaaaattaaaactataaaatgtctagaagaaaacagaagagaaaatctgtgactttaggaatgatttctgaggacacaaaaagcattattgataagttggacttgatcaaaatgaaaatttcaaaagactgaaaatgaaaagcaaaccccaggctggagtaaaagattcagaatacatgtatttgataaaggctttctatacagactataaagaacccttaaaatttagtaatctattcataaaaaaatagataaaagatggaaaagacatttcacaaaagaggtaaactaatgtcccataagcttatgaaaaaatgcttaacataattagtcatcagggaagtgcaaataaaaactacaataagattctaccaccccagcctgggcaacatagcaagaccccatctctactaaaaaactgaaaaattagccaagcatggcggtgcatgcctggagtcctagctactcagaagtctgaggtgggaggatcctttgaacccaagagttgaaggctacagtgagctatgatcacaccactgcactccaacctgggagacagagcaaggcactgtctcaaaaaaaaaaaaaaagcctggcgtggtggctcatgcctgtaatcccagcactttgggaggctgagggtggcggatcatgaggtcaggagatcaagactatcctggctaacacagtgaaaccccgtctctactaaaaaaaatacaaaaaattagctgggcatggtggcgggtgcctgtagtccccactactcagaaggctgaggcaggagaatggtgcgaactcgggaggcggagcttacagtaagctgagattgcaccactgcactccagcatgggcgacagagggagacgccgtctcaaaaaaaaaaaaaaccaaaaaacaaaaattctaccaccactcccaccagaatggctgaaattaaaaagaattacaatatcaagtgttggcaaagatgtggagcaactggagctctcatcagttgctggtgggaatacaaatggtacatccacgtgagaaaataatttggcaggtttgagacagcaattccactcatagataaatttaaattttttattttaaaatattcatctatttattttgagactgagttatgagactggctaatttttgtatttttggtagagacagggtttcgccatgttggccaagctgctcttgaactaccgcgctcaagggatctgcccacctcagcctcccaaagtgctgggagtacaggcgtgagccaccacatccggcccacttatagatacttaagagaaatgaaagcatgtctgcatgaggacttacacttgaatacagtcactattcataaccagaaacaaaaaaccataatggtgaatggataaacacattgtagtatgtgcataaaatggaatattactcagcaatgaaaaggaacaaattactgatacctacaagatggacaaatctcggccacatgctgatgctagtgcacgtggtgtatgggggaaagaaacatgatgagagaaagaagccaaagaaaagaatacataaatattccattgatacgaaattctacaaagggcaaaactattctatggtaacagcaggatcaatggttgccaggagccaagggtagaaggaggtagggattaactatacaaagggactattaaaatgtaattttccaaaaagcatgaatcggcggggcatggtggctcacacctgtaatctcaatgctttgggaggccgaggcaggtgaatcacctgagttcaggagttcaagaccagcctgacgaatatggtgaaactaaatctactaaaaatacaaaaattagctaggcatagtgatgtgcgcctgtagtcccagctacctgggaggctgagacaggtgaatcgcttgaaccctggagatggaggttgtagttagccaagattaagccactgcactccagtatgggtgacagagcaagactcagtctcaaaaaaataaaaataaaaaaaataagcatgaagtcatgtctcttatggatataaaagtgaacacgtgttaggccaggcatggtggctcactcctgtaaccccagctcctcaggaggctgaggcgggagaatcacttgaactcaggagccagaggttgcagtgagcggagcttgcgccattgcactccagcctgggcaacagagcagattccatctcgaggaaaaaaaaaacaatgaacacgtgttaaagactttacttattaatgaggaaactggtaagggcattaaaaccaattcaaaggagatattgaaaaaccaacatttataaatcaggaatattgaaattaatgtccaaatgaaggcaaacttgtttcttccacactgggagaaggaagtcaatcaaacttctacaggacaggacagattgcacgtttctatggacaagaattttgtttttgctaccagttaacctacaacctacagagcagtagttcaaaggcaatgaaagactagaatcaaatagcctggaagcatgtacgctatgtacacaacgcagttttccactggtgcacagtttttttctacagcgcacagaaggaaattggaatggtgggaaggttctacatcatgattgtggtggtggttacacagatgtatacatttgcgaaaactaaatggttcaattaaaatgggtgtgttttattatatgtaaattatatctcaatgaagcttattttaaaaaggaaaaataggccggccaggcgcagtggctcacgcctgtaatctcagcactttgggagctaaggcgggcggatcacctgaggtccagagttcaagaccagcctggccaacatggtgaaaccctgtctctactaaaaataccaaaattagccggcagtggtgatgggtgcctgttgcctgtaatcccagttacttgggaggctgaggcaggagaatcgcttgaacctcagatgtggaggttgcagtgagccaagattatgccattgcactccagcttgggcgacaacagtgagactctgtctcaaaaaaaaaaaaaggctaggtgcagtggctcacacctgtaatcccaggctttgggaggccgaggtgggtggatcacctgaggtcaggagttggagaccagcctggccaacatggtgaagccatttctaccgaaaaaaaaaaaaaaaaaaaagtttcgttgcggtggctcacgcctgtaatcccagcactttgggaggccgaggtgggcagatcacctgaggtcaggagttcaagaccagcctggccaacatggtgaaaccctgtctctactaaaaatacaaaattaggcaagcatggtggggcacgcctgtaatcccagctagctcgggaggctgaggcaggagaatcgcttgaaccccgggaggtggaggttgcagtgagccgagattgcaccattgcactccagcctaggtgacaagagcaaaactccatctcaaaaataaataaataaaaatacaaataaactagctgagcatggtggtgggtgcctgtaattccagctactagggaggctgaaggcaggagaatcacttgaacctgggaggcggaggttgcagtgagccgagatcacgccactgcactccagcccggggcgacagagcgagactccatcttaaagaaaaaaagaaaagataatcagcttcatggggagtgggggagggtaaaaacaagagtgggtgcagcaggaccaattaggctatttatagttgggggcgtggcttggagtccagtggtgatgctcttcatggagacaggtgctcatgaatgaatgaactcattgtcttccaagtctcctttcatctggtggaaggtgcaggagtgtggtaaaaagacaaaataataggcaggatgtaaaaatatttataccaaaaaaaaaaaaattcctgaaaaagaacaaggtggccttgcctttagtctagtaaatgcaatatggtctagcaggtgctcataaacagggtttctttaggctaacatttgagtgtttaccatgtaccaggcaccctattaggttgcaccatatgaaattgccaatattcgaccttttgaacaaaacatggcaacttcatatagttcattctaatacaaattctcaacatggaaacctggcttctcatttactcacatttacttctcatttactcacatttacttcacatttacttctcatttactcacacttctcacacttggtgcccaggtgagaggggtaacctctcctgctcccgggcccccacacttttacagatgacaagagcacgaagacgtcaaataatttgtccaataatatcacctacttggtaaatggtgaaagattccagtccccatggccgaatccagacccaggttgtcatccctgtgatgcaccattcaaaaccctgcagctgtgcccctgggaataggagtagttccagaaaagcacacagtccccccacagtcttactctaacttgacccagacccagcagtttacaccagtagctgggcttgctcttcatcctctctaccacccctggggatccaccaaccctgccctgaaacttgagtcatcctttgtgcgccctgctatgacccctgggtgggcatgtccccagtgccttgtgactgctcctcacccacctgtcccaacccctccccctacctggtgtcactgcgttcacattcccaagctgccccatccagattggcactgcctctcaagagttcctgatctttgccacaagctaaggttttgtgtcggttgctca

SEQ ID NO: 95039 - DNA, 22724 bp, Homo sapiens
aagccaaaagtaaatataaatatgacttgctttgtggctcggagccactctctccctttatgtcccaggatccctcccactctaccacaacctcagctgcattaaagactgagatgattaaaggttgggctgaggtttccatgtccctaaaggggactgaaggtcatacacacccatcctagtatgctggagagccccagggaggagaggggcaaactcagggctctgctggatatgaggtcccacatctccaccctaccatgtctcatggggggaaggatgtactacacacagaggttactgcagacactcaggactgcagggacagccatagcagtgcgcacaaggactaaagggaaaagggcccctaaccctgagggagcgacactggggaggtcgtgatgcaagcctagtgaagagctaaaggagcagaaaaagcttctccccactccctgcagccagcaccgccacactctccgactgggaaatggcaaaatctctggctggctgtcaccatagcccctgatgcaggccttctagacgcattagttcgaggggaaaaagtgtccagattaaactggtaatgtttgagccacgctccctgtagggaagggaagttaaagtgacattccaggcagagctctttgggcctcttcaatgtactattcctgtggcttccagtgctgaatgtatagctgatactgatcccataagtgtcgaagaggattatcctgggcaagggctgctgtgtgtagacaggtgatcctgtcctctcctggtggtccagaagaaaaaaatctacatccctggaagggaaaggaaataaatcacaggcttaaaaacttcgtggcggctgggtgcagtggctcatgcctgtaatcccaaccctttgggaggccgaggcgggcggatcacctgaggtcaggagtttgagaccagcctggccaacatggtgaaaccctgtctctactaaaaatacaaaaaggtagccaggcgtgataggggcgcctgtaatcccagctactcgggaggctaaggcagagaattgcttgaagccaggaggcagaggttgcagtgagctgaaattgcgccactgcactccagcctgggcgacagagcgagaatctcaaaaaacaaaaacaaacaaacaaaaaacaactttgtggctgctggagtactgagagccatgcaccagaatcacagtgccacctgctggacataggtaccaagcacaccctttttaaaaggacagctattaactccttagttaactactcaacactttgaaattgattgccagacccataaaggcctcaggactccctggcctagtattcccactttggggtgggtcaatgggaatctactgataacaagggaagggtttaacaagcctcactgatcctatggaaatagtacattcaagagtacagctggtaatcccagctattcaggaggctgaggcaggaggatggcttgaggtcaggagttcaagaccagccttggcaggatagtgagaactcagctcttaaaaaatctgttttaattagctggacatggtggcacgtgcctgtagtgccagctactcaggaggctgagacaggaggagcccaggagtttgaggatgcagtgagctatgattgtaccactccactccagactgggcaacagagtcagatctcatctctaaaaaaaaaaaaaaaaaaaaaaaagagtatagctagcctggccctagaggcatcttggttttacgtgaagaagtggcagctcccactctgggagaaacaaccttctctgctacctgaagccgagctgctgttcagtagggcccttgattcacaggggttcctgtaaatgcttaggcctggctcaccaatgattaggctgagttaaaagctgatgttgcccaccaagcagcagcaggcacttagccccaatgataactctggatggctgatggcagtaaggattgaagcatttggtatgccacttggaagactaaatactgagagatgaaagctgagaagtgtggaaacacatcatggctgcctgccaataggacagactggatcactcacgtaggtgcccacactaagggcaggtactctcgtaagactgactggaatcaaactgctgatccagcctgcaccaccaagactgctgccatagccacctggattcatgcaaccggtgtggaaacatctaccatcatgggctaggcacaacgtaagggactacatgtttctgaggcagaagccaccactgcgtgccagacttgtgactcctgccaaaagttggcctgcttgtcttgcagtaaaggaagccacattgcaaggggcactgaccacacctgctcctgggagattgacattaggactttgttcccttctctaggctctcatcagtaccttgctactgctgatactttttcagtttacagtgctgatgttgcttttccagtccaattatctgactctgtgtataccactgtggcccttgaaactaaactgccaggttttctgctttccaaaccatctacagtctgacactggcatatctttttgtcgcaatggccacccaacagtgtcaacagtcaatagccaaggtattcgatggacctcccacactccctaccatccacaggcatgacattgtcaagtactgaacagttccctcaaagatcaactcaaaaagatttttgattctatgtttttaacctcctcctggtctgcaaaccttactgaagcagtttggtcacctaaggcagccattctcagaaatgggtcatctccttttgcctaccaactgggtaatgatcaggaaaaaggggtggagggttatataaacctattttgaaaatgtgagattctcccctgaccatttctggccatgattcatctttcttcccccttacagaaagcccagatcagctgggaggaggaggctatctatgtaattcagacttaattctagttcagtcactagattgtcttgttggaatggcctggtgccagaacataaagttaatgatcatttggttgggtatagtgcttttaaagtccccctacagtggcccacatgtgtcaaggtagaagacataatgggcctctgtcaattttctaacaattggatattagaaggcctgcgtattggtaggggataaatggagaaaaggtgaagttatagttactagggtaggacacactcattatgtagcaatggaaggaaagaaacaatcctggcatctggggaaggaacaccacaggaccctggagatgtaaagagaagggaaacaatgttctctttgtccctatccagcaccaaagcctggcaaacattcacatggtccatctaggtcaagcagcaactgtggctggcaatctgacctgtggctgagtttgtcatctcactatgaaaacagaaaaactttatctagcaggtcagtataaaaaagaaaataaaaaaagaaaacaaaaactcacatggacacggccagtcttgaactattcccacgtgcctgatgacatcaacaccaactcccaaacgcagacctccctcataggtgtgcaaacacacagatcagcaccaccttctatcaatgcggctgatacaaatcacatgcttctcctgagatcctaagggccttacttaggttatgccttgtctagtgattgaggctgcaactgttcagtgacactgcccatgtggtttaaaccactgtaatggtaatcaaatttgatggtgatccaaataaaaatctaacaaaaatcctggagtggcctgcactcctccaagtaatatgttagtgtaaggaagaatgggtcacaaaatatctttccattaatcatggtagttaattttttttttttttttttgagacagagtctggctttgtcgcctaggctggaatgcaatggtgcgatcttagctcactgcaacctctgcttcccaggttcaagtgattctcccacctcagcctcccgagtagctgggattacaggcacccgccatcatgcccggctaagtcttgtattttcagttgagacggagtttcaccatgttggccaggttggtctcgaactcctgacctcaggtgatctgcccgcctcggcctcccaaactgccgggattacaggtgtgagccactgcgcccagcctggtaattactttcttaaaaaaatttttacaagggtagtgggctattgtaattactggtaatgacaccaaagatcagagatcaatctgaacccctgtgcacaggtcacagtggttaatagactggtcttagactgcagcccagatgtctgaaataagattcctcggtgcccccaggacttattcacaagtggctgaatccaggaccctggagggcatggttgaggtaaatactgtaagctggccttattctgctgcttagagtcccattgacaacaaccttaattaaatgctgtaagggacaaactgaaaagatgtgagtagccaggggagttgtatattcatgtgaaaatctgctagaagccaagaccatagaatcgaggagtgagagaggctgtcagattgctcgtgcctctacacatcattctgggtataccaagaatgcaaggccctgactgcatctcacctgggccatttctcatggttgtgtttgcagcaagcaactttgagagaagaggcagtgtctccctccaggacaaagaggaggtctgcgtactgccttctataaaacagcagattttccaagcttgtcgttccttcacttggatgcaacccactgcctgtgcagtcatccatttaaacccatagcgtcaccctgtgggacttggatggcaagggaaactgcttctaacatgcatcctatttcctgtaataaagtcctttgtctctaacccaggagtctcatcttctgccagcagtcacgacacaataacaagctaatttattaatttctaaataaagcaaccctgacagtctgttttcttgcctgctttttgcttaaagaattccatttctgacacccagtatctggatagtacaagctaaaacctttaagaaaataaatctcttctcacaagaagagttctgcctcataaaatcctttggtcaccatacctgaacacccaaactgtccttgccctataggataaaggtacacagttaggtattttctcctctgttgatgcctgaaaatcctgcagacataggaactcaggccttagaaaattctgtacccaaaaatttgcaattctctttggaaagttgaaagcacctttaaaagccacaatttgcaagccaggtgatgcactgtagcataacctggaagacatgagggctgcttcctcagatactaagaatcccactgccccaccaccagagcaaaacgatccccctcccagagaatgcacctcgccagaggccaacccacccgatacctcaagttcccctccaccgtggccctcctcctatagatcccgccccctccgtaccctcgggccaatcagagggcggcgtcccgtcgcggttgccatggtgcccgccgagtccctcccatcactcaccagatgtgcggcggctcgtccaagcggtggaagcgggtggcgaaggacagcagcgtcaccaaggccagcagggcccaccagccgaccgcctcgaagcgccgtgagccccaagcaggccgtttggggcttcgcgccacagcctcagcggccacgtcccggcctgcggccctagcagcctgggggccacagcggcccctccggggacgcagctcggactctgccaggcctccgcccgtggccggcggcatcttccccctcctctgggtcgccctccggcccggaggcacactttgtctgaccagccgccccgccaaggagtcacaagagggcagctcggggtaccccgggaaatgcaacgcccttcactgcagcggagcgcggggccccgggctcggggcggggcgggcagcgtggtcgcggcccgggccgctaggaggcggcaggaggcgcagagcatgtcgggaccgggagggccggccggcccggggcgggggggactgggcaggaggggtcgggctcagggaactgcaactcccagcagcccccaggtacggggcgtggcgggagagctgggcgagccagaggcgaccggaaggatctttctagtccagcccctcgctttacccggacgaaagacacgggcctgattcgtcgagtctcactgagccttagtcgtcggcaggtcccaggcgcgaastttctcggcctggaggagggggtcgcgygaagtgccagatgcaggcggggaaggtctgtgacgcgcacccgggtggaggraagctggttagacacctggagaccctggggggcggggtcagaagtgagctgcaccgcccgcccaggccgacaacgactcccggcatgcagtgctttgcgccgggcacgctctgcgcctgcgtgctgcscgctgcccgctggkgctcgaagttscgggagggttgggccagaggaggcggtcctggtagggagtgcgtagcagggtrgagtcgctgtccggtcgcgcttcacttctgctccgccctccctgctccccataacagacccctccctccactaaggcttccaaacgtcgccccaagcctcccaatttctcgcagcccttcatgctcttctcttggccctagcaggaggtgaccttccagtaatgtttgtattttaagagtccccgggccgggcgcggtggctcacgcctgtaatcccagcactttgggaggccgaggcgggcggatcacaaggtcaggagatagagaccatcctggctaacacgatgaaaccctgtctctattaaaatacaaaaaaattagccaggcgtggtagcgggcgcctgtagtcccagctactcgggaggctgaggcaggagaatagcgtgaacccaggaggcggagcttgcagtgagccgagatcgcgccactgcactccagcctgggcgaaagagcgggactccggctcaaaaaaaaaaaaaaaaggccccgagcgaggagaggcagtcatgacaatcacctggggagcttcacggctttcacatgttcttcccggggcctgctccagagccactctgttcatctctggtggaacgggctcgagaatctgcatgtttttataagcggtctagatggttcttaacgtgccatgaagtttgagaaccacttttgtggcactaaggaaggtggcacgttagatgggactttgcgtcacgttaataatgtatagtcctccctcttccaaatgggattttaggagtctttttctcaaatcatgtgtaagacatggtttaaaaataaaatctgctaaagtaatcagaatgcatatttgaattggaarcacaggtcttctaggagtgctgatgagatggatacttgggcttaaagtttagttctacaagtgcagaaaggaayggggcatggtttacatagttatcactggtaagagaaggcagaaattgcctaagagatttcaggtttcctgcttgtgggtcgtgacggagggcagcagcatttaccatgcttctggtcactcgtagtacagatccaaaggtgtaatccaaaggcatttagccattagrtaaggcatttcttcagggattctaagctaattaatgtctgccacactctagtggtcaccagcagtccctrtcccttggcaccaggagtccctgtagcctggctaggtaaggaaagggagttgcatctccaaataaggaagatccagttgtggccacccaattcctcctcttcgaaagacactttctgcccatcacctgctttctgtgccaggaccatctttactttctccacaaaaggtaccttcaggacaggctgggactgctgggcttgggaaccatcttggaagggcctaggttcccacttacacccttgccatctagcagactgagttggtagtacagggatggcaatagcaagttcagagagcagcttaatatgctaggggtggcagaggggagagggagctttggtgaaatgtctatagtcagaggggtagtaaacagggcatctgagaagttctttcaagttctccccyatccatagggatacacaygttttggtgggaagattcatgagtgctaatcactggcgagtctttcctgggttccactttgaaatgctggctcccgaagaagtaccagagaaattaactttgagccccttaaaccttggagtagagatcgcacacccagctgcccccaagggcccaaaggtaacaaaaatgagaaaagtgggccagatatgggccatggcagacctgagagcgcatacgctggttgatgggggccattagtctgttcccatcaattgctgctatttaggaacccaaatctgtctccagatttttttaaagaaaaaaaacaaacaggtgttgtatataaaatatcatgatttttatttttattttattttattatttatttattttgagatggagtcttgctctgtcccccaggctggagggcagtgacacgatcttggctcactgtatcctccgcctcctgggttcaagcaattctcatacctcagcctcccaagtaggtgtgattacagatgcacaccaccacacctggctaatttttgtttagccatgttgtttcgccatgttggccaggctggtctcgaactcctgacctcaggtgatctgctggcctcagcctcccaaagtgctgggattacaggcatgacccaccatactagaatgaaatgtcctgatttttaaacattggcaactacttgaaacattttaaactactgtgttgagcaaacagaaattctgagggccagatagggccccagtgagctgccagcttttgacctcacctttggggtgagtgagcatatctgccagctgtttttatggggacagccgagagcccggaggactgctgggaggtggggttgaaggagatatgtaccaaagcgtcaaaaaattagaattccttgtcttgctgcattgctagaggatgccctgccatcattttagggcaacctttgttttacaaatgagggagccgaagatttaaaaaggcagaggtttgtccaaggtcatgcagagctggttcctgcaccaggtccagactccagatgccagctcccagcccgctccaccactcaaaatactgcatcaaaaccargccacrctctgttggggggacaccaaacctggccccagcaggagcgtaagaaacttcctgcgagttggaaaaaaatgcctttttttttttttttttttttgagacgcagtctcgctctggagtgcagtggtgcgatctcggcccactgtgacctccacctctcaggttcaagctattctcttacctcaacctcctgagtagctgagattacaggcacccactaccacacctggctgatttttttttgtattttcagtagagacagggtttcaccatgttggccaggctggtctcaaactcctcacctcaaatgatccacccaccttggctcccgaagtgctgggattacaggcgtgagccactgtgcctggccagaaatgccctttctgaccagagtcaaagttcccccaatgcctgggtagcccagcttccccattggctcctgaaatccacccctttaggtttcctttccctgctcagaagctgtgccagaggggacatttcctgggaggctgagggtcaccacgrtaccatgacagagtckggcaaggtatggaaggcactctcaggctagctgcccctttgggggcctcttggacctcaggagctcaaaccagcataattttggagccaagggacctcatgagcctctcagagagcttggagtctgccctgatttgcacagatgcaggcctgagagaggaggcctggcaggacaggaagaaatggttgactcctcccaagctggagcccacccagcatgggttaacacgcgccttcatcctctctctcctcagcccatcctctattcctatttccgaagctcctgctcatggagagttcgaattggtaagagatgtgcctcctccaggatgagtgctggagtggggtggactggggcggataagcccgggtgcaaagctggcctgggatggaagggttgctctgtcagagaggacctcacccccagcaaccagcatcccccggctcctagaacccccatccctgcatggcatctccaccccggaaacacagggtgagggtgggaggaagggggttgttttttcccttgggactgacacttctcccaacactgctctccaragccccttggcaaccatgtttaaagcagggtcacaaaatccacatgcccctggtaactggcaggggaacagctggcccttctcagttcttattttatttgaactggcaaagcaaacagaacgggccagcatcagcctcggaggcttcagaaaagcagaaacaagggccctgtggctagtccttgtttgacccttccctcccttggcttaacacagcctttggcaaaggtcataaccaaagcagcctgtactgaggaaaagctctgtgctgagtgcttttgtgtgcctgattccatttaaacctcagcaaccctaggagggaggtactattattactgtccccattgtatagaggaggaagctgaggcacaaaaaacaggcaacattcagtaacttgcccaagatctttcagttactaagaggcagaactggaatttgaaccaggtagtctggctccagaggcccattaagttacttgcccagggccacacagttagcaaatgactgtgatgaaatttgaacccaagaagcttgcctccagagtgtggaggcaaagccatcctccgtgacccctcctccatcccatagtcacttggtatttgctgggatcagtaagcaagagcactgggtgccaggagaaactttcctccaagaagatgaacccatccctgggcgccagtacctctgccctggctgagccagaagccggagcaatataggtgctgtctgtacggcctgtgtgctttggccttccctcctccaggtgtctcctccagccccaaacactgtcactccccagactggagctgaccaacactaggaggagcctggtattgcccaggctctccacaccatgacatgtctggtcctcctcccctcattcctttgcccttccctgagattggccatcaccatacttgaatgcccaagtgtgtgtaatacacacatgcatgcacacgcacgcagtcttctccactagtgttgacccacccaagttttttttaccctcagcttgccaggggaaattatcaaaagggatggagaggaaatctggtgactggagtcacggcaaatgctctgaggccaccaaagagcctgatgcctgtctagaatctctagtaaacagccctgagaacagagagaatagattggaagagattcttctccaacagaacaagagtgccatctgtctgtgtgtgctgtgtgtggccacctgagctccttcccttggcccttagttgccttcttgagggagtaattgcatgtcttcaaccaagacactggtcaccactgtttaaggccctgsgggggcagagttaaacacaacacagccttgctgaactccaggagcccacagagtgccagggcatacacctttatcaccawccagggggcatgagggccccattgggggggtccagatcttgaggtctctaagagttcaggggtgagtgaggcagagcatcgtgcatctggggtagggagcaygtggtgacaaggaaagctgagagaaggggatagtgccacggtgagccttgaccacccagaagtgttagagaagcctccccctctttggccttaatgtcaccttagaagggctctttcctttaagagtrcggcragaggctgttctttgactccgctatgtgcggtctctcctagctctggccttgaaaggcatcgactacragacggtgcccatcaatctcataaaggatrgrggccaacaggtaagaaggctgtgcccagaccacaatgtgggaattggaggccttgaacaggcaccaggcaggggaaaaaggggaggctctgccccaragaagtgaacctgtgtcttgtggactatcactgcaggaggctgctggctctcccttgtgggacaaggtggcaaggtgtgcagtagcaggaggcctgggaagggcccaggtccagactgtgtaccctagcctgggctctccagtgcctgacmctgggaggtgggtggctagtgggtccccaccccatactgggccctctggatggctgactagggtaggagctgccttggtggccacggtgtgagatgcagggaaagcccatagccaggctgttaggatgaagcctatggctcagcagcagctgggctttgggagactgcatggatcccccagggattaccctgggcctaggatttagggccttcccagggaagggagatgggggtgggtggcaggcctggggttctcctgcttgcttggctttcctctggccaactcaggccaggccacccagcccaccagggccttgtctccacagttttctaaggacttccaggcactgaatcctatgaagcaggtgccaaccctgaagattgatggaatcaccattcaccagtcagtgagtgcagggcctgggggagggccctcatgagagcagtgccctgaatgagagcgcctgacatctcttcctcgcctgtgtacagtcaaggtgcctagcacataggagaggctcaatacaagactcgtggggagggtgcgaggttatttaggaaaataagggaagattcaagcacatggagaaccaagttctgcatgataaggtccaaaaaggcttatagggcttgagctgagcagaagcaggggggaagaggtgtagtgatggtgctggaagaggagaaggaggagtttgctggcyctgtcccctctggtccaggggtcctgggccctctccctgcctcactgctcccctctggacagctggccatcattgagtatctagaggagaygcgtcccactccgcgacttctgcctcaggacccaaagaagagggccagcgtgcgtatgatttctgacctcatcgctggtggcatccagcccctgcaggtgtggcacttgtacacttgcacccttgcacacctgacacactcttacactcacacattggctgtgagctgcccagtgtgggggcgggggtgtcaagggagggaggrggattctcagggcctctgacctggaccatgtgaaagaagggggtgaagatcgcaatctcagaattcagccccccagcgggtcccccgctgcgttccgagaagctctagtttccaaggacgcatgtacaggtgcttggggtggggaaagggccagaatggcaggggagagactgagcaggccccagtccaggcctcctgcctttaaccagagcagcttccgtttcatctgtgctatctcagtcatatactgggatacttgtaggattttattttttaagtgtcactgttaaaacagacaactaagtattaaaaacagttcatctgtgccagcttctactctgaatgaggaaatagccccagaaaggtggagtgacttaggagtcccacaggtaggtcataacaaagtggggactaagtcagaatccctgcatgcctatgccctctacccgcatgtcrctttaacaaaggatgttggagcagacagacatctccattttataatgaggaaacagagggaaaatggctccaggggtgccaagatggagccaggctggaaatctctggaagccggtcttgtggacctccctcatcccagccccaccctctttcacactccctctcctcacaagggaccatgcaagggagaagtgagggagacaggcctcgagttgtgggcacacctgccacagccatggccgcgtcctgtgtcacatgaatagggattcttgcacatctctgacagaatcacgtggctttttgaggccactggggcagcctgcaaaggtggctgctgggatggctacctccctccaacctcagggcccttggttgaaggaaggggctcatggagcctgggggagaagggatagacatccagccaggggcagatgggaagtgaacttccctgagggggtttggcgaaggggtagcccccacccagctgtcagcgcartcacagattttctttgggctgcacagaacctgtctgtcctgaagcaagtgggagaggagatgcagctgacctgggcccagmacgccatcacttgtggctttaacggtgagtcctcacctctgtgagctgccccacagtggcctcttagaggtatggccctcgcacacaggggcctgggtatctgaaccagcctcccagrctgctttgggcctgacagttgcatggatgagggcaggactggggaggcaatgggctgggtgggcatccagaccttagctccagcacttctgggaacctcggtccctgagcccacagcccttcatagctggatggcccaacttcagcttcactgcctactccagctgggaaaccaaggccagcacagcgccagccatcagagtgagagctgtcaccgtggccagtggcagggcttgtccactcgagtggggmaatggtgattgtctgtgcggagcctcaggaaacagcagctcatccctaacagctctctcgagacctggctgccacattctcaccagcagccatgcccagtctgtcactcagttgggcgcccatttcataactatggaggccaaggcccagaaagctttgtgtcccctccctgcgcccagaataagatgtttatgtggcctccccacagccctggagcagatcctacagagcacagcgggcatatactgtgtaggagacgaggtaagctgtccccagacctccccaggcccagccacagtggctgcctccctcatgctgacctccctcaagctcagagcttcctgagaaggcgtctgcagggggatctctgtgccatggggcactcctcagctcactcccactaaaccgtcttaagagggagttactcaargtagaagactggctgtgagaggatgaggcgggccagcatcagttgagggattgtgctagatgatgtctgcgcagtcaargcaatccatcttctctggccctctcaacccacagagttggttgtcagggcaactggagcatggcctgggagggcacttcagctccgggggacagactcatgcaggcctagggcagacaagaattggaggtgggatgggtgaaagagccgaagcagattgttggtacccccagtrgagtcgcagtggacacacccagtccagccactgactctggggtatgcaccctgatgggaacccaccggracctctttcaggtgaccatggctgatctgtgcttggtgcctcaggtggcaaatgctgaaaggtaagagagagccccgccaccctcccttctcgtggctctgcccacagtcaggcccyactcagctggcgagatagcatctcatgcagacrcttcgccaaccagccaaggagcccaccatgccaggccacatagccacttctgcctggaagagggcagaagaaattggggcagtgctcctactacgcccaccacagcccagatgaacctgwatagatagccccagctcctaagaggaggtggctcacctggtggacccccaagagcacctgcctgatgtcctcaaatgtggtgtgtctgtgagcagtagtgagctctacctctgcatccttccgtgaaccctttggtagggcacaaatgagcacctctctggaaggcatcatgctaggcgttagggatatggaaacgtatggcacattccctgcccccaagaagcttacaacatgggggaagagagtctgtatatataaatgcctagcactgggccttacacatagcaggttcacaaagaaataggaacagtaggtaacagatgccaaatgatactgcacaagacctacccatcccctgtgaataagggctgccccatcgtccttccctggacagctccctcgacctcatccagccctgcctctctgctccccctgctgcatcagggcagtctccctgtgtccctgaaaaccttagcttagcaggtgtttctctactacagattcaaggtggatctcaccccctaccctaccatcagctccatcaacaagaggctgctggtcttggaggccttccaggtgtctcacccctgccggcagccagatacacccactgagctgagggcctagctcccaaatcctgccccgttggcacagggccacaggagcagaagctgggtgggctgaagaggcctggaaacgagagtcttaattgaggagrtgggagactcgaactctagccctggatctgccttcctgctgaaacttgttccacctcagtcccctcatctgtcacacgcatgtggggtggagtagggagatgcggggagcagggtgggcaggaatactgttatctatgtgacggggcagtcgtgaggctgagatgagaatgcggattaaaatgcctggcgtgctcaccgtaacaccacggggaaggctgtgtgccttttctcatccgcttttgttrtgtgtgactccaaagaatgcccgcgctgaaatttggcgtgaattaaactgaagcccaggcctctaccttgtttgtctaagactgagctaggttgcagaagatgaacactgtccctagctggaatcccctgtgcctggaccagtagaggaagtcagtcagccacttgcctaccctgtggcaggcctggcccatgggacctaagggcaatgatgagaaatatacccaaaagcctgcctgaaagaatcagacaagatccagggagataacagatagaagcaggaaagcatctagtgactggctgagttctcagggctaggaatggtaccgttgttaaatgttccactccaggctgggcgcagtggctcatgcctataatccctgcactttgggaggccgaggcaggtggatcacttgaggtcaggagttcaagaccagcctggccaacatggtgaaaccccgactctactaaaaatacaaaaattagccgggtgtagtggcaggtgcctgtagtcccagctgaggtgggagaatggcttgaacctgggaggtggaggttgcagtgagccgagattgcaccagtgcactccagcttgggagatagagtgagactccatctaaaaaaaaaaaacatattccactccagcactgagaggccatttggccctctcaaccagtccctcgtcttcagggccagcattctccagaccagtcccaggattaggcactcggggtaaatccagtcacagatggtgctgggaatgggaggcaggctcccccgtgggcagtgtgagcagctactgaccaggccagcttaggagaccaagcaggtagcagtgtaccacaggctgccctggagggagcaagttcccatgcttggcagtgttcaggcagaaccaggaccacctctgggcagagatgccgtacagagattggggtagcttctggggatgaaatgagatgactttttaggagctttacctcttgaaggccccacctctgaatactgttgtattggagattaagtttcaacatgaattttagaggggacataaacatttaaatcgtagcaaagaccatcacctttttacaggacattttccagtaggggcttctctcaaacggatgagtggtaagtcaagtccttcctttccatatcacactcagcagacacctgatcctgatatgctagaggcacagggagactagatatgtacgtggtcttcccagagtgggagtggccacagtgaaggaagaacaatgatggaggggcctgatactggtaattccaactctatggaagtaacaagtccccagaaatacttcaggaggaggaaagcagtagggaggtgctatcaggaaatacctgagaacaaagcaaaaattataggctgtgttcctcagaaattttacatatccattaaggaaagtggcaaacttactggataaacaggtgatacacatactcatactattttttttttatttttatttatttattttttttttgtgatggagtcttgctctgtcatgcccaggctggagtgcagtggtaagagctcaggttcattgcaactttccacctcctgggttcaagtgattctcctgcctcagcctcccgagtactgggattacaggcgcgttggttaagctggtctcgaactcctgacctcaggtgatctgcccacttcggcctcccaaagtgctgggattacaggcgtgagccaccacgcctggccaagatacggctcctcctaacttttagtgttttgtttttgtttttttttttttttttggagacagagtctcactctctcgccaggctggagtgcagtggagcgatctcggttcactgcaacctccgcctcccaggttcaagggattctcctgcctcagcctcccaagtarctgggactgcaggcccacgccaccacacccagctaatttttgtatttttagtagagacagggtttcaccatgttggccagaatggtcttgatctcttgaccttgtgatccacctgcctcggtctcccaaagtgctgggattacaggtgtgagccaccacgcccggcctagatattttatttaaaaaaaatttttttagagatggagtctcactgtgttgcccaggctgatcttgatcctcccgcctcagcctcccaagtagctgggccagctcttacttctaaacataacttatttagctcttgcttccaaggtcacagcaattctactttcagagaatactttgaactaaggatagctgctgagtttaagccagaagtgcacaggttaaagaacatcaaggctgaatgtcaagagctgtaatgtgtgagctgccttttgtaatcctgagctatgtcaaggtcaatgatatgacacatatgaatgcttttaaaagttaaaaaataatcttaaggccaggtgcggtggctcacacctgtaatcctagcactttgggaggctgaggcgggtggattgcctgagctcaggagttcaagaccagcctgggtaacatggtgaaaccctgtctctactaaaatacaaaaaattagctgggcgtggtggcatgtgcctgtaattccagctactcaggaggctgagacaggagaattgcttgaaccagggaggcggaggttgcagtaagccgagatcatgccactgcactccagcctggcgacaaagtgagactccatctcaaaaaataataataatcttaaatatattatgtgttcacagtgacatattacatccagcatacccaaacatgaatcattaatgatctccagctacatggaatctgcctgggctttttgttacttgtagggtagtttggtgattacattcaactgaattgtttcagatcccttctctttcatgcttcaacctctaaaatatgttgcaacagaaagcagagaatgatctaacaggttcattttagcatcacagatatcactgaaggaaatatttaaatgccacccttccctgctcagatgtgagtccttattctgcaacagacactagggatgtggagaggcagtgttttaaaagacagcaaagatatattatggtgtcactttttgtaaatgaaaataggctgaattcatatcacccagattacgttaatgattggcctggtatccgaagtcgaggttccaaatttgaacagaatatcttcatggggaaacaggcctcactgggaccaaatgctgacataaaactcagaacttattaatcatcactataaacccagtttttccattcccagttcccaggtcatgatactctgccatgaatttaaatgcagatgaaagatctattattaatcttattctcaattttttttctttttagttcttcttaactttcacaatcttaatagattatgaaataattcatatgggcttatagaatacctttcttaaggaagatacatgaaagacaaagaatttaaaatgtaaatcaggttcattaaaatataactcagatgttaccaggtgcatagtgaaaaagtttatttatgacagattcgaaaactcagaagagatgacaaagaaygcacaaaagcatcacaaaactgttacctaatataaaacgcaagaactgagctacttgaagaagcacagctcagaatcatcagtgtaatcgcagtaacacacccagtgccacagggtgataaaaatggtattttaaaagaaaaaccactcagcaggacacaagaattaaagtaacaatttggtaagactcttagaaatcacagatgttgatagcatttctcatsataggggacatgtaaaacaagctgaccataataaatgattagttgggatacttttgtattttaaagaaaaaagataaaacagtgacacggtttcccttccagaccctttttgtaatgtcagcaacagtacatgatatagaacagtaagaaaataatgtctttgtagttgccaattgcttaaatctttacgaagaaaacatgatcatctttcagtcaactgactgatctgagtacatggcaccaaagaaagcccttcagaaaatagaagctaaatgacataaagtagtttggaaaatcttcaagcacctccctttattccaattatccttttccaaagtctggctttcttataatccatcactttgattacaaaacagctctcttctgggaatttcaaaacacttcccgttacgttaagggaaaatgggtacaccagattcatgggttacaggattgctttctctagacttggcttctctttaacatggctaaatggaaataatttagcttggttaaatgaaagctacttcacttacaggataatctcaggagacatgagtggagtttttcatatggaatttcttagtaaaatgtactgtttaggatatgagagacggaattaagataatgttttccagatgattcttggcctgatcctaagaatcaacaataacaatcaatagcaaggaacattacacattcaaccctgagtgatgaagagagttcaggaagagagccccttaaactctgaattaagggctctttggtaatatcatatactataatatttcaaaccaaaacttcagaagggttcatgatcctatttcaggactttagaaaatatactttgtcctctggaagcaatttcacatatattattttgcccccagataagccacaactacctgcttaaatttttttttaaactatggaattaaataaacatgcatctctagatttctagggcaacttttcatcatatctttgaagagtcatgacattaactctggtccacatacctggggcctaaaaaaatcaggtacatataataggaatcacatcatgagcctaatttcaaagccagtgtcttgcctttggactgtgtgtgtgaggcatgcctatttgtaaatgagctccactatcattggttttaggcaatagtgttttcttagcttagaaatttcttaccttaagaattcaaacaggaggggctttgtttagccttcttggtttaggcagggacaatgcaacacttgagaggcagcagtgatttctgagcaaaattctaagatatattcgataggtttgctctcccctccccccatactcctaccctttgccccctaattttattttgttttccctcgttgtgatcaattttaaaagacagttctcaagcagcacaaaacggtgtaacttatgcccctcccttatgctccactaaaacaagtctcttatgtaaatattagggtcactcaattccacaccttagaaccactggggttaaaaggcaaccttctgcagataagtggtcttaacaaacaaatataaaagcagactttagagtctgggtttcaactaattctctcaaagagggactgagcaggactcataaacataaactcatattccctacagattaagactttttatgataatacctaattctactgcttaatataagacagcgttcagatttcactcttccatatacatattataatgggacaatatacacttttttaaaagtctgagtttttcttcccaaaataacaaaaatattttttaaagtgcatgtatcaattcattaagaaaaaaataactaagaatggtctaattccaaattgctacctacttccatgataaagctacctgttatctaaggattgagttttaatatcagagtcctgaggacatgtcatcaagcaacagaggttagcataaagcccttccggagcaggttcacaatcactcttgtactgacatgccagttagtaaggaaaacagcagagatcatggcctgagggaaggggaaaatacagcacagatgtattttcttgaaagatggagaccaagaaacaatttttttttttttgagacggaatcttgctctgttgcccagtctggagtgcagtggcatgatctcggctcgctgcaacctctgcctcctgggctcaagaaattctccctgcttctgcctccagagtagctgggattacagatgcccgccaccacgcccagctaattttttgtatttttagtagcgacggagtttcactatgttggccag

SEQ ID NO: 95040 - DNA, 58298 bp, Homo sapiens
atctcacaccgtggccaccaaggcagctcctaccctagtcagccatccagagggcccagtatggggtggggacccactagccacccacctcccagtgtcaggcactggagagcccaggctagggtacacagtctggacctgggcccttcccaggcctcctgctactgcacaccttgccaccttgtcccacaagggagagccagcagcctcctgcagtgatagtccacaagacacaggttcacttctctggggcagagcctcccctttttcccctgcctggtgcctgttcaaggcctccaattcccacattgtggtctgggcacagccttcttacctgttggccycyatcctttatgagattgatgggcaccgtctygtagtcgatgcctttcaaggccagagctaggagagaccgcacatagcggagtcaaagaacagcctctcgccgtactcttaaaggaaagagcccttctaaggtgacattaaggccaaagagggggaggcttctctaacacttctgggtggtcaaggctcaccgtggcactatccccttctctcagctttccttgtcaccacgtgctccctaccccagatgcacgatgctctgcctcactcacccctgaactcttagagacctcaagatctggacccccccaatggggccctcatgccccctggatggtgataaaggtgtatgccctggcactctgtgggctcctggagttcagcaaggctgtgttgtgtttaactctgcccccccagggccttaaacagtggtgaccagtgtcttggttgaagacatgcaattactccctcaagaaggcaactaagggccaagggaaggagctcaggtggccacacacagcacacacagacagatggcactcttgttctgttggagaagaatctcttccaatctattctctctgttctcagggctgtttactagagattctagacaggcatcaggctctttggtggcctcagagcatttgccgtgactccagtcaccagatttcctctccatcccttttgataatttcccctggcaagctgagggtaaaaaaaacttgggtgggtcaacactagtggagaagactgcgtgcgtgtgcatgcatgtgtgtattacacacacttgggcattcaagtatggtgatggccaatctcagggaagggcaaaggaatgaggggaggaggaccagacatgtcatggtgtggagagcctgggcaataccaggctcctcctagtgttggtcagctccagtctggggagtgacagtgtttggggctggaggagacacctggaggagggaaggccaaagcacacaggccgtacagacagcacctatattgctccggcttctggctcagccagggcagaggtactggcgcccagggatgggttcatcttcttggaggaaagtttctcctggcacccagtgctcttgcttactgatcccagcaaataccaagtgactatgggatggaggaggggtcacggaggatggctttgcctccacactctggaggcaagcttcttgggttcaaatttcatcacagtcatttgctaactgtgtggccctgggcaagtaacttaatgggcctctggagccagactacctggttcaaattccagttctgcctcttagtaactgaaagatcttgggcaagttactgaatgttgcctgttttttgtgcctcagcttcctcctctatacaatggggacagtaataatagtacctccctcctagggttgctgaggtttaaatggaatcaggcacacaaaagcactcagcacagagcttttcctcagtacaggctgctttggttatgacctttgccaaaggctgtgttaagccaagggagggaagggtcaaacaaggactagccacagggcccttgtttctgcttttctgaagcctccgaggctgatgctggcccgttctgtttgctttgccagttcaaataaaataagaactgagaagggccagctgttcccctgccagttaccaggggcatgtggattttgtgaccctgctttaaacatggttgccaaggggctytggagagcagtgttgggagaagtgtcagtcccaagggaaaaaacaacccccttcctcccaccctcaccctgtgtttccggggtggagatgccatgcagggatgggggttctaggagccgggggatgctggttgctgggggtgaggtcctctctgacagagcaacccttccatcccaggccagctttgcacccgggcttatccgccccagtccaccccactccagcactcatcctggaggaggcacatctcttaccaattcgaactctccatgagcaggagcttcggaaataggaatagaggatgggctgaggagagagaggatgaaggcgcgtgttaacccatgctgggtgggctccagcttgggaggagtcaaccatttcttcctgtcctgccaggcctcctctctcaggcctgcatctgtgcaaatcagggcagactccaagctctctgagaggctcatgaggtcccttggctccaaaattatgctggtttgagctcctgaggtccaagaggcccccaaaggggcagctagcctgagagtgccttccataccttgccagactctgtcatggtatcgtggtgaccctcagcctcccaggaaatgtcccctctggcacagcttctgagcagggaaaggaaacctaaaggggtggatttcaggagccaatggggaagctgggctacccaggcattgggggaactttgactctggtcagaaagggcatttctggccaggcacagtggctcacgcctgtaatcccagcacttcgggagccaaggtgggtggatcatttgaggtgaggagtttgagaccagcctggccaacatggtgaaaccctgtctctactgaaaatacaaaaaaaaatcagccaggtgtggtagtgggtgcctgtaatctcagctactcaggaggttgaggtaagagaatagcttgaacctgagaggtggaggtcacagtgggccgagatcgcaccactgcactccagagcgagactgcgtctcaaaaaaaaaaaaaaaaaaaaaggcatttttttccaactcgcaggaagtttcttacgctcctgctggggccaggtttggtgtccccccaacagagcgtggcctggttttgatgcagtattttgagtggtggagcgggctgggagctggcatctggagtctggacctggtgcaggaaccagctctgcatgaccttggacaaacctctgcctttttaaatcttcggctccctcatttgtaaaacaaaggttgccctaaaatgatggcagggcatcctctagcaatgcagcaagacaaggaattctaattttttgacgctttggtacatatctccttcaaccccacctcccagcagtcctccgggctctcggctgtccccataaaaacagctggcagatatgctcactcaccccaaaggtgaggtcaaaagctggcagctcactggggccctatctggccctcagaatttctgtttgctcaacacagtagtttaaaatgtttcaagtagttgccaatgtttaaaaatcaggacatttcattctagtatggtgggtcatgcctgtaatcccagcactttgggaggctgaggccagcagatcacctgaggtcaggagttcgagaccagcctggccaacatggcgaaacaacatggctaaacaaaaattagccaggtgtggtggtgtgcatctgtaatcacacctacttgggaggctgaggtatgagaattgcttgaacccaggaggcggaggatacagtgagccaagatcgtgtcactgccctccagcctgggggacagagcaagactccatctcaaaataaataaataataaaataaaataaaaataaaaatcatgatattttatatacaacacctgtttgttttttttctttaaaaaaatctggagacagatttgggttcctaaatagcagcaattgatgggaacagactaatggcccccatcaaccagcgtatgcgctctcaggtctgccatggcccatatctggcccacttttctcatttttgttacctttgggcccttgggggcagctgggtgtgcgatctctactccaaggtttaaggggctcaaagttaatttctctggtacttcttcgggagccagcatttcaaagtggaacccaggaaagactcgccagtgattagcactcatgaatcttcccaccaaaacatgtgtatccctatggataggggagaacttgaaagaacttctcagatgccctgtttactacccctctgactatagacatttcaccaaagctccctctcccctctgccacccctagcatattaagctgctctctgaacttgctattgccatccctgtactaccaactcagtctgctagatggcaagggtgtaagtgggaacctaggcccttccaagatggttcccaagcccagcagtcccagcctgtcctgaaggtaccttttgtggagaaagtaaagatggtcctggcacagaaagcaggtgatgggcagaaagtgtctttcgaagaggaggaattgggtggccacaactggatcttccttatttggagatgcaactccctttccttacctagccaggctacagggactcctggtgccaagggacagggactgctggtgaccactagagtgtggcagacattaattagcttagaatccctgaagaaatgccttacctaatggctaaatgcctttggattacacctttggatctgtactacgagtgaccagaagcatggtaaatgctgctgccctccgtcacgacccacaagcaggaaacctgaaatctcttaggcaatttctgccttctcttaccagtgataactatgtaaaccatgccccgttcctttctgcacttgtagaactaaactttaagcccaagtatccatctcatcagcactcctagaagacctgtgtttccaattcaaatatgcattctgattactttagcagattttatttttaaaccatgtcttacacatgatttgagaaaaagactcctaaaatcccatttggaagagggaggactatacattattaacgtgacgcaaagtcccatctaacgtgccaccttccttagtgccacaaaagtggttctcaaacttcatggcacgttaagaaccatctagaccgcttataaaaacatgcagattctcgagcccgttccaccagagatgaacagagtggctctggagcaggccccgggaagaacatgtgaaagccgtgaagctccccaggtgattgtcatgactgcctctcctcgctcggggccttttttttttttttttgagccggagtcccgctctttcgcccaggctggagtgcagtggcgcgatctcggctcactgcaagctccgcctcctgggttcacgctattctcctgcctcagcctcccgagtagctgggactacaggcgcccgctaccacgcctggctaatttttttgtattttaatagagacagggtttcatcgtgttagccaggatggtctctatctcctgaccttgtgatccgcccgcctcggcctcccaaagtgctgggattacaggcgtgagccaccgcgcccggcccggggactcttaaaatacaaacattactggaaggtcacctcctgctagggccaagagaagagcatgaagggctgcgagaaattgggaggcttggggcgacgtttggaagccttagtggagggaggggtctgttatggggagcagggagggcggagcagaagtgaagcgcgaccggacagcgactccaccctgctacgcactccctaccaggaccgcctcctctggcccaaccctcccggaacttcgagccccagcgggcagcgcgcagcacgcaggcgcagagcgtgcccggcgcaaagcactgcatgccgggagtcgttgtcggcctgggcgggcggtgcagctcacttctgaccccgccccccagggtctccaggtgtctaaccagcttycctccacccgggtgcgcgtcacagaccttccccgcctgcatctggcacttcrcgcgaccccctcctccaggccgagaaasttcgcgcctgggacctgccgacgactaaggctcagtgagactcgacgaatcaggcccgtgtctttcgtccgggtaaagcgaggggctggactagaaagatccttccggtcgcctctggctcgcccagctctcccgccacgccccgtacctgggggctgctgggagttgcagttccctgagcccgacccctcctgcccagtcccccccgccccgggccggccggccctcccggtcccgacatgctctgcgcctcctgccgcctcctagcggcccgggccgcgaccacgctgcccgccccgccccgagcccggggccccgcgctccgctgcagtgaagggcgttgcatttcccggggtaccccgagctgccctcttgtgactccttrgcggggcggctggtcagacaaagtgtgcctccgggccggagggcgacccagaggagggggaagatgccgccggccacgggcggaggcctggcagagtccgagctgcgtccccggaggggccgctrtggcccccaggctgctagggccgcaggccgggacgtggccgctgaggctgtggcgcgaagccccaaacggcctgcttggggctcacggcgcttcgaggmkgtcggctggtgggccctgctggccttggtgacgctgctgtccttcgccacccgcttccaccgcttggacgagccgccgcacatctggtgagtgatgggagggactcggcgggcaccatggcaaccgcgacgggacgccgccctctgattggcccgagggtacggagggggcgggatctataggaggagggccacggtggaggggaacttgaggtatcgggtgggttggcctctggcraggtgcattctctgggagggggatcgttttgctctggtggtggggcagtgggattcttagtatctgaggaagcagccctcatgtcttccaggttatgctacagtgcatcacctggcttgcaaattgtggcttttaaaggtgctttcaactttccaaagagaattgcaaatttttgggtacagaattttctaaggcctgagttcctatgtctgcaggattttcaggcatcaacagaggagaaaatacctaactgtgtacctttatcctatagggcaaggacagtttgggtgttcaggtatggtgaccaaaggattttatgaggcagaactcttcttgtgagaagagatttattttcttaaaggttttagcttgtactatccagatactgggtgtcagaaatggaattctttaagcaaaaagcaggcaagaaaacagactgtcagggttgctttatttagaaattaataaattagcttgttattgtgtcgtgactgctggcagaagatgagactcctgggttagagacaaaggactttattacaggaaataggatgcatgttagaagcagtttcccttgccatccaagtcccacagggtgacgctaygggtttaaatggatgactgcacaggcagtgggttgcatccaagtgaaggaacgacaagcttggaaaatctgctgttttatagaaggcagtacgcagacctcctctttgtcctggagggagacactgcctcttctctcaaagttgcttgctgcaaacacaaccatgagaaatggcccaggtgagatgcagtcagggccttgcattcttggtatacccagaatgatgtgtagaggcacgagcaatctgacagcctctctcactcctcgattctatggtcttggcttctagcagattttcacatgaatatacaactcccctggctactcacatcttttcagtttgtcccttacagcatttaattaaggttgttgtcaatgggactctaagcagcagaataagrccagcttacagtatttacctcaaccatgccctccagggtcctggattcagccacttgtgaataagtcctgggggcaccgaggaatcttatttcagacatctgggctrcagtctaagaccagtctattaaccactgtgacctgtgcacaggggttcagattgatctctgatctttggtgtcattaccagtaattacaatagcccactacccttgtaaaaatttttttaagaaagtaattaccaggctgggcgcagtggctcacacctgtaatcccggcagtttgggaggccgaggcgggcagatcacctgaggtcaggagttcgagaccaacctggccaacatggtgaaactccgtctcaactgaaaatacaagacttagccgggcatgatggcgggtgcctgtaatcccagctactcgggaggctgaggtgggagaatcacttgaacctgggaagcagaggttgcagtgagctaagatcgcaccattgcattccagcctaggcgacaaagccagactctgtctcaaaaaaaaaaaaaaaaaattaactaccatgattaatggaaagatattttgtgacccattcttccttacactaacatattacttggaggagtgcaggccactccaggatttttgttagatttttatttggatcaccatcaaatttgattaccattacagtggtttaaaccacatgggcagtgtcactgaacagttgcagcctcaatcactagacaaggcataacctaagtaaggcccttaggatctcaggagaagcatgtgatttgtatcagccgcattgatagaaggtggtgctgatctgtgtgtttgcacacctatgagggaggtctgcgtttgggagttggtgttgatgtcatcaggcacgtgggaatagttcaagactggccgtgtccatgtgagtttttgttttctttttttattttcttttttatactgacctgctagataaagtttttctgttttcatagtgagatgacaaactcagccacaggtcagattgccagccacagttgctgcttgacctagatggaccatgtgaatgtttgccaggctttggtgctggatagggacaaagagaacattgtttcccttctctttacatctccagggtcctgtggtgttccttccccagatgcyaggattgtttctttccttccattgctacataatgagtgtgtcctaccctagtaactataacttcaccttttctccatttatcccctaccaatacgcaggccttctaatatccaattgttagaaaattgacagaggcccattatgtcttctaccttgacacatgtgggccactgtagggggactttaaaagcactatacccaaccaaatgatcattaactttatgttctggcaccaggccattccaacaagacaatctagtgactgaactagaattaagtctgaattacatagatagcctcctcctcccagctgatctgggctttctgtaagggggaagaaagatgaatcatggccagaaatggtcaggggagaatctcacattttcaaaataggtttatataaccctccacccctttttcctgatcattacccagttggtaggcaaaaggagatgacccatttctgagaatggctgccttaggtgaccaaactgcttcagtaaggtttgcagaccaggaggaggttaaaaacatagaatcaaaaatctttttgagttgatctttgagggaactgttcagtacttgacaatgtcatgcctgtggatggtagggagtgtgggaggtccatcgaataccttggctattgactgttgacactgttgggtggccattgcgacaaaaagatatgccagtgtcagactgtagatggtttggaaagcagaaaacctggcagtttagtttcaagggccacagtggtatacacagagtcagataattggactggaaaagcaacatcagcactgtaaactgaaaaagtatcagcagtagcaaggtactgatgagagcctagagaagggaacaaagtcctaatgtcaatctcccaggagcaggtgtggtcagtgccccttgcaatgtggcttcctttactgcaagacaagcaggccaacttttggcaggagtcacaagtctggcacgcagtggtggcttctgcctcagaaacatgtagtcccttacgttgtgcctagcccatgatggtagatgtttccacaccggttgcatgaatccaggtggctatggcagcagtcttggtggtgcaggctggatcagcagtttgattccagtcagtcttacgagagtacctgcccttagtgtgggcacctacgtgagtgatccagtctgtcctattggcaggcagccatgatgtgtttccacacttctcagctttcatctctcagtatttagtcttccaagtggcataccaaatgcttcaatccttactgccatcagccatccagagttatcattggggctaagtgcctgctgctgcytggtgggcaacatcagcttttaactcagcctaatcattggtgagccaggcctaagcatttacaggaacccctgtgaatcaagggccctactgaacagcagctcggcttcaggtagcagagaaggttgtttctcccagagtgggagctgccacttcttcacgtaaaaccaagatgcctctagggccaggctagctatactcytttttttttttttttttttttttagagatgagatctgactctgttgcccagtctggagtggagtggtacaatcatagctcactgcatcctcaaactcctgggctcctcctgyctcagcctcctgagtagctggcactacaggcacgtgccaccatgtccagctaattaaaacagattttttaagagctgagttctcactatcctgccaaggctggtcttgaactcctgacctcaagccatcctcctgcctcagcctcctgaatagctgggattaccagctgtactcttgaatgtactatttccataggatcagtgaggcttgttaaacccttcccttgttatcagtagattcccattgacccaccccaaagtgggaatactaggccagggagtcctgaggcctttatgggtctggcaatcaatttcaaagtgttgagtagttaactaaggagttaatagctgtccttttaaaaagggtgtgcttggtacctatgtccagcaggtggcactgtgattctggtgcatggctctcagtactccagcagccacaaagttgttttttgtttgtttgtttttgttttttgagattctcgctctgtcgcccaggctggagtgcagtggcgcaatttcagctcactgcaacctctgcctcctggcttcaagcaattctctgccttagcctcccgagtagctgggattacaggcgcccctatcacgcctggctacctttttgtatttttagtagagacagggtttcaccatgttggccaggctggtctcaaactcctgacctcaggtgatccgcccgcctcggcctcccaaagggttgggattacaggcatgagccactgcacccagccgccacgaagtttttaagcctgtgatttatttcctttcccttccagggatgtagatttttttcttctggaccaccaggagaggacaggatcacctgtctacacacagcagcccttgcccaggataatcctcttcgacacttatgggatcagtatcagctatacattcagcactggaagccacaggaatagtacattgaagaggcccaaagagctctgcctggaatgtcactttaacttcccttccctacagggagcgtggctcaaacattaccagtttaatctggacactttttcccctcgaactaatgcgtctagaaggcctgcatcaggggctatggtgacagccagccagagattttgccatttcccagtcggagagtgtggcggtgctggctgcagggagtggggagaagctttttctgctcctttagctcttcactaggcttgcatcacgacctccccagtgtcgctccctcagggttaggggcccttttccctttagtccttgtgcgcactgctatggctgtccctgcagtcctgagtgtctgcagtaacctctgtgtgtagtacatccttccccccatgagacatggtagggtggagatgtgggacctcatatccagcagagccctgagtttgcccctctcctccctggggctctccagcatactaggatgggtgtgtatgaccttcagtcccctttagggacatggaaacctcagcccaacctttaatcatctcagtctttaatgcagctgaggttgtggtagagtgggagggatcctgggacataaagggagagagtggctccgagccacaaagcaagtcatatttatatttacttttggcttgagtacacagctcccccaaggatctttcagtgtttcattttactcaaagttctatcttatatagcagggtcctattgccgcaccgttggagacttgttgattgagcagccatatccatattgccttttggcaggggctgctgggcttgctgccattgtcatgatcactcctcttcctccttttgcccagaggacagggcagtaaccagggtgacattcagtggcttgtttcaatcctacctctttccatcagcctctctaatagtgggacagtgggggactctcactaccccattgcctgcccatggaggccctcattctttctcttaccaaagactatgtctctcctcatcctatgcttgtctccacactgtcaggggctgtgattttatcttagcctacttattagctaataagttagcctgtcactgttttttgcatgctgacagaagacaaagtcttgggtcagagacagaggactttatttctcatggcacagcaagtgggatgtgcatcagcatgttggcatcagtttcctttgcccctaagtcccacgtggtgctgagggactggatgaatgcttgcacatgcagtagcttgcatcacagctgagtaatattaagcttagggaatctgctgttttatggcaagcaataaacaagacagccctctgtctcagagggagacactaacttccctcaaggttgtttactgcaaacagcattcttggcataccttgcaaggcctggaggagcacaagagagccacggaggactgtctctcctaacacaagcaataaaagccaggaggaaatatgaatgttacaactggttttacttgggaaacttttgaagtaaaaatctggagyccaggctgggtgcggtggttcacacctataaccccagcactttggggggctgaggcaggtggatcacctgaggtttggagtttcgagaccagcctggccaacatggtgaaaccccatctctactaaaaatacaaaaattagccaggtgtggtggcggccgcctgtagtcctagctacttggaaggctgaggcaggagaatcgcttgaacccgggaggtgaaaagtgcagtgagccaagattgtgtccatgtactccagcctgggcaacaagagtgaaactctgtctcaaaaaacaagcaaaaacaaaacaaaacaaaacaaaacaaaaaaactggaatccttttgttagtatgttcccaaacagatttaaaaactaaccacaaatgtcaggacagtttaaggagggcccagcagggatggtactttataatctacagaattctttcacatgtgttatctgagttgagccctaaggcctccctgggaggtgggcagggcagataatattattgtcttcattttgtagatgagataagaggactagagagaataagtgattttggcgggttgtgccattaattagtggtggagctgggactggatctctctttctgcaaatcagtttcattaccctgctttgaagttatttctgtcttcgacctcaccatgccaatgtcctcactgcctgtcaaggtgtttagcagatgctgaaatagacctattcttttgcctatcttggacccaccaagtaagatataaaaagaaccttagattcttaggtaaagcatgttttccccttatgtagtaggtcaataatgactgctcatgacctggggattgatgactactagaaagtaacccttcttttgagctacagggagaaaattacaaatagaaaaggccaggctctgctggatgacttggctgcgttcccaaagccctcatgtatggtgtagaaaggtgtatgtggttgtataaaagaggactttgcattgtgtttgaaagcctgtttattcaaatcrcttatttacttgcaaaataacttaagcaatgaggataggttttagatgtggtcttaatttagtaagaaagccttcaacttttatatactagttagtataagatcagccagatcacagttagcagcttacttgtcacagggtggctgagcaaaatgagactcctgtgacactcatggtttatagactcaactctgaccagcagcccaacagcgtcgtaatggaccttctaatagcaaatgttgtctcagaagttagcagacttggaagaaactttttttaatttaaatttttgtttacactagctacttgaagataggaagaaaactttttttttttttgagacggagtctcactctgtcgcctaggctggagtgcagtggcgcgatctcggctcactgcaagctctgcctcccgggttcacgcctcagcctccctagtagctgggattacaggcacgtgccaccatgcctggctaatttttygtatttttagtagagacagggttttaccatgttagccaggatggtctccatctcctgacttcgtgatccgcctgcctcggcctcccaaagtgctgggattacaggtgtgagccaccgtacccggccagaagaaaactcttactacaaacctttccatattatgagaaaacatcttgtccttttaaaataaatagaaactcaagatacagagtaagtatatgtatatttaactcaattggtaactggctagtgaatatttgctcgcctttctcatctatctaaatgaagaccagtggccagcttgatgtctttcttcctaaaatcacttgtgtcaaaatattttttttttaaatccagacttttgcattaattgtttgaaatgcatagcctttaattttaaccatgctttatgaaggccatttggattttatgataattttaaaattcttgtttctctttctgtgtttcctttagttgggatgagactcactttggaaaaatgggaagttactatatcaaccgtacatttttctttgatgtgcacccgcccctgggaaaggtgagcagtgtggtgaatagcagctctctggtcccagaggattgttcctaagggctggagccacatcttgattttggatttggggcttctagaaagaatttgggacttgtagaaagaattttctgacatttcagaccagctactttcatggaaaatctctggtgttttttaagggtcctctgggctcagaaatggaaagagggcccatcagctgagggagggatgaacaaagtgtggcacagccatatggtggaataatatttggtcataaaaagggatgaggttctgatacatgctacaacatggatgaacctggaaaacatgctaaatggaagaagccagacacaaaaggttacataccctgtgattccacttatatgaaatatctagaactgacaaatccgcagagacacaaagtagattagtggttgccaggatctcagggcagggaggattaggcagtgactgcaaatgggtgtggggattctttatggggtgatgacatgttacagaattaggtagtggtgatgattgcacaatcttgtgaatatacttaaaaccacccattgcacactttaaaatggtggatgttatgttatgtgaatttgtctgaattttaaaaaagaaaaaagaaataggaatacattgcatgaagcagaaatagcttacgaggctgatatccatatggggctgacttctttctcccttcccatgcccagcatacacatggtttgatctgtttctctcacatgttttaccattagaaattcaaccaattagaattcactttactctttttttgtttgtttgtttttgagacagagtttcactcttgccacccaggctggactgcaatggtacaatcttggctcactgcaacttctgcttcccaagtttaagtgattctcttgcttcagcctcccaagtagctgggattacaggcgcccgccaccacgctggctaatttttgtattttcagtagagacggggtttcaccatgttggccaggctggtcttgaactcccaacctcaggtggtccacccgccttggcctcccaaagtgttgggattacaggcaagccaccgcacctggcccattttagtcttttaaaaacaaaaacctctgagaaggctctcggattagccctggaattcactcaaggctttcttcctaactggagacttagatcttgggcaccaaggggacaggaattttcctgtgattaagtggggagggatcttggagcaggtagtacttgggggataaaggcaggagcagggaaggcaggaggaggcagggagtgtaatcttttatcaaagatcacaaagatcacctatggttgggcttaaggaagcatgagagcagggggccctacagcgtggagggatgggaagcgaggtagaacaggtagcctatttcaaaattggctctgagcccaagaaaagtgtagaacatattatgcctcttcctatctcttttatactataacaacaataacaagaacaattaaaaacatttattctgttctagtcaccttagaggcattatctcatgtaagcctcagaacaaccttataaagtaggtattgtttcatccccattacacagatggggaactgaaggaagataagtagttcgtcatagggaaccaagctagtaagtggcagattcaagggtcaggctggcatagagccttctctcttaatcatgacaccacagtgcctcacaagcttgccttggctcactcctcagactacatctgttactaccatagaattaaacaacagaacwtgttgagtatttgcatggagctcgcctgggaaccagatttctgatgaagatttttcayaggaaacccagcccagtctttctgtggggactgcccgttcttttttggagttttcctggttctcagcgcactgtggacatgtgcacaggactggctgatttgtttaatttacctaagccttaggccaggcgtggtggctcatgcctgtaatcccagcactttgggaggctgaggtgggcagatcacctgaggtcaggagttcgagcccagcctggccaacgtggtgaaactccacgtaaaaatacaaaaattagctgggcatggtggcacacgtctgtagtctcagctatttgggaggctgagacaggagaacagcttgaacctgggaggtagaggttgcagtgagctgagatcgtgccactgcactccagcctgggcgactgagcaagactccatctcaaaaataaataaataaataaatataataatattatatcaaagccttgccttcctcacatctggttgcccgtgtgaagggagaagtgtgaggcttctaaggctgccctcagggaatgcggcccatctgcacccctaatttagctcctgatggttctgtgttctgtctggttgaaagagagtgatgagcaaactggaaacctgtgagagggtgcagtagcttctgcaggttctgaggccaagccagtcaaggaatcaaaacccctccaagtagcaagcaggaagttttctcctttgctactgaggccaagacctgccacttcacattgcctaccaaccctgggcacctggaacttaaacaggaacttaaaacataagacaggaacttaaaacataaaaaagcctgcacgtagtagacagaaggaagtacagggtcagaagcctcatccaccacatttctagtccgcagaggtaaccacggtcatctttgtcaatagtttcttacattcctctaggaattcttttatacaaatacaagcgtgtatgtttttatatatgtacacatgaacaacacattatatatacacacaattctttttaaaaactcaaatgggataagtctacagttgttcagcagcttgtgtttgaaacatgatatatcttctttccacattagcacatgaagatgcgcttcattctgtttaatggccgtgtgtcattctattatgtagatgtgccgtaagtatttatccctcttcagttggtgggcagcatgtatgttatttccagtttttagtcattacaaaagatattgcagtgaacatccttgtacatatatcgttgtatagttgcgcaggtatatatgaaaaattcccagcagccaagctaaaaaatcgaagaatatgcacatttaaaattgagttagatattgctaagttttcctgcaaagatgttgtaatcatatatactcccaccaacagtgtatgacagtgctttcttccccacatcattgccagcactggtacgatcatactttaaaaactttgttggccgggcgcggtggctcacgcctgtaatcccagcacattgggaagccgaggcgggcggatcacctgaggtcaggagttcgagaccagcctggccaacatggtgaaaccccgtctctactaaaaaaacaaaaattagccgggcgtggtggcaggtgcctgtaatcctagctacttgggaggctgaggcaggagaatcacacgaacccaggaggcggaggttgcagtgagctgggatcgcaccattgcactctagcctgggtgacaagagcaacacttcatctcaaaaaaaaaaaaaaaamaaaaaaactttgtcaattggagagtaaaaaatgacatatcactgttttcatttgcatgactgtatgagttaggttgaacattttttcatatgttagccatttgtattttgttttctatgaatttgtcatttttttctagtaattcattttttttctattgatttgaaagagttgtttagttaagaaattaacttggggccaggcgtggtggctcatgcctataatcccagcactttgggaggctgaggcgggtggatcatgaggtcaggagttcaagaccagcctggccaagatggtgaaaccccgcctctactaaaaatacaaaaattagccgggcgtggtggcagatgcctgtaatcccagctatgcgggaggctgaggcagagaattgcttgaacctgggaggcagaggttgcagtgagctgagattgtgccaccgcactccagcctgggtgacagagcgagactctgtctcaaaaaaaaaaaaaaaaaaaaaagaagaaattaacttggggctacttttaaccttaagggaactgagagagaattgaattttgagtgtcttccaagtgcttggtatagtgttaggtgtttacttaatagcacctctaatcctcatgccccctgtgaggaagtttttattacctatagctcagagatactaaatattgtccgtgatcagagaactagaatatagggtactgagatccaaagcatctgtacatttcttctctctagaccagccaagcagtctggaaatgtatgaccaataccaggcgagcttgtcctgcgagatcccaggtgggaagagggatccatttgattgccacttggcagctttagttcatctagctatttggatgaccctgtctgaaccctggggtccctgccttcctttttaaaaacaagtctttgttgtcttttactgccagactttggcttctataccttgacctggagctatagagactggctctgtttagaactacttagagaaaaaagtgggttggttagtagtctaaatccatgtcccacaagtgtggctgggagggactttccccacacagccagtgtattccctcccccaacacagcctgccagagctcgggggtcaggctggagcagcctggggctgtcccagatggttggcatttgccagcagtttttatacttcagctgcttctgattgcttgtgtgaaaaatagaattttataatgttgatggccaaggaaatatacaaaagacacggccgatcttgtcaaaggttttgaaggattcatgactcacagtctcagtttctaattgatttgttctggcttgggaggtaccaaggatgccctcctttggaatattaggaatgggagaaaccagcctctggcctttggcagtttttctcttcccctctgggcaaagcatctgtctttgcattcctctgtctgattttcttctcttgtctctattcctggtatgtagctccttggtctcttttctctctcactgtgacttggaatctcactttcctttcaaaaggccaattccccaggaatcagcctctgtccaagagctgccgtgttttattttataccatctgaaggaaagcggaatcagagagccccttactgactctacccttcaaattgtggggctctttttccttcctgagtgtttaggttgtgctgttcctagacctcggccataatacaagagaggatttgtttcaagcagtgagctctgtrgacaaaagattctttgctctgtggcagctgcaggagaaaatgttgcattggcaacattttctatggacagttgtcaagggaacccaaagtctgtgggtgcagctggagggaagttcagaggacagaggaatcttctcccaaaggcttctcatctttttgtttgttcttctctcctcagatgctgataggtcttgctggctacctgagtggatatgatggtacctttttgttccagaagcctggggataaatatgagcatcacagctacatgggaatgagaggagtaaggcttcctgacttgaaatggactgactgaaccctggggccacactaaaccagaaatgttatagttagcagccctggygtggtggcaggtgcaaataaagggactttgggtggtgaggagaggggaggatgatcagaccctcccctgtggtgtagatactcagaactgaggtgaggaagaagggaagaggaggctgcaaataatacagagatgacatagatagaagcaggcacgcattgtcacctgctgccctgccccggtatactgtcagacctcaggttggagaacagcctggaacccgggcaatcaggagtctcctgcagccccagcagtgcctccatgcactggcacgctgcctgctcctcccctcacagccacagctgctggagtgttgcctacatctcagagccttttctgaagattttggcatccccacaccctgtcaccatgttcctgtgtctttccccatgaaggtttcaggcacacagaaagagttttccagccttatttgaagggaggccaaatgtctgctgcagtccctctgtgtcctgatttacagcaccagccttgatggaacatggcagggccttaacacccaactctttgggaaccttgaacgtgtggctgaatgaagccagcagaagctgacctccagtgtggacctctcagagaagtttgcatttacaagcccctttccttgaggatttcacagcatttaaataaatggctgtgtgcttatttggcctcatcgttagatgatttgcatggctatatcgtggtatattaaacaaggagtatatcctaccctcaagttcttgttcttaagtgattctgtgtcttcctaataacttttgaacaccacataccatacataattggatgtgacaaccaaacgtgagaatttcccattcttctggcttgtctgtttattytgatggacaggtaggggatggaagagggccagcagcttaaaaaaacaaaaaaccaaacaggtatccagctactgaagtatcaagcaatcccttttcccaaaatcaaaatacatacattgtgtagattaaagactggtttctggtgtaaatgaagaaaagaactaggggttccttaaaattctctgaaataccttcagaggggtctttctcaacttgtacctacagttgtgtaatagaagctaatggctatcaattactatctgtgtgttaataacactcattttcttcccttctctctattcctggtgtgtagctacttggttgcttttctccctgtctcctacccacaccttcctggctgaacttgctgatttcatgtcagtgcacaagttgctgcttaatgggaacatatatattgcttgatttggctcttcactattacaatactcttttcttagttatagatatcctaggtgactttaggtcaccaaagtcatgccttcatcaggtcccctgtcttaaatgttaggttgtactgagtccagtaggtcgctgacctagctcagcttgttatttgacagcttctctattcctcccacagttctgtgcattccttggctcctggctggtcccctttgcctacctcactgtactggatctgtccaagtccctctcggcagcactgctcacagctgccctcctcacctttggtaagttgtcttagccataccatggcttttgggaaatgggctgccactccgtgaatgtagctgaaaatcagtacattcaagggccctatatgtgggtccagttcaattaattttaggattgggtaaaatgtactacaaatctcattcactagtaatacttaatgtatatcaatagttatatataacaagcctttatattaytggaggggagaatcggcgtgggtaatcccaaggaatagatttacctccacgttattcacggttgagtttggaatgggtaataagatagatttgtatgtgagtatgtgtgtttttgaaggaagcttataattctaattttgcttctcttaagttaagattagtttgcattccttaactaatttcaactgaatataaaggtaaatgcagaagtagctgggtggcaagagatagcaaaatgggaacttggataataatcttcacatggataaatgagagttcatcgtagaagttgatcctgttgctagctttgttcctatgaaagtgaattcatgaccttgtggagcttaacatttaaagaagtctagaccaatttaaatggggtactttaggggtttgctttgacagatatgttgctttgttttgacagatagattgcaagattattggctttctctatagaggactggtggctttttccttgtatcttgaatttccatcttcagttattcattcatttagtcatttatgtacttttcattcaatagttatttctcaagcacctacccagctcccggccacttttcttagtctgagaggatacactgatgagtcactctggtctcattgagcttacctcatcgtggggcagacagtaaataaacaagtaaatgaataagtctgtcatgtgatgtcctaagccacaagtgcagtgtagaaaataaagcagtgtaagggatggaataatggagatcagtactattttagacaggatagtcaggaaagagcttctgagaggggagctttgagcagagacctgagtgagacaaaggatcaggccctgcagggatctgagggaagagcattcaggcagagggaagtgcatgtactgtagttctggtgtggacctctgtgggttcaaatcacagtaagaaggctggcgtggaaagggcagagtgagtgaggcagagggtgttgggagatgaggttagatgggtagggagaccgcacagactctggcagttgtcatgagaactttttactttgagtgaggttggaagacattggagggtttaagcaggggcatgacataatgagatttaaggatttaaattaaaaaacatcactctgccatctgtctggagaatcgacccccaagagagacttcatgtaaaatgataagattctatcataggtgtagatagtttgcggttacatgagcagagtggtaggactccctttttgatggtggaaatgaggatgacaccttgtctcagggctggtctgagggagcgaatgacatgatcctctcttgggttgagggcctagaggcagtgtgagttactgcttcttgtcattgggctttgatgtctcccagagctgtggccttctacctccctgatgactcagtgttgactctagtcctgactgcacaagtgcttacactcaattaagtggcaagagggactgtttcctactactggggtgcttggttttcagggggcccttctcttacctcgctttttcaccagcgagctcatgtttttcagacacgggatgcctcactctgtcccagtacatcctccttgaccccatcctgatgttcttcatcatggctgccatgctgagcatggtcaagtacaactcttgcgccgacaggtcagaaactccatccccgggaggggagggttggaagctgtggcaactccaaaatttctgtaatggccagggccagggcgggtgcccagagacttgtcttgaagctgattttaaggcaagcatactttttgtttgtttttttaacttagattgtccattttagatcataaaaatagattttaaaaagttttctacaggtgattttatttttgccatattcaagaccgagaaaatgtcagttgtctttttcaagcgtattattattatcatgtttacaatggagtacaattgggtaggggttttgggatatcatggggggtcctaatactttccccacccacctcttgtaaccagtgctggttaggaaatcccgggacagggctgtccttcacatactctgtcctagaagggagggcaccagggtagatgctgcctggaaactatctccctttcgtcagtggttgcatccagtcctgacctaatgatgggaatagcatatgtaaaggttggcttgaatggtccataccagccaagaggatccttccaggtcctggtcagttctaaagctgacttggagggtccggtctacttgcagaatagtcttttccagatcatccttctacttctgagaaagtagaataagtcattcattctattcaaaccagaagagttggcccctcgtaggcttttctggaagttaactttgcacagccaggctcattaagctccattgtgctaatcaaacctgatcagtgactctcagcccactctggctttggttgttgtgcttatgccacatccacttccatctaccatttcttgagtacatactgtgtaccaggtactatgcggggagctggaggtactgagctctgttgggcttggctgttaaggaatattcactctggcagaggaggcagccagagagccagagaatcatagtgtagagtactaggtgctatacgaatagcaaaatggttaagagcactaacattgacccaattgcctgggttaaaactgtgccccactgcctgctagctgtattactccacctctctgtatcttgatttcctcctgtgcaaaaagaggacctagtgacaggatcctctgtgtgctgtagtgacggctagaagagttaatatatgcatcgtacttggaatgatgcgtgacgcatacatagtaagcactcggtaaatgctkccttcgacaagggcagaggtgacacaaaggagagggctgcctgagtccaggggcacctaaggattctccttttactcctgcctgactggtcacttgtgaagaaggagcccccacttaccctgagccctgtacttagccaggagcactatggacactctcccctgaagaataccctgcgccctcagacagtgcttttcctgccgttccaggggtttcacaggccgcctcctccatggagccacgcmatggtcccttgaggctaagagcccccaagacagggcacagcacagccgctccaagtctgagaactgccctgtcccctgctgcgcttgcgtttggctttggttccagctgccaaatwgaactccgtcttgttgattttcaggcccttctctgccccctggtggttctggctcagcctgactggcgttagtcttgctggtgctttaggggtcaagtttgttggcctctttatcatccttcaagtggggctgaacaccattgcagacctttggtacctgttcggagacctcagtctttcattggtgagcacccaagggtttgctgtggaaatgtttttgctccctgatgttgcygagtaggagctggtggccttctctgtctctactgcaggtggcagagtggctgtgttctgggtcccaggtgggctggaccccccaacctccgcagacagcaggacatcagggagtgggcccggctgaggactggatagggttcaagggagaggatagattaacattcttggaagtctctttttgcatttgttttataatgtctgtcttttttttttttttgagatagagtttcactctgttacccaggctggagtgcagtgggccgatcttggctcactgcaacttccgcctcctgggtacgagtgattcttttgcctcagcctcccaagtagctgggattacaggcacataccaccatgcccagctaatttttgtagttttagtagagatgcggttctaccatgttggccagattgttctcaaacccctgacctcaagtgatccgcccgccttggcctcccaaagtgcggggattacaggcatgagccaccgagcccggtctgaactcacaattttcatttcctgacccacggtctccatatttggaggccagtaagggcctttacagtttattatttattaagggctgattctatgccaggcactatgcgaaacgctttaccttcattatctcatttacccctcataatagtcctatgaggtagggagttattaccctgattttcaaatgaggaaatcaaaacctacagaggtaatgacttccccgaggccatcggggagtgagaggtgtatctaggagtcacaaccaggttaggttggccccaggccatcactctgctgtggtgctgctccatcacctccaaaccagctcctaacaagtttattcattcattcattchtttattcagaaaatgtgtaaagatcatccagccactgtgtgtgaggtgctggaatatacagatgaatataatatggtccccaccctctgtggtcaatggagagagagaaataaggaagcaggcagttacagtcagccaggagtgctgggagagcacagaaaagggcactcggccagtcccaggcaatccaggaaggcctctggaaggaagccgcgaagttaagataaggagccattagccatgtgatgggttgggctgggacagtagaggaagcactgggaaagttcaaggaggttagtgtacctggaacatggagcggactggtgagcaactgtgttgcagatgcaggtgccttgtccttggcacagtaacatcctggggttttgggtgtagagcctggagaggtagcasagggctggcccatgtttatcttgtgtagtgcttgggtggtgggtgttacagaaaggcttagggtttccacatattcttctctcycytcttggccattttttatgattatgactgatatattaaaagctatatataatgcatgcatagtgcctaaggaataatgaggtctcacatgcctagcaccccacgctggcctctgtttgcaggtgactgtgggaaaacacctgactgctcgtgtcctgtgcctcatagtgctgcccctggctctctatacagccacctttgctgttcacttcatggtgctgagtaaaaggtacagacagagcctttgcagcatcttgcttctggttttccttttgctcctaagcctgtggaggggtcggatgattttctgggtctgtggttaaaatgataggtgagggaccccaggggctttttcctgtttctttcctgctatgttctatcctttgggtatatgctaagggctcagaaaggccagcaccctaacctgaaggaagaagctattttcgttatagccaaattgtcccttatctctaaacagagtcccctgtacttagcaaggataggccacaataagatgtgcagtaggagtgagtgtaacaataacagtaactccggcggcaacagctcccacttaatgagtagctactgagaatcaggaactgtgttccgcattttgtacacattatctcatttaatcagaatcacttgtgacttctcttggtttctttaaatctctagtttataaatgaggaactaaggctaaacaaggttatcttgcccaaggtcgcacagctagtaagtggctgagttgggatttggaccccagtttctccaactccatcacccacctctgtcccatgatctgattctactttccttaaactatctgagcagagctcttcccagcgctcctgggaaatcacactttcactcctttaacttgactctcttctgctcttcctctccccacagtggccctggtgacggtttcttcagttctgccttccaggcccggctttcagggaacaacctgcacaatgcttccatcccctgaacgtgagtgtctctgggccattacaaaggtagaaggcagaggggtgtcctgggagttgaattggaaaagacaaatatgatggctttgggttattttagcctgtgatggcacggtgggagaaagacccagatagatctggtgaaaatactcgagagtgaatcaggacagaggagaggaagacatcctgagcagcaagctctctgaccctaaagaatgacttctccttggtggctctccaagccagctctgtgggaaggtcactyagagagaatatggtgacagcaccaggcccttcagagccagtttttggtttcccgcaccgctttctgagtgttgcattcgttcatctatgacagatggtagtggagcgcgtgctcaccctccagagatggagcctggtgtagaggagctccacacggtgtggctggaagcgttaagtacgtaaagagggagcacagctctggggattgacaggcgtgaaggagcatggctgctgggcggttaagggcatcagaggttcgtgatgtgggttgccttggagtcaggccctggaagaatgtgtggctttcaacagaggagagggcatctcaggcaggagggatgacatgatcaaagctgaggacagagtaaaacttgaggcacaggtatatgcagaaaactactggaagataaatgtgaaaagttaggttgggcccagactatgagggtttgaggtgtctggatgaggtatttgacttcctaaaacaggccgtggagacctagtggaggtctttgagcagccaggaggccaggaaggctgtgctatagggagatgacatgggtgggagagtcgaggctggctggggaggggacaggattgtaggcaagagaaaccctctgggaagctattgcaggaacctgagctgggtatggtggggcagccacagggtaaggcaaatgggcatatacaagggagatctggacacagcaagagaggaagaaagatgtcactaaggacttgagtgcaggtgattgcttcctggaggcagagactgcatcttactcattttagtctttccaggactttgcacagtgcctaaaatacagcggactctcccagactgggaagaatgagaaatagggaagcaggagaagaagttgggttggaagggcagatactgaattccacgcgagaggggttgatagtgagctgcttggggaaattgttgccatggggccagtgggatttggggmtgatgctttcaaaggaggaatcagacaagtaaaayggtaattgatgctgtggcagtagctgtgatttgtaaggaaactgtagaaagaggaaaagaatagagctgaggtcagatcactggggaatgcaagaggaggaggaattaggagaggagactgcggaggagcagcccttgagagagtgtgcggtcgagaagtgggaacagagagcatttcaagaaataaaggtggtcagccatgtgcagggctgccgaggttggcctgcctgagaactcagaagaacacagctgtggagtttagcaaattcctgctcattatttaaaggcctagttcagctgtcacctcttcgatcaagtcgtcctctctttaatccttgggagagaatttggcctgttccgagttcccaccattcccaccatgtcacacattgtcacgcctttgtggggcacttgcccactgtcctatacttgtcagtgtgtgaagccatcttccttgtagacagggctcttccagggccacaggcaggcctcctccacctttggatccagtgtgtaattcttctggtccactgaatgaacaaagaaaaacaggagcaggtcattccagcggattggaagaaggacagtattaaggaaaaaaggtttctcaataactcagggcctataggagcaggggatgctcttgagaagtggttttctgtgttttttgttttttaattcagagtaaaacaaaacaccattgaacagttatttcatatggtactagattcaaaaggcacgaaaggatatagagtgaaaaaaatggtttgtcaaaatgctgtatcttggagaacattccaggcgaagacagaagatacttccttctttattccattgaatccatgtggagaccttgagaaggacaagttgtttttcgtcttttgctgttacacrtagtgctttgataatgacagtgttaacacaagcttcttctgaagccctcaggaggcgggggagtaagtgggccctgtggtgaactctgtcttgagtcggctccatgggagtgagaaggtagctgggcttcagtccagggcccaggggagtctcgcagagggttagtgagccctgtggcttccgaggctcctcgcaggcacggacagcctctggcactgtgccagctcacccctctgctgtctcccttcctcccagacctggcctacggctctgtgatcactgtgaagaacctccggatggccatcggctatctgcactcccacaggcacctctaccccgagggcattggtgcccgtcagcagcaggtcagtgagccttttgtgcacttgtacggcagcartgctgttcgccatgacagttcactctcttgcctcctatcctttgctcatcctgttcgccctgcttgaaacattcttcctagccctgcacccttctgttttctctggctaaccccagcttctctaggcatcagcataggtgttctttagtgacaaccatgtcccacctctccatggtgctgggtggggtgcccctctgatgagaggctkggtggcaccttccacatgcctacgtggtaaaccttctcatattgaactgtgcatgcttacttcccgccgtctctttggtacttgattgctagctcctggaaggctcaattgcctagcacggtgcctgctatgggatgggtgatgaataaagtgtggtatttatgaacacagacctgggaaccagactagatgatcggggtgtgaagcctgctttcatatagagtgtcactttggacaagttcatcttcttgtgcttcagtatcctcttcttttttttttttttttttttgagatggagtcttgctctgtcacccaggctggagtgcagtggcgtgatctcarcttactgcaaactccgcctcccgggttcacgccattctcctgcctcagcctcccgagtagctgggactacaggcacccgccaccacgcctggctaatttttygtatttttagtagagacagggtttcaccgtgttagccaggatagtctcgatctcctgacctcatgatccacctgcctyggcctcccaaagtgctgggattacaggcatgagccaccgcgcccagcctgtatcctcctctttaagttggggaaaatgagtagtacctctctccatcaaagggcagttgtgaggattaaatgagataacaatgtgaagtgcttatgaaagattagccatgtgagtatcatctgaatgagtgaacgatgctgtgtccatgttaaggagtgtttgtgtggctgcagtggatggtgcctgagagggagaagcaggatgctgaagaggttggtggggccatattggggagaggcctgtgttatagtagatttgactttgctccatagacattagggaggcaatcaaaattattatgattatgattagatctctagtttagaaaggtaactttagtggaaatgtgatagctcacaaggaaccagtttggaggcaataattatgacaaaggacagkgaacagaggcaaaaagcatggaatctttactttgcaaagatttgttctttgcaaaaagttgtctctctccaaatgctttatttttatttcccttttagttgctagaaagtgactcagtatgtattagtgcaatttcatgctgctgataaagacatacctgagactgggcaatttacaaaagaaagagatttaattggacttaaakttccacatggctggggaggcctcacaaccccggtggaaggcaaggaggagcaagtcacattttatgtggatggcrgcaggcaaagagagagcttgtgcagagaaaatcccattttaaaaatggttttaaaaaccatcagatctctggccaggtgcggtggcttatgccgaggtgggcggatcactttaggtcaggagtttgagaccagcctggccaacatggtgaaaccccatctctactaaaaatacaaaaaaattactcgggcttgatggcacgtgccagtaatcccagccactcaggagactgaggcaggagaatcacttgaaccggggaggtggaggttgcagtgaactgagattgcgccactgtactccagcccaggcaaaagagtgagactccatctcaaaaaataaaaaaataaaaccatcagatcttgtgagacccattcactcgtgactcaatcatctcccaccgggtccctcccacaacacgtgggaattagaggagccacaagatgagaattgggtggggacataaagccaaaccatattacagggtattggattttagtatcagtttcttatccttaattctccattcatgtctggcccagtggttttcagccctggctgcacttagaatcaacggagagatttttaaaaattctgatgcctggactccactgcagagattatgatttaattgatctaggatgaggcccatgcattatgcatttttggtttggttttaagctgtccaaattattctaagtcatgtacacccagggcagagaaaactagatgttctgtgttctcwtgtgttgataaattgctgcaggtgtcatgtagaagacactacagttacagacctggtgaccagaacatctacactgtgcaaagggagagaaaggccaaactctgaaaggctctgttaagctagtgttatgtacgtagagcccatgtgtggaggtgtgaaacgtgatggtggtatagggaaagtgcattgcgccaagggacgaaagtgtctggctttgtcattgaccagatcttttagcctttcatcctgtttcctcatctgtaaattgaggggattggactaaataatctccagtggcccttcctgccatgcagtttaatgtcttgttaacatgtctaggtctctattttagaatgtttttaaagcatagcatttataaaattggaaaatgtagaaaagtataaaaaagaaaacaaaagctacatgtaatcccagaagattaagtgtttatctgaatgttttaatgtacaacattctgctataattggatacttgtgttcttaggaaatctcatggtataaaaatctccattgtcaaaacaaacatttcagtgggaaaaggggccatggactgtactcatgataaataaataatttttcttgtaggaattttaatcataattgctcttgtaaaacagacacacaaagactgctctcctaccacacatctacacrgagtacacacacgagcatcatagaaccttaacttccttgagcaaatccaggctggatggacgatatcgagctttttctcaggaatgtagacttcattttaatttctttatgagcaccaaaactttttagcttcttgtatattcttaataacattatccctaatttttttttcctgaggaacaaagcaaataccactcaaaagaagcagccataatgcaagcaaaataatttttcccctaaatgctaattctaaatctctttgtaagtacagtcatgcatcggggggataccttctgagaaacaggtcattaggtgatttgatcgttgggtgaacatcatagtatgtacttacacaaacctaggtggtccagcctaccacacacctaagctacatggtatagctgattgctcctagactacaaacctgtatagcatgttactgtactgaatactgcaggcagttggaacacagtggaacacaatggtaagtatttgtattaacttaaacatatctaaacatggaaatggtatagtaaaaatatggtattataatcttatggggcaaccattatatatgcagtttgttgttgaccaaaatgtctttatgtggcatatgactataaattggtcatattttatccaattggggttataaaaactcatttgtgagagttctctacttgtctacataattggcataattggacgtatatagtctctatcctgggagcatttattttgcggccctggtttgaattctgtctccccaacgcataagctgtgtgaccttgagcaaattacttaacttcagtttccttgtaagtaatgtggggataaccatagtacctatggcatagagctgtaataatggttaaatgagataagacttgcccaatgcttagaacagtgcctggtaataaatggtagccattttcagcatcagcatttcatgagccttttcccatgttgctaaaaaaatgctctgaaacattttttatggctgtataatattctatcccaggacatactatcatgttaactatttttctattactagacagtcatactgtttccagattttttgtataaaacgtgagttaaattctaggacaggatatctgtggagctttttcgtttcatttggccacattatagaaaatataatagcatgaatttttcatttagaaagtttgaggcatgatcttaattacttttttttttcccaagatagagtyttgctctgttgcccaggctgtagtgcagtggcgcgatctcagctcactgcaacctctgcctcctaggttcaagcgattctcctgccttagcctcctgagtagttgggattacaggcgcgtaccatgcccggctaatttttgtatttttagtaaagacggggtttcaccgtgttggccaggctgatctcaaactcctgacctcaggtgatccgcccactctggcttcccaaagtgctgggattacaggcatgagccaccacacccggccttaattactttgaaaatgcacttaaatcctcattctgtttttgtgttggagtcagttatataaggcctcatggttcctccctctagaaggctggatggaacttttaggacaagatgcagaaagatacaaagaaacaaaaaggctcttgtgggacaaagcttctaaatgcagaaggaaggagagaatctcactcaccagtgctacatatgagccccattgggaaacatggcccctcaggttggtggctggggattctgaaattggcttaagcaacattggtttgaggttgattgtccttggccagctgtgctgatagtgatggtattctccctcctgcttcctcttccctccgcccccaccccccacccaggtcaccacctatttgcacaaggactacaacaacctgtggattatcaagaaacataacacaaactcaggtaatgtggtcagagactgatgcttcttgtgctgttactccctctgagccctccttaagatttctcatgcctgcaaaagaatgatcctgagatgggctttgctgagcatctttgacacctttacttatctcaattatcctttcaattattatttattaagcacctactgtgttccaagcactgttgttggcataggggataagcattgagcaaaacaggtaagaacttgctcttagagctgtcattttgaagacagatagcggagcccagatttaatctaagtagaggttacttgagcatgccactaggggctggtgagtggccccagctgagggcacctggctgctgctctcatttcttacatagagcacaccaaacattgcacactctagcatgtggtgcagcttaagtcgtcttgataagatagaatcctgcccactgctcagccctggcctgagtcagtcagttgatctgaggggctactagtcctgtgactggaatttgtctaggctaattcctgagatgtgactcgatgcctgctgatctgcttctaactggcctgggtgaaggcgctctgaagcacacctatcaggctctcagggctttatgacagagcaagagctagagccagatcttcctttctttggtcagacagctagctacctgcaggctgtgcctctgctgcagctaagagaacagagggcatcttccactcaccttccgagcctgtcatctctgctgacagtcctgtgccacaggtatctctgtgactcctcagcaaatcccacctggcttagcctatcccagctcagctgctcctaggcctttgtagagaaatgggcagctgctcacctaaatccacctcctcttattgctgtgtaggctagaaacgtggcgtatacaaccactttctacatcctgctccttagtgggataaattacgacaccattgggcagagtctgtttctatacttttataatggatattgattgattcagcaggccaaacgtgagtgttctatcacagtgaggagttacgagggaagaccagttttacttccgtcatgtggtcatgaaccaagtctttgaacattcctagtctgttattccattgtgacttctgagttaagatggttgcatttcatcgaagtgattaaggattttgtgggagctttatagactagggtctttgtgttcttgaaggctataaatgcccctccccaccaaatgcatatgaaataaaacctccctccctattgacttagttgatttgtcatcttgctaattaatgcttttaagagaccctaacaggcagcatggaaatgggtgtctctgcggttgagttctctgattctcttgagagccagtgatttgcactggcaaatttatctttcctgaccttgatcaatttatagtgtgttggtatctcactgtttgggacagaaatttgcaaggatccattctgtgttgctatgattactgccagctccttttccatgtcatcacctttctagatcctgattggtcttgattttgagatgatacagaagtagtcctttaatcatttcatcattattcacctcacatttagcaagtttattgccagagacaagatactcgctggcaagattgtcagggtttatttgattttgaggagagttgggcaagtggtcatttgtatggaattactttttagaaggctgttattactactaaagtcttactatttagcttcccagcttaagctccagtgggggcttcagtgcctcatcgggtaaaggccacattccagcctggaatatgcagtctggccacactcgttcatagcctcatctgttcccactctcccccaccccacccacccttacagtatgaaacccatttgctattcatcgaaggagtttttcttcttctttttttttggagacagagtcttgctctgtcacccaggctggaatgcagtggcgcaatctcggcttactgcaacctccgcctcccgggttcaagcgattctcctgcctcagcctctcgagtagctgggactacaggcgtgcaccaccacgcccggctattatttgtatttttagtagagatggggtttcaccatgttggccaggcttgtctcgaattcctggcctcaggtgttctgcccgcctcggtctcccaaagggctaggattacaggcgtgagccactgtgcccggccagaagttttcttctttcacacttctagtgcctttctcctgcttgttcacctgacaaaattctccctttcccttaagagtcttttcgagcattatctctgggacacccttctctaataccctgaagcaatttaggggtctttcctctttggtctcagagtacctggttagtacctctagcagataccacatggtactataactgtttaccagtaggcccttgattaatactmgcctggtgagtgattttggatatcaatgcttgtttctttttggcagatcccctagacccttccttcccagtggagtttgtaagacatggagacattattcgactagaacacaaagagtaagtcaatttgcagtttggataaataaatggtacgggcaccaaggggagggagttattttaagaagtaaacagaagttagattttgatgaggctctggtcaatggagcaaggccacagtgcgagaatgggagaagcattttatgaaggtgatgaaattgcaggccagcctttgcctgccttctggggacctttcaatttcccatttcctagaggaaaatttgagttgctgaaagctgctgctgctgtttttttttgagacagagtctcactatgttacccaggctggcctcagagtcctgggctcaagcgatcctcccgcttcagcctcccaaatggttgctattacaggcatgagccatcacacccagctcccaaagcttcttcttaagtggctgcctttagaaagacgtaggagtctgtttctgagaatatggcaagctagcttatttaaccagtgttctcactgaaaatgactaaaaatgctggaataatataaagacttcttaagagcataaaaaggctgacaagatattaaagagttaccaggccaaagcytaagtgaaatgaggaayccagagaaataagtgagacactgaagccacttttgctttgatcccacaatcttgacttttggctgtctcttgagagaagaggttttaaagtcaaacctaggctcacccaaagtggtaaatttattaagttatccttccccatatttggaacccccaaaggcttggggtaagggtaaatctgccctatccacttatgcccaggtccactttaggacccagctaagtgttgggggttgggtggtgaactgtccttagttcctgagaagttggaactaccatttgatcctcacatgaacttggagctcaaattcatgttgcctgggtgatctcagaatctccaagacatgaatttaaatgaacatgatcctagattggtcgtgtctcctaggtgcatggctaaaagcaaatgtaagccctctttggggaaagtcgttgtcatttgttcccatagttttttagtgacaatagtacacacccaaaagtaacaaagcacacaaggaaatagggcactgtgtgcaagaacaagctgaaacgacagacagcaggagcagccccgtaarcatttcatagactggaattatcggatacaaatttttaaaaatcagaggtgtgtatgtgtgtgggtgtatatatatatatatatakagagagagagagagagagagagagasagagacagagagagaagcaattagctatggtttttttttgagtcagctggattttgaatacttaaaatttttattttattaaataaatttcatttgtcattaataaaaatttattgtaattaaattttacttttgcaaattttcagaaattttataatgaacatttattatttgttccagataaaagtgagagttgttatataaaactaaataaaagctaaattaaacccctctcatcctccacagatgtccacttaaaaaaatctggcgatgggagcagaaagagtaagtggcagtgaggaggttacctagctcaggccatgcagattacaagttttaatttttcctctcctcaaacctgcctcctaagtcaggcaagctaagtgcttcaaagctactaaatgtgtgaaagtcgccccccacctccctgccagcacctaaagttagcccctttcttggcatgccgtccagtgctcctaccatctgtctctcctggtttgggctcatctcttctccagttctcaggatatttcttgtgagtaaataggaaaccagttcctgatatgttggatttaatagttcagattctaatttttcttatcctgacagttgactctgaacatccttggtaaaagaagaaatgttgcacatcatctttctataggataatgacacttctcttttctaacttctagaacttcccggaacttgcacagtcactatcatgaggcccccatgacccggaagcactatcaggtcaccggctatggcatagtaagtaagcaacggggatgtgagtaggacgtaaaagttatgggccttggctcagggctgtgtggtgggatatctcctccccagaattctggaatgttcctgaggataagaggctgcacagggactctcttaacatttgggcactttttggctaggcctgctctgggaaaagcagcctatgaagtctgtttgtctccatctctctcctcacataataaccatgccatttacatgctctgatacttaataaatgtcaaatatgaatactatttggatctcttttaaaatcacattggacatagaagccaaggacccacaatatgaccccagatgaacaacatgtatgtttatcttttgccagatcccaaattctcattagctttatttttaagtatcatttccctgttctgcagagggatattatccatagcttttgtattttactacctcaaggagatgcagctaataaataaaagctctatgagtacttatggctttgggagtaactgaagacaaaaactactagtggaaaactgtatacagattctggccttcaggtggatttcccagccctctttctgtttgctcattccacattgtgctaggtcaagactgtgaacattctaatcttctttgtgggcatcttctgagaagaattagacatacatgtcttaatttccaaagtgcaatagccaggccagacctttctggcttagatgagtgaatacctagatagccaaggtaatggatgcaaatggcccagatctgtttctgttggctcagagtgatgtcttgagtttggttgaagggcaaagacaggtatttagaacttgaactctagttctatgaagtgaagagttggactcctggacttctggttccaggagtcatactactgttttttggttgtaatagtgagttttgggacaatgccaatcacctgggatatttctttggccttcttgtaaccttgcccatctctatcattgagcctaatttggtctttgaccttcataacatggtggcatctgggtggccatttccctttctgacacgttttctctaaagtcccctcactttctttgtatttttttcttggcttttatggcagaatggaacaggggactcaaatgatttctggcggattgaggtcgtaaacagraaatttggaaaccggatcaaagtgctgagaagtcgaattcgcttcatccatttggtcacaggttgtgtcctgggctcctcgggaaaggttctgcccaagtggtaagtctctagggttttgctgtcccaatcgagggtcctgattttcctttcactctacaaggagtatgccagaagcttttgttttcctgtgttcrcctgctgtctgcttgttcttagtggcagatggagggagagtagatatcaggtgtattatggagcacagaactccgggggagcttcggtgttttatgtgttctgatagttcaacattttcacatctggctggtgctaataactctctgggtctatgtctttttctaaaatgggaatactgtatgctagactatcctaggatagttgtccaacatggaacatgaagaaataatggccaccatgtggaaaagagaaggagcctgtggatttaagagcagaagacagtgtcactctctggtggatttcacgtcttctgagagacatctgtgacttctgcttttcacaggggctgggagcagttggaagttacttgcaccccatacctgaaagaaaccctcaactccatctggaatgtggaggaccatatcaatcccaagtgtgagtgaggtcactttctgggctggctctggagggaagcatttataagaaacccttatcttagaaaagtaagygtttgtaaactgtgctatcccttcaacttgctgctgtttgttccttgttaacactctctttctatgagttgtctgtacctacatagcatactccttttccttctcatccactccctccgtaaactcctctccctaaagtggccagtggccatctgcagatccatctgtctcgtcttcctctgggctcctctctcccctgcaccatgggcacctccccagcctccaggcttggagcaagctgctactttccctttatgcctcagtgtagagtcgctcccccgcccccccacatatccagccaatgcttttatagaaagtgactgccacagccctgatctgtgccccacatctctacacccaagctccaatttgatatttccactgcgttgtcagcttcaactcaataagtatttggattcatcatctgttttcctaaactacccacctcaagcttatgtgtgccttcattttgttcttcttcccacctaatctagccaaacccactaatcaactaattcaacaaytctttatcaagtatgccaggaaccacatggggccctgtggacatattggcgaggagacagacttggtccccatcccgacagcagctgctccaggcgtccagaatgatttattcctcattcccaggcccttcaaagggccacagtgactcgggggctgtgcagctgtcccttatgcctaataggagagcagcatttgagccagtaccacagtgaaaagcaatggtgctgggagctgttggagcaccaagcaggtgaaaccttgttgtctatttcctttgcatttcttagaatgcctgatgagttcttcatacagctaagtaaatgatcaagaattgggccaagctttcttctgtctcctcaacagttgtgaacttgtcagcaaggctgcatttggattctggtgggaatgtggacaccatggacagactgaggaaagaatgtatgacaaaggcttttctcctgcatttttttcccctagtgccaaacatcagcctggatgtgctacagcccagttttcctgagatcttgctggaatcccacatggtcatgatccgggtatgtgtccccttctcatttcatggcgtctctaagagcttttgggcagccatgaatttggatcacaagtcaatgccatgctmcagatccattcccccttgtggaggaatttgaaagcatctttactacggttttctgtgatcctcaaaggcatttccctcaccacagaatgaggatggtggtgatgatggtgataccagtgactgcttgtacagctcatgtgccaggcactacgctaagcactatactcatctgatacttattacaatcatatggaggttgccatcattcccagttacaggagagggaactgacatacaaagaggtcagggaacttgcccagggtcacacagctaagtgtaagaggtagatccagccctcagagccaggctggtaggcttttagagttactgctagttaccactacactccttcacctctaagtgatttgtgaatctgcccaagtggcagagcccctgaaaatcatagtgctcttggttgaagatcatgagatactgatagttcattccatcatatgaaatcaggatcagttaggatggatagctaatttgagtgtgttgtttatatgcagcatgaaatcccagccacgagcccactcatattcctggacagaaactgcttaggcagggcatgattgattctttttaaggttttctaagacattgtttgcactctctatcattagtagctgacagcagttgtagcatcaaaggtttaagaaaaattcagagaagaaatctttaaattgagaaaattctactcactagcttaaattttcccctgctgtagtcctgctgtttagtggaagacccccttattctggcttatggaaaacctgtgttctgcaggaataatgtttaagaatcactatctcaagccagatatgtgattatcactctacccacagcattgcagggaggtgtagcacttgttatttttcccctggtaagccattgtcaagtggacttccctggaagtgattatgtaagcagtactcagtacatatagttgacttatttcaccagattaaattttaaaaattcaaattttgtcatttttgcgcattgggaggtgataagttgacattaagcatctctgggtcacttcctttctgactctctgcttgtagctgtcactgtggcctgatgacatagctcttttgaacatgtgcctgtcagtcagaatatcattctgggcctgggtcaaattttaagactaaatctacgagtttcattttgtctttcattatctaagaagtagagtcagagaagaaaagggaagtaatgagagctttcttattcagccaacaaagagtcagggaggggagagagatgaaaacagtgagtccagactatagaaactgcaggggcagggctcttccgctggctgagtagtggcccgggacctggaggagaaggctgccttgcctggtgcagttacaggaatgagcccatccagatttcagccatagagaacaacttacaagtacatatgcctgtgatggttgcagatttttctttcctcttttagtttagcaacagagcaggatttctcagagtttaatgtagtgaataagattcccttggcttggtacagttctggctggagtccttgggtttgggaccaaactgtacaatttgaaggaattggtttccctcagcaactgccgcaggggtccagaatgattcattcctcattcccaggtccttcaaagggccgcagtgacgctggggccgtgcagctgtcccctttgtgtctgatgccctggatgcacttttgaccttggaggcacaacctctccaccatgyagaggcctgtaaactattcccagccccttgctgaactggattcataaggcactgggtggcagtccactgaactttctgggtctttcttaggctataccagtggttcttaattgagggtgattttgcctctcgggacttttggccatctgtggagaaatttttggctgggaaactgaggggttgagggtaggagtgctacgggcattcagtgagtggaggccaggaatgctaaacactctgcaatgcacgggacagtcctcacagcaaagactcatccagcccgaaatgttgggagtgctgaggtggagaagctccggcctaagtcatggcagctgactccccttctggggaaatgccttttcagtctgtcccagtgataaggcagaacccagtcctagtggttaatatcctggatcctgaccctactccttcctgttttagcaaagacctggtttgccctgtagagaaaggttagcagatgttcttggctgctggattagggaggctgagtctgggtccttcaaaccaaagcatgcattagggttgatttctctcccaatagatgaaatgtgttcttggagggcaaaatatctaattttttatgtataaagcacaagtaagatgtacagtataaagtattaaaatgtcatggagtgtgtttagggagaaacttgtctacaaaggctcctggtagaggggcagtagtggaaaaaaaaggtggagaagcactaagctaaagcaacctcttccaagtctaggcacgcatgagagtttctgcttttctgtttgaaattggcccctgaagggaacaaataagtaagccttattatttatttatttatttatttatttatttatttatttatttatttattttgagactgagtcttggtctttttgcctaggttggagtgcaatggcatgatctcagctcactgcaacctccgcctcttgggttcaagtggttctcctgcctcagcctcccaagtggctgggattacaggcacccaccgctacgctcagctaattttttgtattttttagtaaagayggggttttaccatgttggccaggctggtcttgaactcctgacctcaggtgatccacccgcctcggcctcccaaagtgctggggttacaggcatgagccactgcgcccggctgtaagcctcattttatatcccctctctcccaccattttcacaccttgtccttagcttggcagatgggtatatattttgtgcccattggaacaatttcctctttcctctttcccttctttttccctagaaggttggartggaccccttatgggagatggaggcttgtctgggagaagtaaagcaagtgtcgtaggtaggcagacagcagctgcctgattcttccctgcaagggaagggaaggagagaaggttctgctcggcgcttggccctatatcagaaaaacctgggccccacatttctgtcagccctctagatctctgtcttgactagctttctttgctaccttcrtgcaggggaacagtggcctcaaacccaaggacaatgagttcacgtccaaaccctggcactggcctatcaactatcaggtaggatccaaggctggggctcctcccaggaaatggagccaagaacaagagcagggagaccggtggaggcgggggtgggtgtactagggcggcagggcgaggggcctcctgggatgggttggccagaggtgggagtatctgttttctgccctaattctgaccctgcttcccagagagctcgtgtagaatttgccagcctgaggttcgtgtccaggctccctgtctgtggaaggtgaccatcttcctccccctaatgggtgtggccgaggatgggctgggcctgggtcagcagggtggtctctattccacagggcctacgcttctcaggggtcaatgacacagatttccgagtctatctgcttggcaacccggtgagtgcctaaacattcccggctcaggccctggagcacttgcccgtggagagyggctgcgttctcatctgcccattcccatttctgcacaggtggtttggtggctgaatctgttgagcatcgccctctacctcctctcagggagcatcattgctgtagccatgcagagaggggcacggctgccagcggaggttgcaggtcaggtcctctgggctctccctcccctgacctggcggcagcagggcacctgcrcccctggggagggccggctgcctgctgatgggccatcctttgcgtttaccaccccacaccttcccttatcctttgcttttgaaaggtaacaacccccaagtacccagtgctgtgttaaacactttacttcctcccaacaacactagagcgttggctattatgacccccattttatggattaggaaaccaaggaaccatgagattaagaaacttgccccaggacatacagctagtaagtgatagagctgaggctcaaacccgtgcaatctgactccacagccctcacttttagccccatgctgtgtacagagctgcccatcttttctgccacctccttgttccatggccctgtcctctcatgggctagagaggagcctccagggttattgagttcccatcccagtgctgttcttggtaactttggctgccagaccatgggccacagcacctgagacagtcacacaggcccttttgcctctgcagctctctgtctgaacagtcatagtcccagacacctcctcactccatcctcacctgtaacctcaccttagcgcctgtctgccgctgcaaagatctgtgtggcagcaaagatgtgggaggtggaagtagggagtgaagctgtctgcaggcgcagaagggtttctttagaggctgggctgcctcctgctggtgcttggtgcacctgccattggtgcccaggcctcactaggctgggccctgaccagagctctcgagccccagctgctcctctccagtttctgtagcgtggtttgggttggtccaatgaggtgatatgacatattcaaggtcacacagcaaggaaggggcagagctggaccagagcctggaatctctgcccgctccttgtcttctgactgggctgtgctgcttgggcccagggttgtcccaggtcctgctkcgaggaggcggccaggtcctgctcggctggacactccattacttcccgtttttcctgatgggccgggtcctctacttccaccactacttcccagccatgctcttctcaagcatgttgacaggtcagtgccacccacctggacttgggagacagagcaggtggagggcgggccactgttgggcagcagtgctgggagtgactctgctccttgacgggaggccactgtggggcagcagtgctgggagtgactctctgctccttgacttggagtgcctccttcttctgtagcccagaagtcaccccctgcctggctgactccaggtttctctcctctcctctaggcattctgtgggacaccctcctgcggctctgtgcctggggcttggcctcatggcccctggcgaggggcatacatgtggcgggaatcctgagcctgctcctgggaactgcctacaggtgagcatctctgcacctcacatgccctcccagtgtgggctcagcagtgcctcagccctgatgcattcgagaatcccctgcggtgcttttaacaccaccagtgcccatgcctggaggttctgcgtcacccaagcccaggtggggccgtggtttccagagtcccccaggtgatcctaatgtgcagccaggtaggagaagcagggcttaactctgccttttccccttctgccggtggttcagcttttgtgccatcccagcgcacctggaagggtacccctctagtgacagtgactctgtgccagaacagctctcagagggggagtgtgggaatggggggcagggaacccctctttagtcaccatggccccctgtcagaacagctctccgggtgagggaggggggaaccggggggcartgggggacagggcacccctctttagtcactgtggccccctgccggaagagctctcgacgggtggggtgggaagggtgggaatgggaagtgtgtggctgagtggctgaaagggagagttgtttggaaggctccccgcttccccagtccctggccttggtgctgggcctgtggcctgtgagcacatgcctgcctaagagggttacattcacatgttgacaaacacccctggccaaatagcccatgacaagacccctagaagggttgccctcctgggcctcttgggaagagccctttccatgattgtcattgagtcagcatctactaagctctccagctacagtgtgccccagtgggactcagacagacaaggccgtgaaagagaaccgggcttggcgatggggaatttctctggagctccagcaggaggaatggaattcaaagcccctcagctgaggcactgggggtgccaactgcctcctactggttctctctcacagcttctacctcttccaccctctggcttacgggatggttggtcccctggcccaggacccccaaagtccaatggcaggactaaggtggctggactcatgggacttttgaggccactgcaaagattccagcctgggtccaggaacttcccaggagagccagctgggaagcagtactggaccatcyggccatgaggaagctgcctaaggagcccgaagaattctgctgctcaccaggacccagctctgggagtgcagctggaatggaacccagcattggagagagccgggagagagccgcagctccgtccacagcaccacggagaggacagcgcctcttgggctgctccctcgtgcacagcgcaggggaggatgggtgccagagggtgggagtgggtgcgcgtgtgtgtatgtgagggcatgttgtccatatccctgtggaatacagaccgtgtaactggacagctgagtgtcataaactctaaaatagtccaggctatagtaatattttctggtatttttttctgttggatttctttggttttggtttgtaagatccatcaaaaattctcagacctctgagagggccttgagggcagagaatactgacctcaccttgggatgtcaccaaaggcagagcagatgggactgtcaaagttgtgctgccctccctcccacaaacaaatgaatccagcgtggaggaaggcgcgccgccccgagctggagggcctggctcccaccatgccccccagtggctgcaggtagctggacttcctgcctgtgacgcacagagagcagcggactccggagcgtcagcctgccttagcccttggttcctcgttttttgggattgtcacactgtgacactcgggaggaacgatgtcctatcctgggctgctcartgttcccaggccctgtgtgccagaggccaggtctctccaagtgcatctagcctggcctggagggcaaggcagatgcattctcctggctgctgggagagcccatgggaaccttgcttagcgcccaaggtagatgagagacagggcagggaatctgcgtggtgctgggatgtggggactctggcctctccagactaatgttcctgtcacctgctgagctttcccagtgtcacttctgcagtcctcctctgctcacccctccctcactccrtgggcaattccctttctctctgtcactgcttcagcagtgaagacccatggcacctagaaatgcatgccagcttcctgcrtctaccactctgcagctcaaacaagaagctcagagctgccccttccacttcctccccaaaagggatgaagaaaaccctgtggtagaaccaaaccacccaaggccagcccttaagcctgcctccaccttcctggtgcatgacaaaatatttcttttgtctcagaggactttgatgcttcaatatttaatgatgaatccgccacactccattttccctcctctgaagctcccaacaactctgacagggtcagatctctttaaagcatcttcaggaggcggttgccacggagactggatattggtcccagggacaggctgtgctacctactgggtggtggggagggaagcttctggccatgcttgggcattcagaccaaccatcattaatgttaatagaggaaatgcagcaacgtcaaaagcaaggcaggttggttaattagatctggggcccgatgacctccctttcccactgctacagcccttttgacttcccccagcaggaagcgctgtctgtgcggctgagtctgggccacttgcttaattgcatttctggcagggaaggagaggagggatggagaagctctgctcgctgcttccacctcaccgtgtgtcctcccctcccctcccttcctctcctccccacaggcggaattgctttcttctgagccgggtgggctctcctgcagggagaatgcaggggtctgtgcttggctcttagcaaagcaggtggcccacagtgacctccaggaggtggctgattttcctttgtgccttcttatttctcagtaggaacttggaagggaagagctctgaaggagccagaggggcagccaccttgcatgagggtgaggaaggagaagcccagccagcctctacccatccctccctcccaattaggctgcactggggccgaacgcttccctgggctcccactgccttctaaggagccaaggagaattccctgcccactttctgttcctccatgcccaaactggcagatgcttctctgggagcaaggccacatgggctgatgcagctttgagtgctcaggttctgttttctggaagttgctggagaagggctgtcagggtgcttctatgaatatgggcttcagctgtagcacttggcagaaacgtgatgtgtcccacaaactgctggtggaggaagaagatgttcgtcagccaattcracctccagccagcttcttgagcctatttggtttaaaaaaaaaaagtcttctaatcagaagccactgattttataataaataacacttgttttgaatgccttgttgtccttgtacttaattgaatccgacttgccctctgctcccagaaaggcctccctgagaagaatgttttgagtgcaggaaccaccccgtgtgtcatgtctgaggctgatctaattccagcagaagacctgggctgggcaggtgagcctgattactccaggaggcatttggatctccccatgtgtacagttacttgagtaatgttggtcgtcattttggtatatttaaactgattccaaaataagtaggaagctggacctctgatttgtcctcttttaacctgttcacatggcatagaaaggagtgcaagaagaagttgtccccttcccagacagccgagtatcccagtgctgtagcaacttgccattctgcctaacagaggtccccatcttgacaggtgtctcctgttatcaggagtgatgcttaggagctgaaggcagcaggagctgacctgagtgttggacagaggatgggggaggggagtagcactgtgctgtggaactggggggcttctgggctgcctagccaccctctggtaggggctggtggggagagaggggcatgtggatcttcaggaggtggaacatgcctacgacaggcagtttaggaaggggccaagtcactcttccttgagtggcacagcttagtttacaaagtctcaacacatctctgacatttaatcctcataaaggcccagtgaagtcaatgatgtttttgttcccattctacccatgagagattaaatgacttgtcttaaggtcccacaacaagtaaatagtagagccaggactcagtgccaagtttgggtttttctgcctctctagtcttgtcctgggactagaggcaccttcccagaacagctgcagccttagataccctggggagaaggcctgagcactcagcccgaggtccctgaygcagcaccttcccgtgggccttctgcttaatgcatcagcagccgctcatctagggcccaggttttcctggctcccccaggtgcacccagatcagtgtgtgctggtagatgtttaacaacaggtgttctgggaggaaaaactggtgtgtatagcatttgccaatttccatggtgtaaatattcccaacatgttcttttttaagctaccaacttgatgtcactgaatgagaagttggaaagagatgcatacagttggttcttgaaagccatatgaaagctggctccagcacaccgctgaaccagacccagtgaccatggcttggtctgaattatggctggggctcttggccacagcccattaaagcaagggaggcatggaggcctacaggatgggccagagagacctgaggtcaaatcctggccccaccgcttattacctatgtgagcttgggctagttacttaacctctttgcctccatttcctcagctgtaaaacgagggtatgataaatagcacctacttcgtagttattgtgaggatgaaaagaggaaatgaagtaaggtgcccggaacactgtctagacataaatgccagctctgtattattaatgatacatgaacctcaatgaccagcactggctctgggacagtacttgaattctcctctaggttcttacctcctgggcggatgacccacagggaggagactcctgtgacttttactgagcccctcaaatgtgggcttggacccttggtctactgatgggaatacatcactctcatcgcttaggcccatccagattctcaggcctttcttgaagggagcagggatagagtgcacttaccttggcttatcttagcacatatctcctggctctaggaagacaaagagtgaagccatggtttgagtactgactctacttactagctagggccgttaactcccactacctcatcagactccagaccctggccagaggagagaggaagcaagatgggtcctaagtatagattgctggcaagaagcgtgagctgggtagagtggggtacctgagaccagccaggtggcctgcacagagcactgagcatctgggcactgaatagtgaaggtcaccaatgacacgtgtccttgccctgtgacctgctgcacctggctgcaggtccacgggaccccaagctggaagtttagtcacgtcttgttccttcagccccaatcactttgtgttcttgcttggagacctcttggaccctaggacaccagcttttccaggctgccttatagccttgctctcctgctccagcccagagatttgtgaggaaatgggaaatagaataggggttaccacaaactcctgagtccttggaagagggagaacagctagatgatttcctggggcatggctaggagtaggaaagaaaagttctgctgaggcactcagttctgattcagggccagaaggagaaattttaaagaccaggactcgccactccatgtctagcacagggctgggcatggagccccagctgttcataaccaggggctcaagaacacccaccttctacccatggaactaaaggaggtggactaaaaggtcccagagacctcaccacccaacccctttgctgcacaactgaggaaacagggccagagaggcgtggacagacagaggagataggctcggagacccctgagggaataatgagagagaaataaaggtgaaaacgggcttgctctcccaaacctgggccaccagcactgggctggggcttgaggaactttctgcttgaaagagaaaagtttagttgtaattggcaggtggccaattgcacaccctgagtggggagcatggattctattatctgaacttctattgaaaaaattaaacagtacttccgttaaaaaaaaaaaaaaaaaaggccgggcgcagtggttcacgcctgtaatccccagcactttgggaggccgaggtgggcggatcatgaggtcaggagatcgagaccatcctgtctaacacggtgaaaccccgtctctactcaaaatacaaaaaatcagcctggcgtggtggcgggcgcctgtagtcccagctactcgggaggctgaggcaggagaatggcgtgaacccgggaggcggagcttgcagtgagccgagatcacgctattgcactccagcctgggcgacagagtgagactccgtctcaaacaaacaaacaaaaagatgaaaaatcatggaagtggggaaggcccagggagggaagaggtgaaaaattaaaattaaaattaaaattaaatcatggaacggtagaatgttagagctgaactccctcaagattccaccctggccaagcagagctgggattagaactggatctcacggctttctaaagatggagtctcaaaaaaacccaggcctggctgggaatggctgtggtcttggccctgtccctacggctgaaagccctggtggcccccaacgtgtgctggtgccctagtcagaccgagaactaggcccctaggccgcctccccaggcctgacctgcaggccaggtgggtggcaaactcaaatgcctctggcaatgcgtgagttgaggggcctgtggagagggggcgcatgcagcgcctacctgaggcgaccaaattcaacacagtgccctcggggctcgggaggagaaactgaggcccagagagcctccgcgatgtcagttacgttctgcaggccgggcctttcccaggccaccatagcggctggcggagggagcgcgcgccttgctggcctggagggggcgggggccgtggcggctttaaagcgcccagcccaggcgtcgcggggtggggcggctctggcggctgcggggcgcagggcgcagcggccaagcggggtccccggaagcacagctggggtgtctccacctacgactggccgcgcgccttttctctcccgcgccagggaaggagcggctgcggcccccgccgggcggaggcacggggggcgtacgaggggcggaggggaccgcgtcgcggaggagatggcgcggcacgtgcggtgacggcacccgagccctgagggtcccagccccgcgctccgcgtccccgggacagcatggagcgcccggagcccgagctgatccggcagagctggcgggcagtgagccgcagcccgctggagcacggcaccgtcctgtttgccaggtgagggctacacgagcgcccggggatgcgggtggaggctgcctcggcgggaaaggggtcacgcggcaggaccggccccgaaggagggaaaactggccgctgccggggcgctggggcgcctgccagatgtgcgccagaggagcggggcgcggcgacgggtggcacagcccctctgcctctctctcgaccgtgggcgcctgttgccaaccagcgccgcacaccactctcccagcggggctcaccgggccgggcgggatcccctcccgcggatctccccacatctgggcgggtggacctccgtccctgcgcggcgcctccaccccgccttgtgcctcctgcgtcttccttaggtagcgactgcaggggtgcaccccgctgccggtatcagggtactggggtgccccgagagccggggaagggagatgtgtggggcgagctcctgcgcccgcgtgtgagcggtctggctccaggtgtgtggatccctgacaaccaacaagacaaacctttccgaggaaagagccagagagcagccggggaaggggtgacagatgcgggagcctcaccgcaggggagaggggtggggggtgtgcaggccgggtgggaagggaaggccagtctccaacctcagctcgcagttttggtaacccttccgctatcaccaaccgggcactgcttccctcaccgtggtgttacctatccttggcacccttggacagtccagaacttctacccaggcttccgcaaaaccacccccaagacaaaaggggaaaacattcagttacccggtgagacctcccaaatgccgaggagggcctctgcttctgcctccggactccccccagctcacttttttctcaggcacccgctgtggctgcactacatccaagctgtgtgaccttaggcgagttctagcctccccgggcttctgttttctcctctataaaactgggataacagttgtacccactgcttaggacagtgaggaatacagttaaaagttaaccacacggaaagtactcagcgcaggagggggggggcggggggagagggagagggagagagagagagagagagagagagagagagagagagagagagagaaagggctttcctctccacacaacgtaactccaggtttcctgtttggggacctcttcctgtcccaaatcacacccctcagctattcaccgagggacccctgcttaccagaggccctgggacacatttgccctttctaggatgctgcccagagccagtagaaggcatgaggaggagggcactaccgaagctggcgggggagcagtgccaggtgggagagtcagctgtggtttgcagctgagacctggcttggcacccccgcccgctgactgcaggacagccaggcttgctggggcttgcaggagctcacaccccagggctaacacctgggcctcactcccacaggctgtttgccctggagcctgacctgctgcccctcttccagtacaactgccgccagttctccagcccagaggactgtctctcctcgcctgagttcctggaccacatcaggaaggtgagagggaggcagagctgctgtgacctctgggatccagcagagcacctccctggtggagaatggagaaaatgactttctgccccaggtctagtcttactcccttccagttcccccaagcagggtacagctcctttccctctgggctggattggtctgggacatcagaatcagcctcttcccctaccctgcgttcagagagctggtcccagcctgtgtcattgcctttgtcctctggctcccataggttgtgttagcacagatcctggtaattgggaactatctgcctatgaaaatcaggctgagattttcttagaatctcatgattctcaaag

SEQ ID NO: 95041 - DNA, 28875 bp, Homo sapiens
tctctccctttctcccctttagaaacaattccaaactgtcctctctgagtagcatctactgtgttagcccaagtggaatactgatgtactgttcaaatgatagaaaaggagaactcgtggagaaaagacatcagggagaaatgagcagagcactggatcacagctagagcactcattgctggcatgtgtatctggctcgaggatcaggagaagtgtgctctttcctgcttactgaggcagcatggaagtactgtgtagcgttacctcattcccattgcagaactagtcctgtggttgatgatggaaactggaaacattagctattgaactcttttgccttcttcaggactttcttttctaccttgtagagctctgtgccttatgggtgtttgaatcattaatcggaagtacctcttcccacagatattacaggagtatgtcaatctggtggaagatgtggacacgaagttgaacttagccactaagttcaagtgccatgatgtcgtcattgatgtgagtccccaagaaatgggagtcctccgttagatcctcagtggcgaagcagggtggggattataatattctctgtccaagatcctgaggtgctcccaccaggtttgactgaatggacagaataatctggcaagagtttgtttggagaccagcactcctgtattattttcccagccctctgactgctttctctgtgtttttataaacttgtcgtacttggagaattcatagaactaaatcaagctatacaagctgtgtagtcttctctccaacatggagttctgtgggcactggaccccactgttatcccactatagcctcttagcctctccttgagcgttgggtcaaagtgataatgacaaaaagaaataagccctcatgtgtacacagtagcacacaccagtagttccagctactcaggagcctaaggagagaggattgcttgagcccaggagtttgagaccatcctgggcaaaaagaaccctgtacagaggctgattggaggtttgtattgtttgttttgatgcacagacctaccgggacctgaaggatcgtcaacagttgctagcatacaggagtaaggtagataaaggatcagcagaggaggagaagattgatgctcttctcagcagctcggtgagcagctacagttcacccctccagcaggctcaggagacagacagttcacaaaatagtaccaaatgtatgttcccaaggtctggaaggattgcagttggctaagccacatggatgtaaggctctcctctggccacaatgtcaaaagcactgctttgaatagcagaaattactcctgagatgcggtatgataggggggtaatctggggacctcaagctaagacttaactgtaatgctgtgataatagttaaacctagcatgtaggagaaactaaatattgaaagtatgaaaacatgttacagattcagaatatccaaactgtatggtctcgtggggatggatgggacctaccagttgaaaataagaagtgggtgaaatagatgttagctacctggggagcacagctggttcgtctctcacagcaggaaattactgagctctttgttaatatgaaagttagttccctgttaggtattttggaacctaccttagggtcaaatgaccaaaattaggcttgtaaaatacaaaataggtgtttaatgcatctttgaataaatgaactcccccatatattttaaaaaatttctcaacatcccccacctcctgatctgattctactttttcttttccttacattatctagctgagccttgttttgttgcattttctctgccttgctgtagggataagtgaaaactgatcacacactttcattgtttcctctttccacagcaaattcgatggaagaattaagtggcattgactaccttgaagcctgcctcatttcctcctctcctgcctgtgaaagcagagagagctcttctttgggagagctgcggcatcacatcgcttgggcccattacccatgggcagtgccagctactcttgacacagataacttcagactgatcttctgtccaaggaacatcatctgaggatcgagatctaaagctttgagtcatgagaatgattctctccacctggtgctcatatgaaggtgggagtgatttctagattgggcccctactgggtaagatctcacttggtctgagaaaagtgactgctccagaaaggaagaggtatgggagtcatagggtggctactgcattccactcagctaattatgatccaggacttggcgctggacattggcagttctgctctgaatgaagtcagaacagaaccaaaatggcctcaggaaggaatgccagtgtttcccaagacctcctggagatgcactcacaccagactgcacagacccctccacattatgccacacacggcctagacgttgtgtttcctcagccattttccctctgctgccccagtttactctgtccaaaaccctaaggttcttctctcacttgaacacagacgaccttgcttgggtgatgagacatcccctttatctcttcctctactgctggccaagacccgtcactttataagaagctcagatgcagcagtgctggagagctctctctttatgcaaaaatctcatttcaccaggagctttcagaagtttcacctgggctaaattcagcagcatttctgttaggatatttagatggaggttttattttcacacttggattcttgctctgtaccaatatttgcctccttttctgtgactgaactgggtttttctgacatgcctagactcctaataaaggtatttcttccttggtgccttctctcccgctcctggtggttttgtgtagaatgatgaaataattgctcaggatcttaggatcattacaagtcttcctcagtgactgcatttagcagcctgtcggcacatgtcaggttatagagtaacagtgctatggcaaagcagggctgtgtggttaacagaaacagcacggtgctgggagacacaagacctgactttttccagctctaccactaaatagttatgtgatgctgggtgagtccctttctttctctggattcattagataatctaaaattttgtagagtttgtttgtttgtgagatggtgtctcgctctgtcgcccaggctggagtgcagtggcgctctcagctcactgcaacctccacctcccaggttcagatgattctcctgcctcagcctcccaagtagctgggattacaggcacctgccaccacgcccagctaatttttgtatttttagtagagacagggtttcgccatgttggccaggctggtctcaaactcctgacctcagttgatccgcctgccttggcctcccaaagtgctgggattataggcatgagccaccgcacccggcctgtttttaaatagacatggtctgtcacccaggctggagtgcagcggcaccgtcatggctcactgcagccttgacatcccagactcaagcaatcttcctgcttcagcctcctgagtagctgggactacaggcacgtgccaccacacccagctaacattttgtagagttctgtgctcctgtgactgtggagtgggtgaagtcatagaaggcaaagagaagatgctcctacagaggcacatgccatgccttaaggcaatatggctctcaactggaggcagttttgcccctcaagagacatttggcaatgttcgaagttgctttctgttgccacactaggcgtgctactggcatccagtgggtagaggtcagggacgctgctaaacgccctacaatccacaggacagccccacaacaaaggattatcctgcccacatgttagcaacaccagtgttgagaaactgctttaaggggatcagactccatcttttgctcctccactttgcaattccaggtaacctcatatttagttcctttcttgatcatccttcttgctattgaagaaacaagagtttaatttgctagattgtactaaaattattggttcatcttcaaacaaacagtggttactttattaactagtatattggttagggttcatttagagaagcagaaccactaggcatatatatgcattatctaatctaatctaatctaatctatatctgctgtttgttagagaattttgacctttctctgacctgtttagagaaattggatgagaagtaccgaggagtagagcctgtcttttctgtttgagtacttccactcaagtatggcagctggagggtgtgtttaacgtagttgtcttcatgtccagtggtagagcttgaaatccatagggaaggccgtgaagaagggaagatcattataaagtgagtgagcagggacaagctagaaaccatgagaagggactgggacccatgtcagttctcacagcctcaaaccttgatgaggtgggtgtcccgctgctggaaaagctagtggcctttgtcatggaaatgaaaaacacctggcccaggagtgagcaactgaagaaggaaccagggaagatgtagcagttacaggcccaactgttgcccctcaccaacaaggtactcagcagataaacaacaacatgtgtgaactacaaaagtacttcccctgattatgcacactgaaacacagactggttactgttcatttccaccctcctgatcttgcatagaaatatctctggtggtccaccttaactggaaacatacagggaaggacattctggaaattgcagttcagcctagccaaggtgacataatacaaaatataacaactgatccccacttttgagaatgcataagtaaaggataggcctagaattcatgtctgtacaacttgtatgctgcattggtcatgctaatctaggttttgagcttctttttccttcggagcaggaagcattacttggcaacattaggatgacctactgactgttttggtgtaagaaaatgtttcttaggtttgatgagaacgtccatgcccctcatttcaagtgcagagactttgcttttactttattttattttttatttttttgagatggagtctccctctgccgcccaggctggagtacaatggcgcaatctcagctcactgcaaccaacgtccatctcccaggttcaagcaattctcctgcctcagcctcctgagtagctgagattacagacgtgccaccacacccagctaataagtagctgccaccatgcccagctttttagtagagatggggtttcaccgtgttagtcaggctggtcaaactcctgacctcaagcgatccgcctgcctcggcctcccaaagtgctgcgattacaggcgtgagccaccacgccagggtgagactttgcttttaaagagatggtgtcgtcatataacagccttcctataaaagggattagagaagccagacacaaaaggtcacatattgtatgattccatttatataaaatatctggaataggtaaatccattcagacagaaagcagattggtggttccagaggctgagggtggggagggatagggagtaactgcttaatgggtgtaggcgttccttttgggaatatgaaagtattttgcaacaagatagaggtggtggcacaacattctgaatgtactgatgaattgttcactttaaaatggctaattttatgttatgtggatttcacctgaaaaaattttattggtttcttgaacacaaaaagaaggagttgtaaactaactcaagtagtgctaagatctgtaagatattctagtctgcaaaaaaaacccctagaaatccagaatcttctgttgggaaaaggagggtctcatactgctctagtgtagtactcctagaaatagtggaaggaactcatgtcctgatacgcagctcaggaaaacctctaagtggggctggcctctttaagacttagagactgtaatctggtagttaaggagtcataatcacaagtttcttgggtaattctccttagaaatgtagttcttaccttccaggatcagaagtactgaggagcagagccaatcttctctgtttggtgatagatatatgtagatgggtttatatgactttgagtttagtttgtaaaatctagatgtccctgccctagacaggggacaatgatatttagtttgggttattttgtaccctgtggagaacagagtttagtgaaagggaagcatttctttgaaatgtggttctatgtgttcagtcctatttccaaaacgcaggagggaatggaagggaaaacgtcctggcccaagaatacctgtaaaactcaattgctgttgtaaattcatctgccgaaaacagtgcctgtaacctgtgtggagaaacaatactttgggtttctgtacaggtttttcatgagtccaggattcatgggcagccagtgattaggaatcctcaaacactcacactctagagtgtgaattcaagagaggtgaattccaaattcagaatctgggagtagagaggtgctgaagcccatcatcatgagtgcttgtgacctgggcacacacaccatcatacacacacctcctacatagacccctcttctaccgggacagggagccaaattgattagtgtctatcactgcaggaaatagtggcttggaaatggacatgctccaggaccttgagtccctgcagtttgagtatggggttccagaggaagatcgtatctggctgtatttgcagggccgttctcggggactgatgatcgaggcttgtgcccatgcaaccttcttctgcaaactattatataatttgaggtaagccgagtatccaaattcaggaagatggacaagartctcactgctgagaattcaaatgtcttaaattttttttatattggagggtaagtttggctggtggattgtcatcctatcttttccaacccagagtcaatgactcctggtctaaaaggacaggaaaatctataccagggtcccctggctgtggttacataataaagcatggattagtagtgattaccttttagtggatggattgattaaatgatcatttattcatccattcactcagtcatcatgaccaccagcttgccctccacagttgctaatgtctagccattccttatctattggcaaggaatgcaaatggaatcagttctttcttttggggctgaggtaatagtggaatgctcccttacaggaagctacccrggacttcacaggccctgtgccagtgacttccttgaaaccaggaatattgatttgcagaaaagctgtcagtccagtcttgattctgatatctttctacaatatggcttcagacacttaaataggaaatgtgtgtgaagcaggtacctataattaggcttctgaattctgcaactccaggtcactctgggagcatatgtcacctcctcactctacttcttagtttttctctgaagttagattaattcctagatggtgggaccaaatttgaattgaacatgtttatagatacagcacatgtccaaggaggcaggcttctcagtgaatttactgactggcttactgataaggatgcataaayctattggtggtactcaatatgactgggagaaaacaatatatgaaacttgcaggtggcattttatatttggaaggatcaggcactaagagaaaatgctctttcaaccaggagagaaggcttaaatagagwgtgacttatgttgcttagaagcaaaatccagagctttaagacactggtttttacagaaatacagaacaaatataaggctgtcatatagcaacgaaagtataccttatgtattcagaagtctgactttgttaatcttgcgccaaggaaacacatccagcaccaacagtaagtgaacctctggaaatagtggtctgaaatcttcatccttagtttctcagttctgttcttttttgttttgtttttgtagtttaaagttgtaccctgaatgaacactgttttgtttttataaaccatttatgtgtataagtcataaccttcttaaaaagccaagttatctggtttctcaagtctgcagatttgaaatagcaaactagaaagagtgggtgtatcgtaggaaaggaatgcactcacatctaatagcaataaaaattgacatctgtctcagattggtatcagtaagatgaagaaataggaagctccagactctgtaacctcragacactaacttaacaacaatatatggtccaaaaagcctttatgaaacctccagcaagcacttaagaaattgtagtgccctggagaggtacaaatccaagaacagctgcatttacaggggtaagaaaagccattgcagttcacctaagatatccctttcctcaagccagcctcaggtgatcaggagaaaatgcctaatttgtggcttctcctttggagggaaaaagaaaaatggaatgtttgtccactgttctgcctttttgggggctgcctgagggattggtttctgtctcacatgacttggagcactgatgaggaaccaacatattttggatgaaaacaaaggatcactcagtggcttgttgcagtacagagaacctgcagtactgcagatagataccaaagtgaggaaaagattatcagcccctgcaatagaaacaggcaaaactctttaattgggaaattccaaactcaagcccagagaagacacattcctggaaagatttgacaggccccagaatctctagctgggctgattgggaaagatcttcccctgtatggtgccagtctgtaaagattgggagaggcctgactgttttttcaaatgcccaaattccaccaaaaattaaaaaggcaatattgctcaaccataagaacaaactactgcagaaaccagccctaaagaaacagatctgtgagttacctaacaaagaattcaaagtaataatcttaaagaggctcaatgagctacaaaacacagaaaaacaactaggctgggcaaagtttacagattacagattacaggcctgtaatttgtaattacaaattacaaattacaaattacaggcctgtaatcccagcagtttgggatgctgaggtgggaggattatttgagcccaggagtttgagaccagcctgggcaacatagtgagaccctgtctctgaaaaaacaaaacaamamaaaaaaaaactgatgaaatcaggaaaacaatacatgaataaaataatatcataaagagaaactaagaaccaaaatttggagctggagagcacaataattgaattgaaacaactcactagagtggttcaacattagacttgatcacacagaagaaagaatcagcaaatttgaagaccagttatttgaaattatgaaatcagaagagcaaaaagaaaagaaaagtgaagaaaatctagaggacttacaggatactatcaagtgggtcaatatatgccttatgggaatgtcagaaggagaagagaggcagagcaaggtgcaaagagcttatttgaagaaataatggccaaaaacatcccagatctgaggaaggaaatggacatccaaattcaagaagctcagaggactccaatttggatgaacccaaagaggaccacacagagacacgttataatcaaaccatcaaaagtcaaagacaaagaatactgaaagctgcaaagaaaaagcaacttatcacatgcaagggagttcccagaagactattggtggcttctcagcagaaacattacaggccagaagggagtgcttgatatattcaaagtgctgaaaggggaaagaaaaaaaaaacctgttggtcaggtgyggtggctcacgcctgtaatcccagcactttgggaggctgaggggggcggatcacgatgtcaggacatcgagaccatcctggctaacatggtgaaaaaccgtctctactaaaaatacaaaaaattagcygggcgtggtggcgggcgcctatagtcccagctacttgggaggctgaggcaggagaatggcgtgaacccgggaggcggaggtagcagtgagccamgattgcaccactgcagtccagcctgggcgaaagagcgagactctgtctcaaaaaaaaaaaaaaaaaaaaggaaaaagaaaaaaaaaaacctgtcaaccaagaatactatctcttgcaaacctgtgcttcaaaaactaaggagaagctgggcatggtggctcacatctgtgaccccagcactttgggaggccgaggygggcagatctcctgaggtcaggagttcaagaccagcctggccaacgtggtgaaaccctgtctctactaaaaatacaaaaattagctgggcatggtggcaggtacctgtaatcccagatacttgggaggctgaggcaggagaattgcttgaacccagggaggcagaggttgcagtgatctgagattgcaccactgcacttcagcctgggtgacaatagcaaaactctatctcaagaaaaaaaaaaaaaaagagaaagaaagagcttcccagataaacaacaacaaaaaacctcatcactcctggacctgccttacaactaatgctgaagggaatccttaagttgaaatgaaaacatgctagtcaacaacacaaaagtatacaaaaataaaaagctctctggcaaaggtgaatatatagccatatacataatactgtkatgggtggcacataaatcatttttaattgtggtataggatttaaagataaaagctggccaagtgtgatggctcacacctgtaatctcagcactttgggaggccaaggcaggagaattgcttgggcttaggtgtttgagactagcctgggcaacatagggagacaacatctcttaaaaaaaaaaacaattagctgggcatagtggtacacacctgtggtctcaggtacgtggtagtctgatgtgggaggattgcttgagcctggaaagtagaggctgcagtgagcaatgatcatgtcactgcactctaacctgggtgacagagcgagaccctgtctcataaatagataaataaaatgtatataaaaatgtaaatatagaaataataaaatgtataaaataaaattataaatatcaataagtataaatataaataataaaaattaaaaataggcttggcacggtggcttacgcctgtaatccagcactttgggaggctaaggcaggcggatcgcttgattccagaagttcgagaccaacctaggcaatgtggtaaaaccctgtctctactagaaataacaaaaattagccaagtatgatggtgtgtgcctgtagtcccagctacctgggaggctgaggcgggaggatcacctgagcccaggagatcaaggctgaagtgagctgtgttcacgccactgtactctagcctgggccacagggtgagaccctgtctcaaaaataaaaatactaaaaaaaaacctattactataaaaccatgctaatggatacaaaatatccaaaagatataattcatgagataaataacaaaaakcaggggtaggggaagatgaagtagagtttttgtatatgattgacattatcatcttaaaataggttgttacaactatttttatgatttttatgcaatttcctacggtaactacaaagaaaataccaacaacaaaaagaaaataatgtcattacaaaaaaaaaaaatcagtgaaatacaaaagaaggcagcaagagaggaaaagaagaacaaaactgcaacacagagaaaaaaacaaactggcagtgataagtccttccctatcagtaattattttaaatgtaagtggattaaacccatcaatcaaaagataccgagtggctgaatggataaaaaacaaaaacaaaaacaagatccaacgtatatcttgtcttcaagagactcactttagatgttaggacacatataggctgaaagtcagaccatagagaaagataattccacgtaaatggtaaccaaaaaagaacaggagtagtcatacttgtatcagacaaaataggttttaagtcaaaaactgtcatgagagacaaagaatgacatgatgataaaaagaccaattcaccaggaagacacaacaattatatatgtacttaacatcagaacatccacatatatgaggcaaatattgacataactgaaggtatacaattatagtaggagattttaatacccaactttcaataatggatagaasaaccagacaaaaggttagtaaggaaacagaagacttgaacaacatgacacaccaattagaacctaatggacaagtacataacactccactcagcagcagaatacacgttcttttcaagtgcacatggaacattttccaggatagatcacgttaggtcacaaaataagtcctaacaaatttaagaagattcaaatcataccaaccgtcttttttttttttttttgaccataatagaatgatactagaaatagcagaagaaaaactagaaagttcacaaatatgtggaagtcaacacaactcttgaacaaccaatgaatcaaacaggaaatcacaaggaaaatttgaaaatatcttaagtgaaaatgaaaacaacataccaaaacttatgggttgcaacaaaagcagtactatgagcaaactttataggggtaaatgcctacgttaaaaataagaaagggccgcccctactgggaggtgaggagcccctcygcccggccagccgccccgtccrggagggaggtgggggggtcagccccccgcccgrccagccgcccygtccgggaggtgaggggcgcctctgcccggccgcccctactgggaagtgaggagcccctctgcccagccaccaccccgtctgggaggtgtacccaacagctcattgagaacgggccatgatgacaatggcggttttgtggaatagaaaggggggaagggtggggaaaagattgagaaatcggatggttgccgtgtctgtgtagaaagaggtagacatgggagacttttcattttgttctgtactaagaaaaattcttctgccttgggatcctgttgatcggtgaccttacccccaaccctgtgctctctgaaacatgtgctgtatccactcagggttgaatggattaagggcggtgcaagatgtgctttgttaaacagatgcttgaaggcagcatgctccttaagagtcatcaccactccctaatctcaagtacccagggacacaaacactgtggaaggccgcaaggtcctctgcctaggaaaaccagagacctttgttcacttgtttatctgctgaccttcccacgctattgtcctatgaccctgtagattgctgtctacagatgcactgcaatccttatcaaaatcccaatgacatttttcatgaagatagaaaaaaaatccaaaaattgatatggatgaagcttgaggacattatgctaagtgaaattagccatgtacaaaaagacaatactrcataattctacttatatgaggtatctaaagtagtggaacagaaagtagaatggtagtttccaggggctggggagagagaaaaattgtatagagtttcaggtcgggtgtggtggctcatgcctataatcccagcactttgggaggcggaggtgggcggatcacttgaagtggggagttcgagaccagcctggccaacatggagaacctcatctctactaaaaatacaaaaattagctgggcgtggggtgtggtgacacgcgcctgtaatcccagctagtcagtaggctgaggcagagaattgcttgaatgtgagaggtggaggttgcagtgagctgagattgtgccgcagcactccagctcaggcaatggagggagactgtctcgaaaaaaaaaaaaaagcatatagagttccagttttgcaagatggaaaggttctaaagagctgttgcacaactatatctatatgtctgtctgtctgtctatctatctatctatctatctatctatctatctatctatctatctatatgtattttctttttttgagatcaagtcttgctctattgcccaggctggagtgcagtagtggatcttggctcactgcaacctccacctcccgggttcaagagattctcctgcctcagcctyctgagtagcagagactacaggtttacaccatcatgctgggctaatttttatatttttaatagagatggggtttcaccatgttggccaggctggtcttaaacttttgacctcaagtgatccacacgccttggcctcccaaagtgctgggattacaggcatcagctaccatgcctagccacaatgtgcatataattaacacaactgtactgtgcactttaaaaatggttatgatggtgaagttcatggtgtgtgtgtgtgtgtgtgtgtgtgttttcctgagacagggtcttgctctgtcactcaggctggagtacagtggcacgagcacagctcactgcagcctcaaactcctgggctcaagcaatcctcccacctcagcctcctgggtagctgggactacaggtgtgcaccaccatacctggctaattcttgtattttttgtagagacgaggtcttacatgttgcccaggctggtctcaaactcctgagctcaagtgatctgcctgccttggcctctcaaagtgctgggattatagatgtgagccaccgtacccagcatgtgttttttaaccacaataaaaaaaaaaattgaaagctgtctgcacagaaacaaacaaaacatgaggggactggcmcacaatgtgttatagacattacrgtatgctgtataatagtggctgttcacagtggtgtcctgagccagtgaaatgattaaatattcagactgtttaaccaggcaagcataatacatgtaacaaagtatgttcatttaaaacattttaaattttggtcccttgaaaagggttatacttttgtttctggaaaattaactcaggaggaacatttcattccctagtgaggctggataaatgacacacagttgaaatgtcttatctccgaagtacttaaggtgccaccaagcaccttaaatgacaaagcagaaaatgtcagagaatgacagttaagaagaactaggccgggtgcggtggctctcgcctgtaatcccagcactttgggaggccaacacgggtggatcacgaggtcaggagatggagaccatcctggctaatacagtgaaaccctgtttctactaaaaatacaaaaaattagccgggagtggtggcaggcacctgtagtcccagctactcgggagacaggcaggagaatggcgtgaacctgggaggcggagcttgcggtgagtcgagatcaccccattgcactctaacctgggcgacaaagcaagactctgtctcaaaaaawaaaaaaaaaraaaaactagtgtgtgcatgtatttatgtacrtgtctgtgtgttcattctccagagcatcattaaataagaatcaaagttccagacatctctcaattggctcccttaattcagccactcctgaagagtttaaggtgggcatcattggaggtggccaccttgggaagcagctggctggcacactgctgcagcttggccccatccctgctgaaagcctgcgratctccactcggaggccagagactctgggtgaggagcagtgtgtggtagaaagggggcttggttgtgctgtgtaggtgtcaacaaagccattttgaaagggtcctccaaagaggaatccttgcatacagcgtgtggagttctcagcttgctagccctaagaaaggttagaagcatggccttttctcctgttctttaaagcractttttttctccatgtatgtgttttatatccatgtctcctccctgtgcccttggtggtgaagtatctttccagatctttgatacagggaagctttccatacagagttcagatcttctaactgaatcagttagggtctggttgggtgttaaacagttccaggcatttgcagttggccttatatttttaaaaatgacatttactgactttaaaaaaatgttttgtggtcgggcgcggtggctcacgcctgtaatcacagcactttgggaggccaaggcgggcagatgacgaggtcaagagattgagaccatcctggccaacatagtgaaaccctgtctctattaaaaatacaaaaattagctgggcatgatggtgcrtgcctgtagtcccagctactcaggaggctgacgcaggagaattgcttgaacccaggaggcagaggttgcagtgagctgagatcacaccactgcactccagcctggagatagagtaagactccgtctcaaaaaaaaaaaaaaaaaagttttgtaatgattccatttatggtgatagaaatcagaacaatgatttcttctggggagatagactgagaaagtcccaaagcaactttttctggggagatgaaaatgttttatatcttgagagagaggtatgggttaaatgggtgtatgcttttgtcaaaactgatcaaactgtacacttcatatctgtgttttgcattatatgtaaattatacttcaataataaaaaatgtaaaataatatgcatattgtagaaaatttgtctacaaggaaggatacaactacctataatctactcgggttatttccttcccgtgttttttttttctctaattatatcagtaatcgacactgtatatagttgtttgtattctgtttttttttacataatgtatcatgagcatattctcgtatcgtttaacattttttgaaataatgatttgcccacacctgtaatcccagtactttgggaggccgaggtgggcagatcacctgaggtcaggagtttgagaccagcctggccaacatggtgaaacccagtctctactaaaaatacaaaaattagccaggtgtagtggtgggttcctgtagtcccagctactcaggcggctgaggcaggcaaatcacttgaacccaggaggcggagcttgcagtgaggtgagatcacatcattgcactccagcctcagcaacrgagtaagactctgtctcaattaatcaatcaataagaaataatgatgttaagcccctccactttcccacagtagaaggttaccccagcaggctttgagcacagtctcttgcatctccctagcagggtgtgcttgctgtacctggtgtttggatgcacagactatgtagttgtgcccagcagtggctaagaccactagacaccctacactattcttcctttctctgttttcatctcaggatttaaaattttaattatattagtaagagattaatgtaaaaaaatagattttaaggttgtataatatcccaaagtatggatgtaccataatttatgtaactatgccttatttagttgaacttccttgtacataattttccaaataaagttattaggccaaagaattggtacagctttattaaattttttttttttttttttttttttttagactgagtcttgctctgtcacctaggctggagtgcagatcgtggagagcacgatctcggctcactgcaacctctgcctcccgggttcaagcgattctcccgcctcagcctcctgagtagctggaattacaggcatacgccaccacacccagctaaatttttttgcatttttagtagagacggggtttcaccatgttagccaggctggtcttgtactcctgacctcaggtgatctgcctgcctcggcctcccaaagtgccgggattacaggcgtgagccactgcacctgcccctaaaatattatttctatacaataaatggcacacagttaaaagagtacaatttgatgytttgacacgtatacaactgtgaaaccatcacaaggtaatgaacgtatcccatcacccccaaaagttgccacttgtctttggtaatccctttctgtccacttccctgaagctctccacccatgaaaccaacaatctgatttctgtcaccatagattagtgtgcattttctagaattttatctaaatggaatcatacagtttgtagtgtttttttagtctaacttctttcacactgcataatttgtttgaaatatatccaagttttttttttttttttttttttgagacagagtctcactctgtcacccaggctggagtacagtggtgtgatctcggctcacggcaacctcagcctcccgggttcaagcgattctcctgccccagcctcccaagtagttgggattacatgcgctcaccaccatgcccagctaattttttgtatttttaatagagatggtgtttcatcatgttggccaggctggtctccaactcctgacctcaagtgatcctcccacctcagcctcccaaagtgctgggattacaagcgtgagccaccatgcccagctgaaatatatccacgtttttaatgtatcaatatccttttttatttctgagtagtatttccctgcatgattattccacagtttatttatttggttgacttaggctgtttgcagtttctggctattacaaataaagctgccatgaatacatgtatataagtgttcatgtaggcaactactttcatttttcttgggtaaatatgtggcagtgaaatggctgggtcatgtggtaggtatatctttaaaatttaaagaaacttctaatgtattttttcaaattgacctcccaaaaggttttcaggtatacttttttaccaacattgcataagaacacccatttcactacacacaggtcagtgctgggatcatttttaacatcaccattttaatatactttaaattattttcttgttttaatatgtctttcattaatcaatagaagagttttattttcttaggtttattactatgtcattttttctgaggtgcttctgaccattttttctgttggtgtgcctgtatttttcttacttactttatttatgtatttatttatgtatatatgtatttatttattttgagatggagtctcactttgtcacccaggctggagtgtagtggcatgatctcggctcactacaacctccctgcctcccaagctcaagtgattctcatgcctcagcccctcacatacctgggattacaggcacacaccaccatgcccagctaatttttgtataatattttagtagagacagggttttgccatgttggccaggctggtctcgaactcctggcctcaagtgatccatttgccttagcctcccaaagtgctgggatataggtgtgagccacagtgcccaggtttatttttcttattgatttgtaatgtttttttctttttttcttttggtttataaatagagacagggtgtcactctaatgccgaggctagtcttaaactgctaggctcaaccagtcctcccacttcaccctctgaaagtgcaggtattgcaggagtaagtcaccacacctggccattttttttttcctatattcctaaggaaactaaaaaaaaaatcttaccaactgggcatggtggctcatgccggtaatcccagcactctgagagactgagtcagctgcatcacttgaggccaggagtttgagaccagcctggccaacatgatgaaaccccatctctgctaaaaatacaaaacttagccaggcatgatggcacataccttcgaatcccagctacaggggaggaatgagaattgctcgaacccaggaggcagaagttgcagtgagccaaaattgtaccacgcactccagcctggatgacagagcaagactctgtctcaaaaaaaaaaaaaaaatctcaaggtatatatctttatcccatcaataggactaatatatgtgatatttcaacaaagtatatatattctttgcaaagcaatatatttattagaataaaattatagttgtaaaatatcactatgtgttgtgtaaggaaacaataattcaaaatgctcaacatcagcttctatgcacatgaaaagaatgagaacaacacaggagagaatgatagataggcctgttttctaaactttgtcctgttgtattagtctgttttcacactgctataaagatactgtctgagactgggtaatttataaacaaaagaggtttaattgactcacagttctgcatggctgtgaaggcctcaggaaacttacagtcatggtggaaggtgaagcagaagcaggcaccttcttcacaaggtggcaggagagagcacacaggggaaagtgccatgtttaaaccatcagctctcatgagaactccctcgctatcatgagaacagcatgggggaaactgcccccatgatccaatcacctcacaccaggtccctccctcaacacgtggggagtacaattcgagatgatatttgggtgggggcacagagccaaaccaaatcatctgtctttcttccaggtttatcagtatctagataaccttagcattacatttgccatgtactctcagtggttaacataagaagtcactctccaatgtctgttatattctgttttccaatgacatttatgacataccaccagatgtgagtgwacactttaggtttatacttttgaaaatccatattgcctcatgcccataatcccagcacwttgggaggctatggcagggggatcacttgaagccaggagttggaaaccagcctggataacagtgagatcccatygctagccaaaaaaaaaaaaaaaaaaaaaaaaaaaaaattaactaccagtgagtgtttttatgcaactacatgagttatcagtctttcttcatttatagatatcctaataaaattaatttgtatatactttacagaaactgttaaatctttgcaaacccttctcagcctctgatttataccttccactctcctagtcttttccaccacctcaagccagcagctctgtaactttggacaagtcatataacttcttgaatcctcagtctcatctgtaaaatgggactgctactcgtttctgcttcataaggtccttgtgggggttacaccttagaaactgtaaagtcctttgtacattatctgacacatggttatcctgcagtacattggagtaaaagacttctctgagattttttttcttcctaaaaaaaaagtctgggcagcacatagggctcatgcctgtaatcccaggactttgggaggcggaggtgggaggatcacttgagtcctggggtttgaggccaacctaggcaacatagtgagaccttgtctctacacaaaataaaaaaattagctgggcatggtcacactcaccagtggtcccagctacttgggaggctgaggcgggaggatcccttgagctcaggaagttgaggctatagtaagccatgatcacaccacaggtgacaaagcaagaccctgtcttaaaaaaaaattggaaaaattccagcacttgatctaaaagtaagataaaggtgaattataggccaggcgtggtggctcacgcctgtaatccctgcactttgggcggacgagatgggcggatcatctgaggttgggaatttgagaccagcctggccaacatagtgaaaccccgtctctactaaaaatacaaagactaactgggcatggtggcgcatgcctgtaatctcagctacttgagcagctgaggcaggagaatcgcttgaacccgggaggcggaggttgcagtgagccgagattacgctagtgtactgcagcctgggcgtcagagtgagactccgtctcaaaaaaaaaaaaaaaaaaagatgaattataatttcaagtactactgctgctttagtaatagagttagggcattgctgcgtggcttttagaaggtctgtaggaaggaatatcttctgatttatggagcaataagatgggttgatttactgagctaaaataatgatcaccctctccccatagttgatgttcaggtcaaactctttagtactgtgctcttcctgtcttcctttatccctcccaggtgagctccagaagctgggaatcaaatgcttttaccataacgctgatctggtgagttgggccgatgtgatattcctctgctgcttgccrtctcagctgcctaatatctgcgtagaaatttacaccagccttgagaaggccagcattgtgtacagctttgtagctgccatcccactacccaggtatcttgttagggtgagaatggaactggcacaactgctctgtctccttatctctgacttctgcctcccacctccactgtagcccctatctcttagagttggttgtttccagtaataaggaggaagcagctttatctgtagaagaacatagttagccaatctttctcgtaacttccctacttacccacaaatagtaaccacaaaccatttttgttgctgtacaaaggtttaaaattrcaatagaacatttattcccattacttgaacactgaagtattctccttgtgcatcaatgagaagagaaaccatcggtcaataacatgaaaagttactgaaagtatgtgtcaaatattatttctgcacacttagtttctagcccagtgcctagcacataacattcaataagtaaggatttgttaggtggatgaacagtccagttaattagtgctctcagcacagacccagacccgcatttatctctgagctgtgtgggggagtctgttgatggggttggatgtaaacacagtgggttatgtcgtcatttattccagtcctggcattgcactccctgtcttggctttacttccaggctgaaactactgttgaaccacaccaatatcttgcggcctcagtatcagtatgatgaagattctgtcagcgtctggggggccaataagggagtcatagctgctctccaagatcctacgattcttcaagctacctgtccctacagtcctgctggtcayggctcaacatatttctggcattcttttgaaaattactttcctgttggcccattgctatcttattaaatcaatctctctctctctgtgtgtgtgtgtgtgtgtgtgtgtgtgtgtgtaaggcacaaggtactgcaggagagctacttaggaagagctgagaagcttgatcatttggacttcttaaggacaaattaaaaccaaaagaggagatagcttatttcaataggaggatgtaatgttggactaaaatggcttttccctgttctaatcttgtagttttccccagttccttctccatattagcaacgactattccagagacactttttgccattagcaatgtctacattagttgtatctgtccacttttgggatggtcaacacatgatgtgttataaagggcacaagtagcacttgtggctcaggaaggaatgtttgcttatcttgtggttcatattaccaatctgtcttggaaaaaaggcggctattcactgtcaggggtttattctaggttttctgcaactcatttttggtggtgctaactggtatttaccttctcattgatgtgtagggggaataatcctcaatatcaagtggttggagggagtgttctatgcggccctaaacatatgcacagcaagaaacatggcccactcccaagtgctgcagcttctgagtgaactctttctctccgtgcactttgaagactgtgggaaagacacagcatcttgcccaaagttgcaattaacagattttgtcagcaaagcctatggcaagaatttgtctcaggaaaggtaagggcattggacagctggccattctcatttctcccagactcttctcttagttaatgctttttttcttttatcctttcatgttctctttaaacattgataaaaattatacctttttgtaaagaatttcaactagtggaaaagtaaatgccatcctttgccttccaaatcccatttcatagatttcacctctaacagtttttatatttttatctatgcatttacaaacatttatattgttataatgtatatgcatatctattcctatatatacagtgttagacacatgggaactatatattctgcttttttacttactgtatcacagctaccattctatgttagtacaatcatagctacttcatttatgagcagctacctaggtgtccaccggacacatttattccattaaatttattcactccttttccacttgatagagatgtagttcctcctctcatccccaattttgcattacgggctgctttgacattctttattttattttattttattttgtgagacagtcttgctctgtcacccaggctggagtgcagtggcacgatctcggctcactgcaacctctgcctcccggctttaagtgattcaagtgcctcagcctcccgagtagctgggattacaggcatgtgccaccatgcctggctaatttttgtatttttagtagatacagggtttcgccatgttggccaggctggtctccaactcttgacctcaagtgatccgcccgccttggcctaccaaagtgctgggattacaggtgtgagccagtgcgcctggcctgctttgaacattcttgtactttgtgcacttgtaccagtatttcggtggcatatgtgaaagaagctctgggtcaaagtttatgcatattttatatttgataggtgttcccaaattgcttataaaaaatgtggtacttgtttacatttctaccaacagcatatgagggtgccacttctttaatatctgataactatcaaataaatatttttgatctttgataatctaatatgcaaagattattgctcttattactagtgacttccatgtcactagatccactggatgctttaaactctttttcttccttaattattgaacatgccatccttcttgaagcagtctcttctctaggctgtcatgatccctcccgttctcctcattttcttcctgactccccggcccctccttggctagcttctcctctgcctcacccttaaatctgggtgttttcagggctctatcctaggcccttttcttttcatgctatacttcttttcattctatactttgttcccggtgatcttttccactttggggacttaggttcccatcttttcactgacagcatataactctgtatctctagcctaaatgtcaatgctgtgcctaggtaactgtgtattcaccatctccactcaaactcaccatgtccaaaaacatacctgctcttaaacctgctcttctgatgtttcttacctaattatatgctgcttcaccaagttgttcaagtcagaaccctagatgtaatcctagattcttcttcctcatcttttgtattccaatcaatcatcaatggacagtttattctctatgcctgtgattcacgtttggtttggagatttttcttcttcattatcccagggattcccctcacttttctgttgtattggatctcttgtttcctgtcatggaaacatctcttgtttctctctcatgaattacttcttaatttggggggaacatgtcctgtagtaccttcctgagaaagggtgcattgaaataattttcagagactctttgagatgtttttattctagcgttctattttattgagaacatagccaggtatagaattgcaggttggaaataattttcccttaaaattttgagggattgcatctacagccataccaccctgaacgtgcctgatatcatctgatctcagaagctaagcagggtcgggcctggttagtacttggatgggagaattttgaggcattgcttcattgtctttcagcttctagagttgctactgagagttacagtgccattctaattcttaatcctttgtctgaaacctgtttctttcctttctggaagcttatgagatcttttgacctcagtatcttgaaattttatgatgtgccatgatgtaggtctattttaattaaatgttgagcacttggtgggcctgttatttccattaacttttttgtttttatttttatttttttgatagagggtcttactctgctgcccaggctggaatgcagtggtgtgtaatgttggctcactgcaacctccacctcctgggctcacgtgatcttcccacctcagcctcccgagtagctgggactacaggcacacaccaccacgcctggctaatttttgtatttttagtgataagtctatcaagcaatatagtgtctgggattgccttcaaaataatccaatagatgggggtaaaggagtaggggtggggttttgtatgagaaaagattagctataaattgataattgttaaatctgagtgataggcatatggagtttcgttatactattttttgttatattcttttttacttaatactattctatgtttcattctattttgttttaaaatttccataataaaaacaaaaggtttccttctagtagtttgtcaaccctaatttactcatcccaattttattcttctcaagttttaagaaaatctatttcaaattttatcagtttcccttttaagcatttaatgagatttttgtttctcctctcctttaagattgtaatatttaattaatgttgtaaactatatagttttcctgtcaaattttccttgtattcttttttttttctgagacggagtttcacttctgttgcccaagctggagtgcaatggtgtgatctcggctcactgygatctctgcctcctgggttcaagcgattctcctgcctcagcctcccaagtagctgggattacaggcatgcaccaccacacccggctaattttttgtgtttttagtagaaatggggtttcaccatgttagcaggctggtctcaaactcctgacctcaggtgatgcccaccttggcctcccaaaatactgggattacaggcatgaaccaccatgcctggcctgatgtgtagcatcttttcatatgcttattgaccatttgtatattgtctttggtgaagtgtctgttaaggtctctggcccatttttaaattggtttgtgttcctattgttgaatttttttgagacggaggtttgctcttgttgcccaggctagagtgcaatggcacgatctcggctcaccgcaacctctgcctcccgggttcaagtgattctcctgcctcagccccccgagtagctgggattacaggcatgcaccaccatgcctggctaatttttgtatttatatatttttaatagagatgaggtttctccatgttagtcaggctggtcttgaactcccgacctcaggtgatccgctcaccttggcctcccaaagtgctgggattacaggcgtgagccatggcgcccggctcctattgttgaattttaagagttctttgtatgttttggaaaacagtcctttatctgtcttctgcaaatattttctctagtctgtggcttatgttttcattctcttgacagtgtctttcacaaagcagagacttttagttttagttatttaaattctttaattatgtccaccttgtcaattgtttttttcatggatcatgcctttggtgttaacaactataaagtcactgccaaagccaagatcatctagattttctcctatgttatcttccaggagttttatagttctgcatgtgacacattttgacttaacttctgtgaagggtgtaaggtttgtgtctagattcattttttcttttttgcatgtagatatccaagtgcttcagtaccatttgtgaagagactgtcttttctccattatattgcttttgctcctttgtcaaagagcagttaactatatttatgcgggtctatttctgggctttctattctattccactctatttgtctttcaccaatactgcactgtcatgattactgtagctttaaaggatgtcttgaagttgggtagtgttactcctctgactttgttcttccatttcaatactgagttggctattctgagtcttgtttgttgttgagacaaggtcttgctctgctgccccagctggggtgcagtggcacgatcatggctcactgcatcctcaaccttctgggctcaagcaatcctcccacttcagcttcctgagtagctagaactacagaactacaggtgcacaccattgtgcccagctgattttttatatttttttgtagagatgggatcttgctatgttgcccaggctggtctcaagctcctggcctcaagtgatcctcctgcctcagcctcccaaagtgctggaattacaggcatgagccgtcacacccagcctgttctgagtcttttgctcttccatttaaactttttttttttgaggtggagtcttgttctgttgcccatgctggagtgcagtggcgccatcttggctcactgcaacctctgcttcctgggttcaagcaattctcttgcctcagcctccccagtagctgggattacaggcacccgccaccatgcccagctaatttttgtattttagtagagatggggtttcaccatgttggccaggctggtctcaaactcctgacctcgtgatccacccacctcggcctcccaaagtgctgggattacaggcatgagctgctgcacctggccccatttaaactatagagtcaatttttcaatatccacaaaataatttcctgggattttgattggcattgcgttgaatgtgtagttcagttgggaagaactggcatctttatagtattgagtcttcttctccatgaacatgaaatctctatatttattttgttgtttttagacttctctcatcagtttcatagttttccttatgtagatcttgcacatatttcatttgatttatacctaagtatttcattttgggggttctaatataaatggtaatgtgtttttaattttaaattccacttgttcattgctggtatatagaaaagacactgacttttgcatattaatcttgtatcctacaactttgcaacatacatttaaacatttgccctattgcttcactaagccattctaagtcataagagactattcctgtaaattgtgtattcagtgaaaggctcatcaaaaa

SEQ ID NO: 95042 - DNA, 24005 bp, Homo sapiens
  misc_feature (1)...(24005): n = A,T,C or G
ctctgtgtcacaactcattgaattgtcccaaatacctcagaagatcaatacaaccatttgtcccattttccagatggggaaactgagacacagatagtgtccaaggcctcattttcagggactcttaggatcattccattttacaaccatttaatcatgctaaaagccttccactggttgagcatgtgccaagcaaagtctgtgctaagggccttcgatgcacgttatcaccaaccccgaacaacgctacacagaaggtactattgttatcatcccccaaacacagattgaaaaaaggctcacagagggaggcttactttttctatggtcttcatgtctgtcagtctccaaagtcatagggtgctccccgcatgccattatccaagacatgaacactacagccagctgaactccaacctagctttctcttccatctcctttgctcaaagggaggtggagacttccacagggatcccaacccacatagaattcctcttgatatcagtgagttcctgaaaaacttcccccactctcccttgggcacctgctgacatcatcccaagcccagatcttcagctttggaaaagcacccacagggttgtgctggtaaatgtttatcagctggctcttaggaaaaaaagacctcatttgtagagttttctgattgctgtgctgtgcatgcattcactatggccaatttcaaacaactggccaaggtggtgtcactgaacatggagttgggaagagatgtgcaaaaccatgccatcatatagtattttcactatacagacacaaatagacataaacgatctcaatagcacagataacggtaaactctagtaaaataattaggatgtgatcagccttgagtacttattaccttcttttaaaagtataatatattccgtttttgtttgcgtaatttaattaataatgactatttcataataagctcacatcattaccgaacatttaataatcagctcttctgccaggttcacagtgccctgcccctcacctgcatgttctgcgtcgagccctgatgaagcccctgtcctgggaagaaggaaacttcttaaggacaatgcctaaggacaaaattcagcacacgtacacaggtgtggtcctacgagttattacagcctttttttttttttgagacagggtctggctctgttgcccaggctgaagtgcagtggcgcaatcttggctcactgcaacttctgtctcctagattcaagtgattctcctgcctcagcctcctgagtagctgggattacaggcgcccaccaccatgccaagctagtttttttttttaattctttatttttagtagagatgggatgtcatcatgttggccaggatggtctcaaactcctgacctcaagcaatccactcatctcagcctcccaaagtgctgggattacaggtgtgagccaacacacctggactattagagcatcttttgatagaggttggtattttagtttgtttagtgttgttattaccaaatatctgtggctgagtaatttataataaaaagagatttatttggctcacagtcctgcctgctgtacaagaagcatggcaccagcatctgcttctggtgagggcttcaggctgcttctactcatagcagaaggcaaagtagagccagcatgtgcagggatcacatagtgagagaagaagcaagagacagagggtatggccaaattcttttaaacaaccagctctcatggtaactaatagagcaagaacccattcattaccatgaggaggacatcaggtaactcctggatcatgaaccaaacacttcccattaatttccacctccaacattggggatcaaatttcaatgtgaggtttgcagggacaaacatccaaacgagagcagttggtaaatgggaaattcaaccacttctccaggaccactcttaccaatagtcccataattcagcaactacagaggcctctaggaccctactccatcttcagacaatgtttgtgctgccctggttgttaaatatgtttattatcatcatctgtaatactcaaatccatacatacatcctccttacaaggaatcttgcagtatctcacaactgatgatttatactccatgggtatacattgggtcaaattatgcattttataccttttgagaaacactgaactaataatatttctgagacctcttcaagctctgacatgctgtgtttagacttgaaccctaagcttgagtttaagagtgaaaggagatgcagaaaagaagttgggggcaggtatgagtaccaggaagacttccccatggatgtgggagagtatggcattaaattacattgacacacagaaactgtgggaaataacaaatcgttgttgtcttaagcctctaagtgttgagctgttttgttatgtagtattagataactaatacacaggtattttctagttatgatagaaaatagctaattttccattaaagggagaaataccaagttccatcttaatgaatttaagttcttaaaaaggagagtcaattaaagaaacattaaattcatatatgggtggtactcagacacaacaataaaaaagaaggcaacaagcacttatcttggttcaatgatttttcaagcatttttcacagaagccaaatttcctaagatataggttaactgctataacaaagacccaaaacagtggtttaaaggggcttacataagatggaaatttaattttctttctttctttattttttgaagatggagtctcgttctgtcacccaggctggaatgcagtggcaccttctgggctcactgcaacctcggcctcccgggttcatgcgattcccctgcctcagcttcccgagtagttgggattacaggtgtgtgccaccacgcccggctaatttttgcatttttagtagagatggggtttcaccatgttggccagcctggtcttgaactcctgacctccagtgatccacctgccttggcctcccaaagtgctgggattacaggtatgagccaccgcgccctgtggaaatttaattttcttacacttaatggctctgcataagcaaccctgagctcatcaggcagttcactgatatcaaagacccaggctccttccatgttgctgctgctccttcctaagttgttgctcttgctatcccagttagccagaaagaggaaatattctggaaggaaaccttgcccctccctctaaaagcataaactgaaagttgcaggcatcactttcactcacttctcattggtcagaacttggctacacggccatacgcagctgcaagggagcttgggaaatgtagtttttaactctagataatcatgtagctggatagaattctattactacggaagacagggaaaacaaatattgggagacatctaggtgcctctgaaatatgaaccttttctcaaatacagtcatatatgaatttaatatatcaaaccagatgacaatgagagctatacctccaagcacctgaaacatctgaatgcctttcccctctgtatgaaaggtattacacagagtttaaaaaaaaaagtttatccagcagcttcaggttataagaatatttgttttagggtgacctgaataatctctgactatttaacatgcccttccttgcaagctggttgtttggattagaggataccctgcttgtcaagcacacagctccatccatgcctggcacaaagtgacaaattaaaaaaatttggttgggcgcagtggctcatgcctgtaatcccagcacttggggaggccaggcaggtggatcacttgaggtcaggagttcaagaccagcctggcctacctggcaaaaccccatctctactaaaaatacaaaaattagccaggcgtggtggtgggtgcctgtaatcccagctacttgggaggctaaggcaggagaatcgcttgcacctggaaggcggaggttgcagtgagccaagatcacaccactgaactccagctgaactttagttcaagttcctccattcctggcttcctgtctggaggtgggatggtgaagggagctgttctaagagtacttgctctctcccttcctgtctgaataggaaaaccagactcacaaccaaccaccatcaccacacacatgccaccaccacaagatggttaagaggttagtcctgaatgggtgttaagtgctggggggtgaggatcagaatgggatgggaaggtgaaagctaagggagtcaaaggagatgggctgagctgagtctctactccaagaaagacattctagcagcagatccaagagacaaaaggtggcactgtgtgtgagtcactcagctttcccagaatttccaccacttctggacacaggatgcctcagctcagccagccaaaccccattccccaaacctacagataccttgagggattcggtttccaagtctgagaatacagtcgcatgaaaaggacattgaattttgttaaatagtacatgagggtaggatataatatccaggaagttcatttcaggacaataaggctttgaaaatatttggtgcagaaaaggtagttaatcactttttagattattaagacattcccctccagagactggggttcagaggtgatctctacaccttagactttcaaaacacacacacacacacacacacacacacacacacacactgacacacactacagcaaagttcttttttttctttttttaaatttgatacagcaaatttctgatacaccaacatgggtaatctttgattattgttatttaacattaacttgagtagaaaacaagaactctttgaacaaaaccctttcaattgatttatttctcttgttttctaaatcttcagcttactttccttattaacattctagtgttccattatacagtagggtggctggctgtagttaacaataatacattgcatatttcaaaatagttagaagagaggattttgaatgttcttaccacaaagaaatgacaatgtctcagtaatggatataataattacccgaatttgattgttatacattgcatacatgtatcaaaacatcacacatatgtacaattattatgtacatatatataccacaaatatgtacaattattatgtgtcaatttaaaaaatctaataactgattaattaaggttatccttaattaaataatgaacaaagagttttccttgttgtctatcaagactttctaaaacaacatggtctgccagctgcggtggctcacgcctgtaattccagcactttgggaggctgattggggtggatcacttgaggccaggagttcgagactagcctggccaacatggtgaaaccgcatctctagaaaaatacaaaaattagctgggcatagtggtgtgcacctgtagtcctagctacttgggaggctgaggcatgagaattgcttgaacccgggaggcagaagttgtagtgaaatgagatcacgccactatgctccagcctgggtgacagagtgataatctgtctcaaaaaagtaaaataaaataaaataaaataaaacaacatggtttccctatttgatagatggagaaacaagtcccagaggttaagtgacttgcccagtgaagaaaagacagagctgccgcttgtactcagattgtctggatcctaaaatcaatagcctaaaaaggtaataatctgcctcttacaccccaccaaaaaattctgttcaattctgttgagctgagagagaagaacagagagactggaaatttgaagaaaggggaatggccccagaggatttccctttgtgaattcaatctacccttactcaggtgggagattataggttatataaccacctcccatataaagcaatctcttctccaatgacattcagacccggaaaacttgaatcccagggtgttcagatttcggtataagctgatctcccaggacctatttaggcaggatctggtgcccaggacagaacctgttgacctggcaccatggagatgggaggggctgtcaccatctttctggcactctgcttgtcttgcctgctcatcctcattgcctggaaaygaatgaataaggcaggaaagctgyccccaggtcctacaccaattcctttcctggggaasctgctgcaagttcgaactgacgctacgwttcagtctttcatgaaggtgagtctgtctgtctcctctaatagggctaaaagcaactaatcctattgccagattcacatagaaccttatgacttctaaagacagactctcagaaacacagactttgcaaatcttagaattctgaaatttcagaatcctaaaatattggaaacacacattctcagtacattgagataagattttcatgatctgaggactttggaatcacagtacattatatttttaaacacaaggactctttgactcaggttgtcttagcactttgagagttggtatcatgaagtcttaagagtctagaaatttaacatttcagagagagaagtatgaatcctagaattcatcaaatccaggtccattattttagagatgcagacagtaagtcttgcggggagggatgagcttttgccaagggtgacaggagccaagacttccatgcctctttcccagtattccttccaagcccagatttaccttggttccttagtaccatgtttatatccctctgaaatcgccatcctctaaaatcctcaattggcctatgcttggtactccaatcagcccctcctactgtgttttccttcactccaagctcagggagaaatacagccctgtgttcactgtgtacatgggtccccggccagtggtggttttatgtggacaygaagcagtgaaggaagccttgrtagaccaagcggatgagttcagtggccgtggagaactggcttcaataaagcaaaacttccaaggtcatggtaggtagcaacaacaacaaaaacaataaaaccggaaatgactgcaatgcactccctatatgccaggttctttggtaagtagtccacatgacttactgyattgactcccttaggagagctgttaacattatactaatgttgtcaatgaaaaagctaagataggccgggtgtggtggcttatgcctgtaatcccagcactttgggaggctgagtggggtggatcacctgaggtcaggagttcgagaccagcctggctaacatggtgaaacctcatttctactaaaaactaaaaataaaaattagctgggtgtggtggcacatgcctctaatcccagctactcgggaggctgaggcaggagaatcgcttgaacctgggaggcagatgttatagtgagctgagatcacaccattgtaccccaacttgggcaacaagagtgaaactctgtctcaaaaaaaaaaaaaagctaagctaaaggttagataatgtcacacagtaagtggtaggatcactttattwtgaacctatgccatccgactctaaactgtcttctgtgtcttctgtgttatttctgctcttattttaatggattagtgatattctcttttttttttttttttttttttgagatggactttcactcttgttacccaggctggagcgtaacggcacgatcttggctcactgtaatctctgcctcccaggttcaagcaattttcctgcctcagcctcccgagtagctgggatgacaggcatgcgccaccacgcagggctaattttgtatttttagtagagacggggtttctccatgttggaaaggctggtctccaactcccaatctctggtgatccacccgtctcagcctcccaaagtgctgggactacaggcatgagctaccaagcctggcggattagtgatattctttatgcacccactaaagctctcatagccaaccttatttctcatcttcatatactcatacacatacctaacccataggtctctgccttcttcacttaggtagatctttttctcccaagaatccatctctaactgcccacatccttcaattccaagcagactcaccacatactgtctgtctatctatctatctatctatctatctatctatctatctwtctttctattaccttttcttccttttgtccactgatccatattcatcagaaaatccactcattattctttctataaaaacatctttcactctattatctatacatctgtcaattaactttctatgtattcatctatccatcattccatccattcatcaatgctttcatcattcatacatctatcaatctatccactctccaacygttatccatctatctcaaaccatccatccattaaccatccacccatctattaagtcttccatccatccatccatccatccatccatccatccatccatctgtccgtccgtctgtccatccatccatccgtcattccagtcataaactcttccttccattcatcaataaagcaaaataatttcattagatctagtgaattggtttaagactctcatcagtccacacatttagtaatttctaaatgtgtcttactacatgataactccttttctgtaggtatatcgatgtacaagtgtgagcttctgtgtacacatatgtgtacgttcagagaatccaagtattacatagaaaatagaattaatatccccattccagggcactctatatggcactctgtccatacatccctccaccttccaccttcctatgcattcactcagttatttatttatttttccagttccacctctccttcctgtaagaaacactctttgatctcctcctatcattcctacactgattcccttttcctccacctcagtctggacttttttttttttttttttttttgaggatcctgcagagagagaaccttactctcttgattgagccttgaaggttgagaatggcttccttgacagcagagtctagagctttcataatctgtccccatcactgtctagtacagagttgaacacagcaaggggagggaggcagaagcctgagactgagatcttggcaggtgtagctctggccaatggagaaygatggaggattctcygacgcttccccctgaccatccttcgggacttcgggatgggaaagcggagcattgaggagcgaattcaggaggaggccagctacctactggaggagttccggaagaccaagggtatgggggccacaaggsggaggaccactrggtgactgggtggttatggagctctcagwcatgagaggatgagctttggtgggagaaaggtctggaaaggaagaagagggaaaatattaagaatccactaagatttctggcagcttccatattaagagtttacatgagctgggcatggtggcacatgcctgtagtgtcagccacctgtggggctgaggctggaggttgcttgagcccaggagttcaaggctgcagtgagctatgatcatgccactgcacttcagtatgaaagacacagtgagactgtctcaaaaataaaaaaaaccagttaacatggaagaccctcagagaccacttactagaaactttaatcagtggatctcaggctgtctgtgagctcttgatatcctatgcagattttggtgacatgtgactttgtgatttktcttgaagacaggctcaaatttcattacatttgtatatccgtattatggtaaaaaatacataatataaaagttaccatattcatcattttaagtgtccagttcagtagtgttaagtatattcatgttgtgaaaaaaatcttttgaacatttttatcttgcaaatctgaaaccctatactcatttyattatgttttaaaaggagttcagtcccaccaaaaaataaggtctagaaacactggggtctatagagaaaagacagagaggctgaaaaaaaaccagaaaaatagataagaggtagaaatagagacacatttcctctacatccaaggckccttgcctggtctacatgggtgattaacaggtctacataaaagcttcaaatgcccatgtaccccagaaattttcataaaattgtgtatttatgaatatgtgcattattctagagaaattcttcccagatctactgatcttgttttacagaaggtgtaggtgagggcaagggaaggattttgttttgttttgttttgttttgttttgagacagagtcttgctcttgtcacccaggctggagtgcaatggcacgatctcggctcactgcaacctccacctcccaggttcaagcaattctcctgcctcagcttcctgtgtagctgggattacaggcgcctgccaccacacctggctaatttttgtatttttagtagagacagggtttcgccctgttggtcaggctggtctccaactcctgatcttgtgatctgcctgcctcggtctcccaaagtgctgggattacaggcatgagccactgcacctggctgggaaggatttttctaattgcccaaatggaatcatcagtagagctagacagaattcaggaacttttataatgtgtcccttatcccacttttccccaaatatgtgagtctctaacaacaacacatttaagtaataataataaaaaataatgattaagctcaactagcttttcttgagtgcttactgtatgccaggcattgtgctaattattttrtatggataatgataatgaatcntcatgagtgaatgaaacggttcccaaaccaatttgcagattggtcaatctagactcaaaacacaaaaataaagtggctcacacatgcaattaagtagtagagctgggactcagatgcatcactgtgactccacaccccatattcatgatcattgcctccaacataaacaatttctactgcccaggtgcccccatcgaccccatcttcttgctgagccgcaccgtttccaacgtcaycagttccgttgtcttcagaagtcgcttcgactatgaggacaagcagttcctgaatctgctgcggttgatcaatgagagtttcattgagatgagcactccctgggcacaggtgcccaccccaccacctctctgtccatgcaccaaccccagttaactaagcaccttcctataccccacttgatcctccccacacccctgggaggtgagtacagtagttccccctcatggctggaggatatgttcaagacccccggtggatgcctcaaaccatggatagtacccaattctgtagatactaagtttttctcatatatacgtatcatgacaaaattcaatttataaattgagtgcagtaagagactggcattcataagtaataaaatagaacaattataacaatatattctaacaacagttgtgtgaatgtactctttctctctcgaaatatcttattatatgtgatatttttagactgcagttgactgcacgtaactgaaatggtggaaggtaaaccagggttaagggggaactactgtctcaataggacccaacttctgggaagcaaaagggcctcacctgattcttagacccagcactgcactttgagtccagctgtccaactccagactcagcccatgctggcccctggagcccatcactgacaaagaccccttgcctattcccacagctatatgacatgtactctggaatcatgcagtatttkccaggaagacacaatctcatctactacttggtagaagagctcaaggacttcattgcctccagggtcaagatcaacgaagcatcctttgacccccaaaaccctcgggacttcattgactgctttctcatcaagatgcaccaggtacctcctcttcttcccctggtccttccctctcacttctcaacctctagtcgctgcaactttcaaccaatctgcaagcattgaggacaaaacaaaacaaaacaagcattatttcacagcatttacttttatctatagatgaatatagaaactgtaaaagtataaactgttacagctttaaaacagattttgaatctagaaattttaggaatttggaaaatttaggaacttggaaacttaaaatcttacagcttatacattccagagagttacaactgtagttttgagtcttagaatttcagaaatgtagaacttttctgaagtttaaaatttaagttaacatttaagttaaacatttaagttaaagttaaaagatgtgaacgtgtagggacagtagggcatagagtttaaatttaaattaaaggttcaataacataaaaatataaatttacaaatgtataaaactctaagaaatgatgatacagaagtattaatcttctgaatttgtatacagatatatctctaattctatatctgtatagagatatatctctaattctatgtctgtatagagatatatctctatttctatatctctatagatatatatatatctatttctacatttctatagaaatttagaaggttaatacttctgtatcatcatttcttagagttttatacatttgtaaatttatatttttatagtattgaatctttgcctttggaaatttaaattctatacactactatccctacatgttcaaatattacaaggcatcctacattcttctcctcccatcctccctattgttcacttcatctcattcatcccagcttctgccttgctgttcctctaacacatcaggcacgttcctgccgcaggacctttgttctgactgtgtcctctcccagacacgcttggtttacccacctgttgtctccctatacaatagacaataaagccaatgagaaaataacacaataggccaggcgcagtggctcacgcctgtaatcccagcactttgggaggccaaggtgggcctatcaactgagatcagaagtttgagaccagcctggccagcatggtgaaaccccatctctactaaaagtacacacacacacacacaaaattagctgggcatggtggcgggtgcctgtaactccagctactcgggaggctgaggcaggagaatcacttgaacccaggaggtggaggttgcagtgagatgggatcatgccactgcacttcagtctgggcaacagagcgagactctgtcaaaaaaaaaaaaaaagacaataaagacagaagagagtgattccattcacaatcccctcactttcaggataaaaataatcctcgtacagaattcaacctcaagaacttggtcctcaccactctgaacctcttctttgctggcacggagacggtgagctctacactgcgctatggattcttgctgttaatgaagcatcctgaagtggaaggtgagtccaccctgagctgcctatctggtacctccccctcccaacataaagaagacatcatcttgaaaatttagaatcccacggcctcaggctcttcaccctttagaacttcaggacttgaaacatgaaatccccaactttgcggggtgatttaacttaatcttctacttggtgtctgcggcctgtggctgctgtaacaaattaccaggaacttagtcgtctaaaacaacacaaatgtattatccttctgttctgaatttcagaagttcaaataggctttcactagctgacaccaacggactatctgattctctgccttttccgggtgttaaagctgtactccttgtaatcctgggttcacgactctgtcctccatcttcaaagccagcagcatagctgcttcaaacctctgtttacttctggcatccatcacatcttttattctttttctttgtttttggagacagagtcttcctctgttgcccaggctgcggtgcagtggcgtgatctcagctcatgcaacctctgcctcctgggttcaagcgattctcctgccttagcctcccaaatagctgggattacaggtgtgtgccaccccatgcccaactaattttgtagttttagtagagacagggtttcaccatcttggccaggctggtctcaaactcctgacctcaggtaactcacctgccttggcctccaaaatgctgggattacaggtgtgagccgctgtgcccagcctcacatttttttttctaactctgattctcccacttctctcttatacagacacacgatattayattgagggcgaatctcaacaacccaggctaatcttttcatctcaagattcttaatttactggcattttcaaagtctctcttgtgtttttgttacccttatatatatagccttccaggcattaggttttagagacttggaggtggttatctttgatggccattattgagccaaccgccctgccaaagttaaatagaatctgtctccaataaattatgatctggtccatttgggtaacttcagtaatgaggaactcactacttgcttaaggaaaattcccaattttggcccctctccttaataatgcaattcaaaacaagccaaagaatttctcctggtgcagatgagagatgctaacacacatccactcaaatgtttctagtgtcacctccattgtctgagttgtctttcactggtctaaataatcaggctgggtgcggtggctcacgcctgtaatcccagcactttgggaggcagagatgggcaaattgctgaggccaggacttcaagaccagcctggccaacatggtgaaaccttttctctattaaaaatgcaaaaagtagccaggtgtggtagtgcacacctgtaatcccagctacctggggggctgaggcatgagaatcatttgatcccaggaggcagaarttgcagtgagccaagattgcaccactgcactccagcctggggacagagcaagactccgtctaaaaaaaaaaaaaaaraaagaaaaaatatcaaatcaatatttattggatgcttctgtgtgccaagcactgtcctagttccttgtacaccagactttatgtaatgtttacaactctatgaccttgtccaactatcacactcattttgaagatgatgaaacacaagttcagaggtgaagtcacacaggccaggtgcggtggctcacgcctgtaattccagcactttaggaggccgaggcaggcggatcacgaggtcaggagatcaagaccrtcctggctaacacggtgaaaccctgtctctattaaaaatattttaaaaattagctgggcgcagtggcaggcacctgtagtcccagctactcgggaggctgaggcaggagaatggtgtgaacccgggaggtggagcttgcagtgagctgagatcctgccactgcactctagcctggacaacagagtgagaagactccatctccaaaagaaaatagaaggtgaagtcactcatccctaaaccctaaaatgcgaagaggagtaactctaccagtggtgatcttaatcagtcacataaccgcttgtcatttgtgtcaaccctgtcctagtcacctagcatgcctctttcccattttgtaaaaaacccatgtatgagagccaagctgggaccatggctttttggtgcttttaagtaaagaccaaatgtcctggcagcrttcaagactccaagctgcctgtctcccgatgtctgatgagtaattgagcatcaccagtgtgtcagttgttaagttaaagaagcgaccaaacaggccrggtgcggtggctcacacctataatctcagcactttgggaggccaaggtgggtggatcacgaggtcaggagttcgagatcagcttgaccagcatggtgaaaccccatctctattaaaagtacaaaaattaaccaggtgggtggcaggtgcctgtaatcccagttgctctggaggctgaggcagaaaaatcacttgaacccgggaggtggaggttgcagtgagccgagatcatgccattgcactccagcctgggtgacaggctgtttaaaamaaaaaaaaaragaagggagcaaacatgcatggctttcacttgagatctctttctgctggagctaggaatgcaggatttgtcctggcttccctagcaaaaacacctcctgcttttgtttattttttctctgttctcagctatattttctggccccttccagctaagatccatgaagagattaaccargtgattggaccacaccggctcccaagggtggatgaccgggtcaagatgccctacacagatgcygtcatccacraaatacagagactggtagacatcgtgcccatgggtgtcccccacaacctcatccgggacactcagtttcgaggctaccttctgcccaaggtggggttgcaccctcattgcctcccttccactgcactcctctctctccctggttccctacctctgtagcccaacactgatttctcctaactgcccccattttcaccccagggcacagatgtatttcccctgcttggctctgtcctcaaagaccccaaatacttccgctacccagatgccttctatccccagcactttctggatgagcagggccgcttcaagaagaatgaagcctttgtgcctttttcctctggtaggtttctctggtctgacttcctccaggcatgtgctaaatccaccccccagccactggtctgtatttgaagttcaagtcacaatgtgaatttgaaggttatatcatagaaccacacaacattttagaatcccagaattagtaaatattagaacgattgactctgataattagaaaaaaaagttggctcagtaatagcactaaacagggcataaaccaactggctgttaagaacaaaataagacatattttctatttttccagccagatagtctctgaacctttgccattgatcwatgaaagcagccatagacaatatrtaaatgaatgagtgtgcatgtgagcctgaaaaactgtttacggacactgaaatttgaattttgttttatcttcatataacacaaaagagtcttttttccccaaccattttaaaatgccaaaagcattcatagtttgcaggctgtatgaacacaagcagcagggcaaatttgcccaacagacagtcatttgcctactcatgtcataaaatctttatgcagcaacattttaagtgtatgttggcatggcacagtggctcatgcctgtaatcccagcactttgggaagccgaggcaggcggatcacttgaggccaggagttygagaccagcctggccaacatggtgaaaccctgtctctactaaaattcaaaaattagccaggcgtggtggcgggtgcctgtaatcccagctactcgggaggctgaggcacaaaaatcacttgaacccgggaggcggaggttgcagtgagccgagatcatgccactgcactccagcctgggcgacagagtaagatcctgtctcaaacaaacaaaaaacaacaacaacaaaaagtgtatgtcatttggaacctggagtcaggacagtggttgggaatctggactccactccaycatttagaaatggtggagccttgggtgagtcacttcagcycccatctgtgaaacagrgattaatscctccaaacaattggaagagtggcttayaaacagtaagtgttattamgggtgagttttcactttttttstcaccagtgtctggcacctaataggcatttgacaaacccttgaggaactgaaatgaacacaaccttgaaactcatggatcctatagaaccattccctcttggaacgagatggaatcccagccatcagagaagtagcaggtcctagctgagcactaactataggtacccactaagcctgtgtaacacccctttataaagcagtcacagtcatgagccctgaggtgccgatgaggcagctgaggctcagtggggtggtcagtccagacaccccgacatccccatgacctgtgcaggtgcgacccttccttctgccctcccctgtgcctccaggaaagcgcatctgcctgggcgaggccatggaccgcatggaactctttctctacttcacctccacccttcaraacttctctctacactcgctggtgccgcctgtggacatcgatatcacccccaagctctcaggctttggcaacatccccccgacctacgagctctgtcttgtggcccgctgagctacacctcctgcggggcaaggaggaagcggtgaagaacgcagctctcctctcgtgttcaggagcaccccctcttcctcatcttactaatcctcaagcatccctaagaggaggcactatgattacagagtcagccagggtcacctgagaaggtacagctgcgtgtcttcccctgccgtagaagagcaacgccctgtgcaagatttgcacctctgcctgcaggtttcatggtcacatggtcaccgttgcttaggtttctggctgcatcaaattattactgcagtccctgtgtcttcatattgtccctttttgtgtgtgctctgattttgaccaaaatgtagtctaaaatcctttctctttggttctcatttccaccagcccccgaaaagtgaacaaagacctcaagtctgttgagcatagcaagtttattgtgtattgtgtgtgacagcgatgtagggcacagccaacagtttgaaatgtctttcttgacttgttattagttatagtttctgccagctgctctccagtgacttcccctgggtaaaatgccccatcctcacccatcttgctccttacctttctccgccatcatctcttcttctaatcttcctttccagttgctctcagcacaactcccaattccaaatactccccagtccgtttgtttgtttggagatggagtctcactctgtggcccaggctggagtgcagtggcaccatctaggctcactgcaacctccacctcccgggttcaagtgatttttgtgcctcggcctcccgagtagctgagattacaggcacgtgccactgcacctggctaatttttgtaattttagtagagatgggttttcaccatttgcccaggctggtctcgaaatcctggcctcaagcgatctgcccaccttagcctcccaaagtgctgggattacaggtgtgagccaccatgcttgctctctccactccatttttgaggatagctcagttgttcccaccttctatcattccgtttccaaactccattaactgacagaaacgttccctctttttcatttattcaggcaatatttactgaatacccaacaagtgccagcgtagtcttcagggacttgggatccatcagtaagcaaaacagacaaaaactccgccatcagggagctaacattctagtaaggaaggtggacaataaagcatacatgaaacaaatatgcaaatgacatactgcattagaaaagcaaggctggtaagtgggatatgcattctgtgattggaatttaaatggatggttaggggtgttttcacaaggtggtggagcagcaagctatgaagatatctgggaagggagtgttcctgacagaatgattaaccaacagcagtggccaggcgcggtgcggtggttcacgcctgtaatcccagcactttgggaggtgggcggatcacgaggtcaggagatcaagaccatcctggctaacacagtgaaacctcgtctctactaaaaatacaaaaaattagctggctgtggtggcaggcggctgtagtcccaactacttgggaggctgaggcaggagaacggtgtgaactagggaggcagagctttcagtgagccgagatcctgccactgcactccatcctgggcaacagagtgagatgctgtctcaaaacaaaaaaacaaaaacacaaaaaacaaacaacaacaacaacaacaaaaaaccagcagcgactgagcatggtggcttacacctgtaatcctcacactttgggaggccaaggctggcggatcacctgaggtcaggagtttgagaccagcctggccaacatggtgaaacccctgtctctaagaaaaatacaaaagttagccgggactggtggcaggtgcctgtaatcccagctactggggaggctgaggcaggagaatcacttgaacttgggaggcagaggtttcagtgagctgtgatcacgccattgcactccagcccaggcaacagtgcgagactctgtcacaaacaaacaaacaagcaagcaagcaaacaaacaaacaaacaaaccagcagagtcctaaggcaggaggctgtgtgcatccaggaatccacagggagcaggtgtagctggcatggaggagggaggcagagtaggagtgaaggaaacgaggccagggaggcgatgggggccagactgtgtggggtcttgtgggccaaggtgaggttttggcttttaccctgagagtgatcaaggtctttggagggatggtgagcagagggtgatatgtactgacatattttaatgggctcacactagctatcatatgatggatatgaaagcaaagacctattagcaggctactacaactggtgatgttgactcagacccagcagcagcagtgaagctggggaggaggtggtagatttgaaaactatttcactgcctgagatggtggggtttgctacggtattgtatatagggtgtgagagaaagtgggagttcaggcaggagtgcacacctcatctttgatcacttcttcaacctgtcacctccagggaacctcgggacccataacagtcagctcactgcaacctctgcctcccaggttcaagcgattctcctgcttcagccccctgaagtagctggggtacaggcgtgcacaaccacgcctagctaatttttgcattttcagtagaaatgagatttcaccatgttggccaggctggtctcgaactcctgacctcaggtggtccacttgcctcggcctcccaaagtgctgggattacaggcgtgagccactgcgcccagccagggttcctatttttaagcaatataaagtgactttggttattttaaatagaaaggctgttagctactggaaggtgattgtttagctcacaaaattaacagcaattctggaaaaacagcgtaagaatatgagtagaaaaaagaggctgtggtaggggaccaccagccaaggtaatgttcaaagctattcggtaggacctgctgccacaccacccatctcctgggtactgaacacctgacccaccccctgggtactgccatgggactctagacccattgatgccactatagatgatttcctgattgtgtctgtgtttttgtctcacatcctcatgattaagagttccagatatctagccacatgttaaaaccttagggttcaaggtgaggtgaggaagaatgaatacctccttcagctgttgtagtgggaggcaaagccttgtccctgatcaagagccacacaataggaggtacttagaaaatcagaaaagagttttgagactgtgtatataataaacaataaatgcggccagacatggtggctcacacctgtaatcccaggactttgggaggccaaggtgggcagatcacttgaggccaggagttcaagaccagcctggccaacacagtgaaaccccatctctactaaaaatagaaattagccaggcgtgatggtgcatccccgtaatcccagctactcaggaggctgaggcatgagaatcacttgaactcgggagggggaggttgcagtgagccgagatagtgccactgcactccagcctgggcaacagtgggagactctgtctcaaaacaaacaaacaataagcaccattatgtacattttgggaattacatcttctgggaagctaagacttagatggagttaggggttcatcattttattggagggaggagggtaatgcatgtgaaagacaaaaaaggaagcagatgacactagtagcagaaaaagtcttcagaccaggatgcagatccaatacttgtgaaagaaaggaaggaaggaggattggacagggacaggccaagaccaccaggcagagataacagacccataatccacagaaaaatgctgttggggatggcttatgttgggcagatagggttatgccctggatccaagagtccttaattactatctggggcttccttggaaaagcatgggttccgctccatgctgaggtgggtcctaatggtgctgcaactggagactctcagctcactgcccttattgaagctgattggaaagttctccatgaatgaagattcaagtagcacattcctatgcccaccacagacaccaacatacaaacccacatcattaaagccttggcaccccttctataaatacagcatctcagagctacaaacacacctcacaagtacacagtacaatgggcatcaaacatttttagctgtgaaaaccttttttcaaatgatcttacgtgcaaatagaatacataaagcaggctgggcacggtggctcacgcctgtaatcccagggctttgggagggcaaggcgcgtggatcacctgtggtcaggagttcatgaccagcctggctaacatgatgaaactccatctctaccaaaaaaaaaaaaaaattagccgggcatggtggcatgtgcctgtagtcccagctactcgggaggctgaggcagcagaatcgcttgaacccgtgaggcagaggctgcagtgagctgagatcacgccactgcgctccagtctggtgacagagcaagattgtgtctcaagggaaaaaaaaaagaatacattaagcaggagagagaattgttgatctctctttaggtaaagcacagaagagctataggtcctcaaaatagccttcatttctatttatgacgcgagcctattagaaagttcctagaggctggtgcggtggctcacgcctgtattcccagcactctgggaggctaaggagggcggatcgtgaggtcaagagattgagaccatcctggcctacatggtgatagcctgtctcttctaaaaatactaaaattcactaggtgtggtggcacgtgcctgtagtcccagctacttgggaagctgaggcaggagaatcacttgaacccaggaggcggaggtggcagtgagccgagactgagccattgcactccagcctggctacagagtgagattctatctcaaaaaaaaaaaaagttcctagaaattctgaggatataagataagacattacattgtaattattcaacacacatcaggttctttcaaggggcccacagaaggacctaatgacataatggtgaccaggaaaagctcagtgactcaccacatagggctcacagcccagcagggaagagtgctccatctctcacagtgacagcccagcatagcccagcatagctctgatgaagggagcacagagtagaatgtggaggactgtgatggaggaagcccaggtggattaggtaacaccaggaagtatgaggcaggttagagagaatcggtactcctgctattccctggaagtaattcatttaattagagtaaacatttctcagaaactaggtgaatcaattttcttcctagaactaatcaagacctataagtcagagaggacattttctttactgtgagctttttttctttttatctgtttcttttcttgttaaaaacgcctttattgatataacttacagatcataaagtgtacaattaaatgggtttgggtgtattaatcaatactgcaaccaccaccatggtcaattttagaacattttcatcacctcaaaaagaaacctcatacctttgtcttactgctttccccccacactcaattccccgccctgagtaaccacgaatctacttttctttatagatcctctattctttttttcttttcttttctttctctctcttttttttttttagatggagccttgctctgttgcccaggctggagtacaatggcatgatctctgttcactgcaacctccgcctcctgggttcaagagattctcctgcctcagcctcctgagtagctgggattacaggcactcaccaccgtgcctggctaattcttgtatttttagtagagataggattttgccatgttggccaggcaggttttgaactcctgacctcaaatgatcctcccgcctcggcctctcaaagtgctgagattacaggcgtgagccactgtgcctggcctagatt

SEQ ID NO: 95043 - DNA, 26577 bp, Homo sapiens
  misc_feature (1)...(26577): n = A,T,C or G
ctcttcacacggacgcgagtgaaagggatcagcatgagactataacttcttcttccaccctctgtcccgtgacttcactctgcactcttcaaccaatcaacgatctccacccttcagcccactccaaaacccttgaacaccctagccccaaactcttaggggagatggatgtgaggtttccccccatctcctcattcagtgaccctacaattaaacctgcttctctgctgcaaaccagttataactgtagtaggctcattgcccagtgcacacagcaaatcaacaggagacactgggttgcaggagagaagaggtttcatcgtagggtcgccaaaagagatgaggagttgaagaatgtagggtgaagtcacgggacagggagatgaagaagccacattctcatgctgatcccattccccagtgggtagccttcacactggttgctggaattcaaggtctgaaaagcatctttttacatttttgtttatgtatttattattattattattattattattattattattgagatggagtctcactctgtctcccaggttggagtatagtggtacaatctcggctcactgcaacctctgcctcctgggttcaagcaattctcctgtctcagcctcctgagtagctgggattacaggtgtgaaccacctccccccaccacctccactccgctaatgtcctttgtatttttagtagagatagggtttcaccatgttgactgggttgatcttgaagtcctgacctcaagtgacctacccacctcagcctcccaaagtgttgggattatgggtgtgagccaccgtgcctggccctgaaaagcatcttaagtgattctttctttaacaaaagccttatgactctaatatcagagattctgtctataggaacaatgggggtgcacatggtcagtatctagctctacctgagttttagcaacaaggaaatggaccaaagtgcagcccgaataacacttaattataagtatgtttctgtccagaacccagcatgcaattcttgtcagccctgtgggaatggtttcacagtgtctcgatatactgacttgctgtgtgcattgggcaacaaacctattacaattacacatggatgtaactggaggtcattacattaattgaaataagccaggcacagaaagataaacaatgcatgttcttactcccaagtggaagctaaaaaagttgatcacatggaggtagagaatggaatgatggatactagagactgggaaaggcgtatgggtggggtggggtggggagagaggttggttaatacacctagacagaaggaataagttccctttttttttgagacggagtctcactctgttgcccaggctggaaggcagtggcacaatctcagctcactgcaacctctgcctcttgggttcaagcaatcctcctgcctcagcctccagagtagctgcgattacaggcacgtgccaccataaccggctaatttttttttttttttcagacggagtctcactctgtcacccaggctggagtgcagtggcacaatctcagctcactgcaagctccacctcccaggttcacgccattctcctgcctcagcctgccgagtagctgggactatagacgcctgacaccacgcccggctaattttttgtatttttagtagagatggggtttcaccgcgttagccaggatggtcttgatctcctgacctcgtgatctgcccgtctcggcctcccaaagtgctgggattacaggcgtgagccaccacgcccggcaagaacttttaagttttcttatctataggatgttgcaatcatcatctttaaacattagacatggaatctttataataatcttgccatatatatatatatatatatatattttttttttttttttttttgacactgagtctcactttatcgcccaggctggagtacagtggcacaatcttggctcactacaacctccacctcctgggttcaagtgattctcctgcctcagccaccccagtggctggggactacaggcgtgcaccaccacatccagttaattttttttttttttttgagacggagtctcgttctgtcgcccaggctagagttcagtggggagatctcagctcactgaaacctccgccttgtgggttcaagcaagcaattctctgccacagcctcccgactagctgggattagaagtgcccaccaccacgtctggctaatttttgtatttttagtagagacggggtttcatcatcttggccagactggtcttgaactcctgaccccgtgatccacccacctcggtctcccaaagtactgggattacaggcgtgagccactgcgcctggccggttaatttttatattttcagtagagacaggatttcaccacgctggctaggctggtctcaaactcctgacctcaggtgatccacccgccttggccactgtgcctggtcaacagtctttctatttttattctaggctggagacctttgtctcaaaaacaaaacgagaatgctccctggagtctgtactgatccctcttccctcccaccgtagattagttttctccttgcatttaaaaagacctttctggctggcatccagtgaatgaattgtggaggagggggagaaggagagaggaagcaggtagctcagtggggaagctactgcaaaatcctggcaagcaatgacagtaccttgaatcagggctggtgtcagttggatcagggtggtagggaaaggaggaaatggataaatttggaatgtatttggaggtagagccagcaggatttgctgacaaactgggtttaaagtcaaagagagaaatcaaggttaaacctgacaaataaaaacagatgtggtctcaggcgagtagagacattatgcagaaagactattgcatcagggggaaagatggctgcaaaaacaatgaacaagaccagaatctgataacccagaaggatgtgttgtctaatgaaactaattttttcccctcctcctattttttttttgagacggagtttcactcttgttgcccaagctggagtgcaatggcgcgatctcggctcactgcaacctccgcctcccggattcaagcgattctcctgcctcagcctcccygagtagctgggattacaggcatgcaccaccacacctggctaattttgtatttttagtagagacggggtttcaccatgttggccaggctggtctcaaactcctgacctcaggtgatctgcccacctcagcctcccaaagtactgggattgcaggcatgagacaccgcgcccggcctctcctatattttgttgtcatcagcaagtgaaaagatggtgataccttttacagaggtaaggaaggaggtgagagaaagtattcccagatggggtgggaagctggtacagcccactttgcaggaggtgggggaatcgggaattcttttatatccatgaagtttgagatgtctgttagctctcccaggkgtagaacagagggagcagataggctcaaggttggatttggaacgtcctagaaaccttccagaacaaggcaaaggaggaactgagaactggcatttacttcatagcaagagcgtatgagcctccccacccctcctcctttggcttcagggcacccctggaatgttagaggctagaatcaatgctaaagaagaccacagtcaaggattccccagactccagggagcactctggctatgctcttgagagaaagggctctggactagaatacaaattgcaagattgcaggccgggggcagtggctcatgcctgtaatcccagcactgtgggaggccgaggtgggtaaattgcctgaggtcaggaggtcgagaccagcctggccaacatggtgaaaccccaactctactaaaaatacaaaagttagctgggagtggtggtgggcgcttgtaatcccagctactcaggaggctgaggcaggagaatcacatgaacccaggaggcagagattgcagtgagccaagatcgtgccactgcactccagcctgggcaacagagcgagaccctgtctcaaaaaaagattgtgaaaattctaagaatctaatttttttttttttttttttttttttgagacggagtctcgctctgtcgcccaggctggagtgcagtggcgggatctcggctcactgcaagctccgcctcccgggttcacgccattctcctgcctcagcctcccaagtagctgggactacaggcgcccgccactacgcccggctaattttttgtatttttagtagagacggggtttcaccattttagccaggatggtctcgatctcctgacctcgtgatccgcccgcctcggcctcccaaagaatctaatattttaaaactccagcatatgcaactcaaagctcatctaattatacacttaagagttatgtatttcattgtatataagataccttgaggaacaaaaagtatctgtaaacaaatactgagctctagctactgatatgcatgctgatgtatttgggagtgaagtgtactggtatctgcaactgactttgaaatgcttaaaaaaaaatcaatggataggcaaaatgaacagatatgtaatgaaaaaagggccaggcacagtggctcatgcctgtaatcccagcactttgggaggctgaggtgagaagatcacctgaggtcaggagtttgagaccagcctggtcaacatggcaaaaaccccgtctctactaaaaatacaaaaaatagccaggcatggtggtgcacgcctgtaatcgcagctacttgagaggctgaagcaggagaattgcttgaacccgggaggcagaggttgcaatgagccaagactgtatgctattgcactccactctgggcaacagagtgagactctatctcaaacaaaaaaagaatagataggtaacaaagaaaggataataaaatggtggaatctgatgggtatacaggtgttcactgtatgtttgaaattttaatatttttataataaaatacgaaatcaaaatgcaaagcaaacaaagtaactgccctgctgaaaacccctccagacagcttccgtttgcaatagaaataaaatgcagtcttttccaagaccttgcaagatggcccctgcagacttcatgaatcttatctcctacattcaatctttgaaaatataacaaatatttattgagtgcctactgtgtgtcaggcactgcactatatgttggggatacagcagtgaaccaaacctacaataattcatgcacaaatggttctaacattcttccttctcaagaagcccattcccctggcaggccttctcacttcctgaaattgttttcatctcatcttcatctgcatgtggatatgagctcaggaaggccagagcccttctctccatcgctcatagctgcaccctcgggtctagaacaaggtcttgtttatagtaagacctcaataacagttagttgcagaaatattagctaacatctatttagtgcttgttacatgtgcacctgcgtctgctttaaatggtgtgcacagatgtactatttaatcctgaaaactagccccattttacaaggctaacagaggcacagaggaattaggctgtgaattcaagcagtctggcttcagccatcacggtcctaaccgctctgcaaactgcctctaaacgaatgaatgaatgactcaatcattctaactggcccaagtcaaaatattaactctgccactcagccaagttgacctggggccaaccgatttatctccctggacttcagattgtttatccttaaaggtcaagtccttcctctcagttcgtgaagatgtaagatgctggagaaaattgactcaaagacaccccatacacgcacgcacacaggaacccacatccgaacaatgagcgaggtaggagctggggagagtggcgcggggtcaccgccagatgcggggtgtggcaacctccaggcggccaaagtctctgacttccaggttcttctgtttgcttactccctatccgggggcccaaggcgctgtctccgccgcccaagccccgcgtaaacctgggtgacctcggagacatccgttggagcatgagttcccgacatcaggcggcggyggtggtccgggagaaacccggcggcggggagataagcctgcccaggaggcagggggctgggctagctgccccgccccgcgcctgacttcgttggggagggagacgcccggctcccgcccctaactagcccagccgcgcggagcgcctgggagaggagaaggagccgacctgccgagatggaggcgaccggcacctgggcgctgctgctggcgctggcgctgctcctgctgctgacgctggcgctgtccgggaccagggcccgaggccacctgccccccgggcccacgccgctaccactgctgggaaacctcctgcagctacggcccggggcgctgtattcagggctcatgcgggtaaggggctctggggacgtcctggctaggggtgggaggattcctgggagagaaacccgagtgccagggtgaggggcttttcgggtatcctagggaggaggcaggggcaggggtcccaaggcaaaggggctgctgctgtcctggggttgggggcaggagcaggttgtccagggctgagaaggggagaggtgcccgggagagaggatcgtggggtgggggaccagggctaggaggggcagagacctctgcctacagaatcctgggaaggtgatgggcagggaccgaggctgaaagagacaggagtcctccagccgaggagaagctgatgcagctgggcttgtcccagagggagaggtagctggagccatacaggtggggcatgctgaagagggcacaaagaagaaaagggggaggcgtccctgcggggagttggaggcagagaagaggctggagggttgcaggctcagagagggggtcccgctgaaggaatctgccagcagagaatgcaggatgggaggatgggtggagctcagttgggasttcctgggactggggaggaaggagagcaagaaagaaggcagaggcagccccagccttaggggatagcaggtgggagtgggcagaggcctgaagtttcccattcaaaaggattctgggtgacttcaaggacgtagaaaaaagggtggggtcttgggggagagatggggcggataytcagcagtgtctgctccagaatttcagggttttgtggtgactgaaaggggtggctggatatttggggggcagggagggccctaaggaattaagggagacccaaactgcttctggattgcccagcgtcagaggttagggttcagcaggaagcaagggaacgacaggaagttgggggatgccactgaaggatgtactgggggaggaggcccgggagcctagtgcaaaaagagaactgagcctcagctatttctgctgggatgggggcaggttcctggtagagggygtagaagctagacccggtggctcctcaagtgacaggggccatgatggagacaccttggatcgaagaggtcacagcaccctcctctttcttcctccctacccccagctgagtaagaagtacggaccggtgttcaccatctacctgggaccstggcggcctgtggtggtcctggttgggcaggaggctgtgcgggaggccctgggaggtcaggctgaggagttcagcggccggggaaccgtagcgatgctggaagggacttttgatggccatggtaagtcaagggctgctaggccctccgctcacagcctgccaccacttactggtgtgtgacctttgcacatggcttagtccctctgttgcctcatctgtcaaatggagtgataacagtgcccatcagccgggtgcagtggctagtgcctgaaatcccaacactttgggaggcggaggtgggtggatcacttgaggtcaggagttcgagaccagcctggccaacatggtgaaaccctgtctctactaaaaatataaaaattagctgggcatggtggtgcgtacctgtaatcccagatacttgggaggttgaggcaggagaatcgcttgaacccgggaggcagatgttgcagtgaaccaagactgtgccactgcactccagtctgggcaacagagtgagcctccatctcaaacaaacaaacaaaaagcagtgcccatcatgtaggattgagtgattgagtgaggactgagccttgtgcaaagtgagcactcactaatcaccaggttgtagtatcagtgataaccatcaatgatccaggtaaagccctgagggttcagaaagatgccggagcgctttcaaggtgctggggattggtgggcaagccctcgaataatagaaacagttctctgtattacaacagaaagcaggaggcccatgctgggtgctgccaggaactcagtagtaactaagacagcaccggtgctgcttccccagcgcacctaggccagtggggaaacagactcaccacacagtcccagcccagagtggtcagggccaagatggggaagcacggggagaaaggtcagggtgggatggggaggggtcagggcaagaggggtcagggccaggctgagggaagccctgggactgtaggaatttagaggaggtacctgacccggcatgtttggtgagggagmttcaggaagtcttcctggaagagaggctgtcggagctgagactcataagatgagtggggagggtgttccaggcagaaagaccagcacctacaaaagcatgactttgagagaagcattcatccattcaactgatgaattttcagactgggcacgctggctcatgcctgtaatcccagcactttggaaggctgaatggggaggatgacttgagcctaggcatttgtgacaagcctgggcaacatggtgagaccctgcctccacaaaacaaacaaacaaacaaaaaatcattatacctggtaccatgggtaccaggtacatagaaatgactcaggcagatatggtgtcctctcctactgtgggagaggcgggcttatactgcagtaagacaatagagggagggaatataatcctaaaatgagaggtacagatttgagagcaaacacagggcacaggcatatgtacgagggtaaagagggaatcagggaaggcttctcagagaaggtgacatttaagccgggacatgaaggatgaacgagttagttcaccaaggatgggatggaaaggggtgagagtgatggaggcagagggaactgcaggatcataggcctagacaggggatcctgacgcccttgaggaagtgagagaagaccagcgcagtcgtagtgggttaagtaacaaagctgagaagccagggaaatccctggtcwtgcagggcctgtgagtcacgtcagagtgtttgggcttttgtttttcctgggagcagtcgattttaagcagggaacagctgtattcagagttgggaagatcctgtggttgctgcctgaaggggatgaaactggaggctaggagcccagggtgatagggaggatccagggtgatggggaggctgggaggtccrcggtgatggaccagggctggggccaggggatggggaggaaggagtaattgggagaggcctggggctctggccgaggaatggatggtgggctgaaacagggagaggagagatgcttaggccactttggaacacagtagggcaaggacaggagacacccaaggggaagtgcccaagagaccacgacaggctggcattggacagggaaggtctgtctggagcaggtgtcttggataagggaggaaaatggtgcagttccatcctcctccctctctgttcaacctctaaactacatggggcacaggacccagtgggactccataaatgatgggatgggtggatggaaggaaggaaggaggaaacaactcttcattcatcctggttatttacagaacaggccaggtgcggtgctcacgcttgccattctagcactttgggaggctgaggtgggtggattacctcaggtcaggagttcaagaccagcctagacaacgtagagaaaccccatctctactgaagatataaaattagctgggcgtagtggcatatgcctgtaatcccagctagtcgggaagctgaggcaggagaatcgcttgaacccgagaggcagaggttgcggtgagctgagatcgtgccattgcactccagcctgggtgacaaagcaagacctcgtctcaataataataataattacaaaacagaaggagcctgggtcatcccagctacctacttttcaggagaatgtactcccttacccaagggcaaaggatgggagaaccagtttgattatgcatttattgagcacctactgagtcctcatccctgggctaggctggaatggactcagatggagcctgaagagtccccctcagggaacctcactagaaagaaggaggaatcggccgggcgcggtggctcacgcctgtaatcccaacactttgggaggctgaggtgggtggatcacaaggtcaggagatcgagaccatcctggctaacacagtgaaaccccatctctactaaaaatacaaaaaatgagccaggcatggtggcgggcgcctgtagtcccagctactcaggagrctgaggcaggagaattkcttgaacccgggaggcagaggttgcagtgagacgagatcacgccactgcactccagcctgggcaacagagcgagattccgtctcaaaaaaaaaaagaaagaaaggaagaagggggaatgggggagaggggccggtccctytttgagtctagccttctgcgcaggggttttcttctccaacggggagcggtggaggcagctgaggaagtttaccatgcttgctctgcgggacctgggcatgggraagcgagaaggcgaggagctgatccaggcrgaggcccggtgtctggtggagacattccaggggacagaaggtcagcatggcggggtcaccccagggtctccagcmgagtgaaagggaaaactctcctactgtggctgggggtggccccaacccaggtcctggaatgggcaggaggggaagccttgaactctrgggctggcctgggggttctgttcactgccaccttctgtctctgtcccactgtctctccgaggctgtcatgacatctctctgtgtgtctctggtgctatcatcccattcttcctgggtctccatctctctctctgtctcttttctttctctctcctttcctctattttttgggccctcagtctatctctgtttctgtctccctgtctgtgtgatggtcactctgtttctttctccctgtctgtttctctgtccctatctgtctgtatccttctttgcctgtttagctctctccctgcgctgtccatccatctttccctgcctccctgtctctctctggttgggttcagcnccaacctgctcccctctgcctggctccatcacagcctacctccctgcccccattccccccaggacrcccattcgatccctccctgctgctggcccaggccacctccaacgtagtctgctccctcctctttggcytccgcttctcctatgaggataaggagttccaggccgtggtccgggcagctggtggtaccctgctgggagtcagctcccaggggggtcaggtgagtgggtgggacccctctccaactaccttccctgaaggttcctgccaaggtcccatgagaactagctgcccttctccccacagacctacgagatgttctcctggttcctgcggcccctgccaggcccccacaagcagctcctccaccacgtcagcaccttggctgccttcacagtccggcaggtgcagcagcaccaggggaacctggatgcttcgggccccgcacgtgaccttgtcgatgccttcctgctgaagatggcacaggtgtgggaagggtgcagggaccccctctctgaatgggcrtsgtgacctggcaggtccccagccaggtgtccctggggacctcaattgggttcctctctctttctctctctgcatgtctctgtgagtatgagtgtctctgtgcatgtgtgtgcatcccttctctgcacatctgtctgtccctttcagggcgttgctctcactgcctctcccgcccccgacctgggcatttgtgccgggctgtctgtctctccagcatctctcctctttctccctcccacctcggcccttgtgttcaggccccatgcccagggtcctacaccagcaatccccaggatcacttcatcccatcccctgcagcctccccagacttttatgtaaattcacaattttatgtgaattatggtcatttattaggaagccttgcaatatcaagttatgttaataaagtccactttattaattatatragaacaatatttcttttccttttttttttcttttctttttaaagagacaggatctctttctgttgcccaggctagagtacagttgcaaaatcatagctcactgcaaccttgaactcctgggctcaagcaatcctcctgcctcgggctcctgagtagctgggacaacaggtgtgcaccaccacacctggctaaattttttttttttctttgtagagatagactctcactatgttacccaggctggtcttgaattcctgggctcatgtaatcctcctgctgccttgaactcccaaagtgctgggactataggcataagacatcatgcccggtcgggcacagtggctcatgcctgtaatctcaggactttgggaggccgagacgggcggatcacctgaggtcgggagttcgagaccagcctgaccaacatggagaaaccccatctctactaaaaaaaaaaatacaaaattagccggacgtggtggcacatgcctgtaatcccagctactagggaggctgaggcaggagaatcgcttgaacccgggaggcttaggttgcggtgagctgagattgcaccattgcactccagcctgggcaacaagagcgaaattccatctcaaaaaaaaaaaaaaagaaaaaaagaaaaaagacaccatgccctataagtaaactagaattaaggtgactcctaaggaaataaatagtttttaactgtacgaacttttggaagaatggggccaattctttaattaaatgcagcctccctgtttgtggagaaagaaaaatttttcttaaccctattgccccatttcttttctcttttattgaatattttttagttttaactatagtaaaatacacataacgtttaccatcttaaccatttttaggtatacagtacagtagtgttcagtacattcatactgttatgcaatcagtctccagaactcttcatgttgcaaagctgaaactctatacccattaaacaactgcctgttcctccctcctccaacccctggcaatcacctttttttttttgagaygaagtctcactctgtcacccaggctagagtgcggtggctcgatctcggctcactgcaagctccgcctcccgggttcatgccattctcctgcctcagtctcccaagcagctgggactacaggtgcccgtcaccacgcctggctaattttttgtatttttagtagagatggagtttcatcgtgttagccaggctgatctcaaactcctggcctcaagtgatccacccgcctcggcctcccaaagtgctgggactacaggcgtgagccactgtgcctggccaggaagtagactcttgatattagttctctctggttgaaatgtttttaaaaatgaaagagaatgactaataacaaaaacacagaaagttataaggattgatgaagatgtggagactttgaaacccatgtataccattggtgggaatgtgaaacgacgcagccctgtggaaaatggtacagcagttacctgaggtcaggagtttgaaaccaacctggccaacatgcagaaaccccgtctccattaaatgtacaaaaattagccaggcatggtggtgcgcacctgtaatcccagctactcgggaggctgaggcaggagaattgcttgaacccaggaggcggaggttgcagtgagccgagatcgtgccactgcactcagcctgggcaacaaagcaagactctgtctcaaaaaaaaaaagtctacttcccaaccttcccaaaaatttatctaaaccccgtgacaaaactttaacttgtgtttccgaccccaggcttggctgttctggacatttacttcccnaaggctgtgttctctcagcccctctgcctggtttctttcaggaggaacaaaacccaggcacagaattcaccaacaagaacatgctgatgacagtcatttatttgctgtttgctgggacgatgacggtcagcaccacggtcggctataccctcctgctcctgatgaaataccctcatgtccaaagtaagagccttttccacttgccaggccttgggaacagaagtcagggttctaggctgagcaaggtggctcacgcctataatcccagcactttgggaggctgaggcgggctgatcacttgagaataggagtttaagaccagcytggccaacacagtgaaaccccatctctactgaaaatacaaaaattagcgggtgtggtggcatgcacttgtaatcccagcactcaggtggctgaggagtgagaattgtttgagcccaggaggtagaagttgcagtgagctgacatcacaccactgcactccagcctgggcgacagagcgagacactgtttcaaaaaraaaaaagtgagaattctagagggaagagtgggtgggccaagcagacaggctgagttagatctttgaggcatcgatgggcatggcgtttgagatgtcgaggagccagaagaggttcaggagttgctgattgcagtatgaggcacagtgaaaaacaaggcaggtgtctgtgggcctcatcgccttagtgatacattaggtgccttatcctgagccatggggagcaatgcaatgactttgagcaggggagggcaaggtcaaattggttttttatttttattttttttactttttgtgggggatagactctcactctgttgcccaggctggagtgcagtagtgcgatctcggcccactgcaacctccggcctcctgggttcaagcaattctcctgcctcagcctcccaagtagctaggattacaagcatgcaccaccacgcccagctaacttttgtatgtttagtagagacagggtttccccatgttggccaggctggtcccgaactcctgacctcaagtgatctgcccacctcagccttgcaaagtgctgggattacaggcatgagccaaggcacccagcccaactctagcattttcgggtcaggcagctgctgtgggccatggggaygggctgacctggaatatgggagtggaggtcctggtagtgttgcaggagtggaattagctgtgacttccagcagtgacttgggttctctgagtctgtttcctcacctaggaaatggggatggataacaatatgtacctcacaagggtgctatgggaattaagaaagtatggatgagccaggcatggtggcttatacctgtaatcccagcactttgggaggctgaggtgggaggatcacttgaggctaggagttcaagatcagcctgggcagcataatgaggccctgtctctaccgaaaatagaaaaattagctgggtgtggtggtgcgtgcctgtggtcatagctactcaggagactgaggtggaaggatcacctgagcccaggaggtgagatgaaggctattacagtgagccgtcattgtactactgcaccagcctgggcaacagagtaagaccctgtctcaaaaaaaaaagagagagagagaaggccaggtacggtggctcacatctgtaatcccagcactttgggaggccaaggcaggtggatcacctgaggtcaggagttcgagaccagcctcgctaacatggtgaaaccctgtctctattgaaaatacaaaaatgagctgggcatgatggcaggcgtctgtagtcccagctactcgggaggctgaggtgggagaatctcctgaacccgggaggcggagttgcagcaagccaggatcgcgccactgcactccagcctgggtggcagagcgtgtaatcccagctactcaggaggctgaggcgggagaatcgcttgaatccgggaggcagaggttgtggtgagccaagatcgcaccattgcactccagcctgggcaacaagagcaaaactccgttgcaaaaaaaaataataataataaaatgaaataaaataaaataaaataagagagagagaagatagatggaacacccaacacacaagatgtgtggtctttgggctcagtgagggctgggggaccactcctccccacctgtcagcctcaccccaaactacagctatgcaagcagatgggcttctgagaggaggatccctgggccctacccccgtctgactcctgccctcctcttgcttgcagagtgggtacgtgaggagctgaatcgggagctgggggctggccaggcaccaagcctaggggaccgtacccgcctcccttacacygacgcggttctgcatgaggcgcagcggctgctggcgctggtgcccatgggaataccccgcaccctcatgcggaccacccgcttccgagggtacaccctgccccaggtgggtatgcgtatggctgccacccatggttctctgcctcggggcctgagcccgggtggtttgctgtcagtgtctccctgactttttcttgatcttagtgtctctctctctctctctctgtctttatctccctctctttctctgtctctgtcttcctcctccactcctacccccctgcatctttcttctccttctttctctgacaccccctccctttctgcatatattttttttctttttttgagacagagtctcgcactgtcgcccgggctggagtgcaatggcgtgatctcagctcactgcaacctccgcctcccaggttcaagtgattctcctgcctcagcctcctgagtagctgggattacaggtgcccaccaccacgcccagctaattttttgtatttttagtagacacggggtttcattatgttggtcaggctggtcttgaactcctgacctcgtgatctgcccgcttcggcctcccaaagtgctgggattacaggcgtgagccaccgcacccagccatgctttctgcatcttttaactctttctgtttctttttggtttgtgttttcttcccctttgactctatctctgggccccatctgccccacagatctcccaattctacctccttccaaggtggttgggacaatcgaatgaggtaacatacagagaagcagtttgaaaactgaggagcaagtccaggactaagggaagccctcttgacccttagcccctgctgcagacacattctctcctctgtctctctctctcaatctcagtgcccttcactggagagcagctccgatgcagaaccaaaagggggcgatgtttccccagaaaccccagcagtttatgcamgcagctccctcctccaccttcactgcagaatcaaacctatggcagttaggatccagtgctgctatgctgctattttctttttcttcttcttctttttttttttttttttttttccgagatggagtctcgctctgttgcccaggctggagtgcastggcgtgatctcggctcactgcaacctccgcctcccaggttcaagcaattctcttgcctcagcctcctgggtagctgggattacaggtgtatgccaccacacccggctaatttttgtctttttagtagagatgggttttcaccatgttggtcaggctggtctcaaactcctgacctcatgaactgcctgcctcggcctcctaaagtgctgggattacaggcgtgagccactgcacctggcctaccccctcctgttttgtagatggggccttgggcaaatcacttccccccctgaacctcaatatatccctcctctacattagaaacaataatagtatcaacttgaagctgtaagataatgcttgtaaaacaaacaccaactcaactcttgggaaccggtcctgtgtaccaggcagcaacaatttaatgatgataatgacaggtatccaggcttgaggacctgctctgcaccaggggttattctgagtgctttgcatatctattatctcatttaatctttaaagcaaccctataccattatcatgcccatcttacagataaggaaactgagagcttgaaaagtttttagaggatttgccaaggtcccccagcctgcaaatagtagattcaagatttgaactcagagactatgccttaactactattctttgcctttctttctttctttttttctttctttctttctttctttctttctttctttctttctctctctctctttctttctctctttctttctttctttctctctctctctctttctttcttttctttttctttctctctctctctctttcttcctttcttccttcctcccttcctcccttcctcccttcctgtcttcctctctttctctctttctttcttgacagggtctctctttgtctcccaggctggggtgcagtggtacaagcatagctcacagcagccttgaactcctaggctcaagtgatcctcccacgtcagcctcctgagcagctgggacaacgggctcataccaccatgcctggctaattttttaatttttcstagagacraggtcttgttatattgcccaggctggtctcaaactcctgggctcaaatgcttctctcacctcagcctcccacgtggctgggattacaggcatgagccactgcacgccactcaacactccacaaatgttgatgccattakgttttgtgaactagtgtccctggcacccgagacttgtactccacactcgaggaccaaatrgactggggtgggaaggggtttatagtttcattattatttcccctcagggcacggaggtcttccccctccttggctccatcctgcatgaccccaacatcttcaagcacccagaagagttcaacccagaccgtttcctggatgcagatggacggttcaggaagcatgaggcgttcctgcccttctccttaggtatctgctgcagccytgggtatcacaagcaggtgctggcgaactccaggcatctgtgccagctgggggcacccttctgcaccctgggcttactgttggctcctccacstgctgttcccccygtgggcctgggtgtgaggaatactgactcagccctctctctctctctctcctcaccagggaagcgtgtctgccttggagagggcctggcaaaagcggagctcttcctcttcttcaccaccatcctacaagccttctccctggagagccygtgcccgccggacmccctgagcctcaagcccaccgtcagtggccttttcaacattcccccagccttccagctgcaagtccgtcccactgaccttcactccaccacgcagaccagatgaaggaaggcaacttggaagtggtgggtgcccrggacggtgcctccagcctcaacagtgggcatggacagggttaatgtctccagagtgtacactgcaggcagccacatttacacgcctgcagttgttttccggagtctgtcccacggcccacacgctcacttgactcatgctgctaagatgcacaaccgcacacccatacacaactacaagggccacaaagcaactgctgggttagctttccacagacataaatatagtccatctgcaatcacaagcacatagccaggtaacccaccaactcccctggatctgcagcccacacgtgggagtctggctgtcaccttcacaagccacagaaacggccacacatgttcacagctcacacgccctctccattcatcgaacttctcagtgtccctgtccctggtgcctggcacagggaacagcatgccccctccggggtcatgccacccagagactgtcgctgtctatggccccaactcatgctccctctcttggctacaccactctcccagcctgtgaccaccgatgtccacacacccccaaccacttgtccacacagctacccacgtacgacatcgtcctggctccccagagtatcttcccactgagacacgccgcccccacagaggcacagtccccagccacctctgcaactgcagccctcagtcacccctttttaagcaccctgattctaccaaatgcaaacacatctgggtctgcgattatgcacagagactttggacatacgaggaccctcagaccggaggaacacctgcccaaccccaacacgtgcttatgtaaccacgtggaaagcggcccctgctgcccctccacacacacatacacactcactgatctacagcccctgttcggcgtcagagtccccactagacccagtggaaggggttagagaccaagtaggggccagtttccaattcaccctgtcagggagtgarccggatctgacgttccttgtgacttaagggtccggcttgggaattaaagtttgtttctggcctttagcctactgcgtgtgtgacccgtgtcagtcactgtgagtaaggggtggggacaggggagtccacccctcccctgaggctgggcgggagctgaaaaacatggccaccgcccaccctggctgttgacatcaggaccagatgtggagctgggaggagggrcagrgctggtgacgccctgggcctcatttccaaaaagggccaaggtgtccggcggtgggaagtgggcaaggagggggtaacccaagctggactgtggaccttgggggcttcctcagccagggagagcctgaagccaactagatccagaccctagagactcttcaaacttgagtacaggaactagcttgcaacacagactctaagcccactcccatttcttccaccctttttctcttgcctccccttcacaaggaaaccagaggcatttgtaaatttcctttctttttttttttttttttttttttgagacggagtctcactctgtcacccaggctggagtgcagtggtgtgatcttggctcactgcagcctccgcctccgggttcaagccattctcctgcctcagcctcccaagtagctgggattacaggtgtgtgccaccacgcccagctaatttttgtatttttagtagagatggggtttcaccatgttggccaggctggtctcgaactcctgacctcagatgatctgccagtctcggcctcccaaaatgctgggattacaggcgtgagtcgctactagataaatttcttatctagcaaagaagtttgcaaacatacgcaaaagtagaaagatacaatgagcccccaggtgcccatcacccagcctcatttcaatagtcatcaactttctgcagcttttacttcatctatatccttttctgcctctttttttttttttttattttgagatagggttttgctttgttgcccaagctggggtgcagtagcatgatctcatagttcactgtggcttcagactcctaggctcaagtgatcctcccgcctcggcctccaagcagctgggactacagatgcgtgccaccacacccagctaaatttcttatttttattttctatagagaaagtctcactatacagcctgtgctggtctcaaattccaggcctcaagagtttccatcccagcctcccaaagtgctgggattataggcgtgagtcactgcaccctgccctgatatttttattttatctattgctttttatttacttatttatcttttatttttgagacagagtctcactctgttgcccatgctggagtgcagtggcatcatctcggctcactgtaacctccgcctcttaggttcaagcagttctcctgccttgacctcccgagtagctggaattacaggtgcctgccaccaagcctggctaatttttttatttgtagtagagatggggttttgccatgttgaccaggctggtctcgaactcctgacctcaggtgatctgcccaccttggcctcccaaagtgctgagattactggtatgagccaccgtgcctggccacctattgctttttaaagattatttttttattattattatttttttatttgagatggagtttcgctattgttgcccaggctggagtgcaatggcgtgatctcagctcaccgcaacctccgcctcccaggttcaagcgattctcctgcctcagcatccctagtagctgggattacaggcatgcaccaccatgtccagctaattttgtatttttagtagagacgaggtttctccaggttggtcaggctggtctcaaactcccaacctcaggtgatccgcccatctcggcctcccaaagtgctgggattacaggtgtgagccaccgcgcctggccttaaagattattttaaggcaaattacagaaagcaatttaatgcacatttctgagagttaaagatatttttgcccttgacattttatgaggacagttttcaaacatgcagcaaagttgagggaattgtacaaggaacaccttgtgcacttcctgggttctcccactagcactttgctacactgctttctgacgtttctacacacctgaccaccagctcaggatttatttatttatctatttattttgagacagagttttgctcttgttgcccagactggagtgcaatggtgcgatctcggctcaccgcaacctccacctcctgggttcaagtgattcttctgcctcagcctcccaaatagccgggattacaggcatgcgccaccacgcgtggctaatttttgtgtttttagtagagacgggatttctccatattggtcaagctggcctcaaactcccgacctcatgtgatctgcctgcctctgcctcccaaagtgctgggactacaggtgtgagccactgcgcctggccaatttttttttttttttagacgaagtctcactctgtcacccaacctggagtgcagtggcatgatcttggctcactgcagcctccacctcccaggttcaagcgattctcctgcctcagcctcctgagtaactgggattaccagcgagcgcctggttaatttttgtttttttagtacagatggggtttcatcgtgttggccaggtgtgagccaccatgcccagaccagttcaggactttttaggcatttccgagtaaacgcacgtatcagttcatcaaaaaacttaagcaatgcatatatcattagcgaaagcttctttttttaaaaaaaaaaatccaagatgttaacactttattggcttaagttctatagagatagcacaaaacagagaataatagagaactgaaagatgagattggaatcagatcctaactttgccacctcctagctgatcacaccttgactgaggctttaccatcttaaagccttaataaattgataagatgtaagaaatgtgggccaggcacagtggctcacacctgtaacccttgttgagggaccgaggtgggaggattgcttgagcccaagggttcaagaccagcctggccaaaagggcaagactctgattcaagggaaaaaaaaaaaaaatccagaaagaaatgtgaaaactttcagaacttcgtaggaaataaatatctgctaagttcttcttggatttaatattattactattttttatatgtcggtgcactttgaaaaggaatgaagtttaaggttttcttcttttaaaagtaaggcaatggggccaggtgcggtggctcacgcctttaatcccagcactttggggaggctgaggcaggcagatcacttgaggtcaggagttcgagagcagcctggacaacatggtgaaacgcggtctttaccaaagatacaaaaactagccaggcatgatggcaggcacctgtaatcccagctactcaggaggctgagacaggagaattgcttgaacccagcaggcagaggttgcagtgagccaggattgtgccacagcactccagcctgggcgacagagtaagactccatctcaaaaaaataaaaaattaaattaaggcaatgatttgcattcctttgcagtcaaaattcacattcagggaaatctggaatcaggtagaaatacaagcagacctatttatttaaagaggtgggctatagccgggcatggtggcgggcacctgtagtcccagctacttaggaggctgaggcaggagaatggtgtgaacccgggaggcagagcttgcagtgagccgagatcgcaccactgcactccagcctaagcgacagagtgagactctgcctcaaaaaaaaaatttttttttttaaataataaaaaaaataataaagaggcgggctgggcacggtggctcacgcctgtaatcccagcactttgggaggctgaggtgggcggatcacgaggtcaggagatcgagaccatcctggttaacatggtgaaaccccgtctctactaaaaatacaaaaaagtagccaggcgtggtggtgggcgcctgtagtcccagctactgaggcaggagagtggtgtgaacccgggaggcagagcttgcagtgagccgagatagtgccactgcactccagcctgggcgacaaggcaagactctgtctcaaaaataaataaataaataaatacataaatacataaataaataaataaagaggcatgtcggcctgggcatggtggcttatacctataatcttagcactttggtaggctgaggtaggagaatcgcttgagcctaggagcttgagaccagcctggacaatatagtgagaccccatctgtacaaaaaagaaaacaaacaaacaaacaaaggcacagactttgcactgtatcaatataaaagttgacatcaggatgatttcagtagcaagtaaaaaaatacagaaactcaaaatggcttaaacaataaagaagaattattggtccccaaagtaaaaatggaatcggtgtggtcttcaaatagttttctgcgtgtgttaaaatatacacataataatattattttaaccatttagaagtatacaatttagtagcattaaatatattcgcaatgggccaggcgtggtggctcacgcctgtaatcccatcactttgggaggccgagacaggcggatcacctgaggtagggagttcgagaccagcctgaccaacatagagaaaccccctctctactaaaaatacaaaattagtcgagcgtgggggtacatgcctgtaatcccagctactcaggaggctcaggcaggagaattgcttgaacccggcaggtggaggttgcagtgagcaacctgcactccagcctgggcaacaagagtgaaactctgtctcaaaaaaaaaacaaaaaaaatattcacaatgttgtataaccatcacaactatttgtgcccaaaatgtttccattgtttccaacaaaaactacccattaaataataactctggctgggcgtggtggctcacacctgtaatctcagcactttgtgagtccaaggcaggcggatctcttaagcccaagagttcaagaccagcctgggcaacatagggaaacgctatctctacaaaaagtgagactggtgtggtggtgcacacttgtagtcccagttactcaggaggctgaggtgggaggatcacctgagcctgggaggacaaggctgcagtgggctttgatcacaccactgcaccccagcctgggtgacagagtgagcccatctcaaacaacaacaacaaaaaacacaataactccccattaaagtttattttttaaaagtcaaaactacaatactcattttcacacctatcacaacgaacaattctgttattcattcattgtattcatagtgattcatagtgttcacattttcacatttctctgatagtctcataaatgtccttttttttttttttttgagatggagtctcgctctgttgcccaggctggagtgtagtggcatgatctcggctcactgcaacctccgcctccggggttcaagtgattctcctgccttagcctcccgagctcccaagtagctgagactaccagtgtgcgccaccacacctggctaatttttgtatttttagtagagatggagtttcaccacgttggtcaggctggcctggaactcctgatctgctaatttgcctgccttggcctcccaacatgctgggattacaggtgtgagccactgcacctggcctgtcctttaaaaaaaaaaaaaaaaaaagataggctggagtgcagtggcacaatctctgctcactgcaacctctgcttcccaggctcaagtgatcctctcgtctcagcctcctgagtagctgcgattataggcacacaccaccacacctggctaatttaaaaaaaaattttttttttttttgtagagatgggatttcattatgtttcacaggctggcctcaaactcttgggctcaagcaatcctctctccttggcctcccaaagtgctggaatattaatgtcttttaaaattggtttgttcaaatcagaatctgaattttgtttgaaatgtctattaagtttttaaaatctgtaactgttaccc

SEQ ID NO: 95044 - DNA, 39261 bp, Homo sapiens
  misc_feature (1)...(39261): n = A,T,C or G
tcctggaggaggaggcctggcagaaaggatacagagccggcatcgctgacaacctgcagcaccacggtgatggaggtgcgggggtgcaacgtgcccagcaccaccgcctcgcacgtgttcctgatcagccgctcccggctcttctctgcaacacctggggaaattgaagagaggttcagggtcttccccttcatttgactcaccttcctccatacgcctcacccaaattcccagaaagggctcacggtctcagcctgggatggtgcagttacctgcagggatgatggaagattccagtgggaagaaggcaaggcctgactgccatccactgacccctgctacctccagcatccaccaagggaaccatccaagggaagaagacctgggagttccatgtctgtgctgctacccacgcccactcccaccctagcaggtccagtcagtggggactgagggatatgagggtaaaagggtggaaaaacaggttaatggtccaggcacagtggctcgcgcctgtaatcccaacactttggggggctgaggcgggcggatcacttgaggtcaggagatcaagaccatcctggccaacatggtgaaaccccatctctactaaaaaaatacaaaaaattagtgggcatggtggcacgtgcctgtaatcccagcgactcgggaggctgagccaggggaattgcttgaatctgggaggcagaggttgcagtgagctgagatcgtgccactgcactccagccggggtgacagagcgagacactgtctccaaaaaaaaaataaataaataaaaataaataaaagaaaaacaggttaatggaatgaatgagagtggaggcagagagagggagaaaagagggagggagaaattagaggcagagagagaagcaacagaagatgagttattaattagaggcggagagttaaagacagaaacagctgagtggagacccaagcggggagtggagactcggggcagctggtagggaggagctgggggggtgattttgacaaactgggcaccactcagaggttcagcagggcccaattaccaggcagcccaatcttcggcctcaggatcacttcgagtgtggccttgttgaaaatctctttgctgaccttcacctcggccggcccgtacacacccgccaggacagaggtgtcacctgaggagacagcagggagggcctcactcacagcttccctgctcctggggccccatttgtggcactgagcctgacggccagggctccccacgtcacccccgccatttgttggtactgattctttgagcactcacttcatttctctcatttgtaaaatggggaaaatagcagtccctccccgctagcgtcttgtgaggatcaaaggacacaattcacagaaaacacttagaacactgcggggctcacgctgaatgtgcaacagactttagctgtattagtaacattcgtccattcaggcattcaggcagggtctcactctcattgcccaggctggagtgcagtggtgccatcacggctcattgcagccttgaccttctgggctcaagtgatcctcccgcctcagcctcccaagtagctggaactacaggcatgtgccaccatgcctgactaatttttatatttttagtagagaggggattttgccatgttgctcaggcgggtttcgaactcctgggcaactgtaatcccaaggtgctaggattacaggcgtgagctaccacgcctggccctgatattagtaattttttttttttaatgagatggagtcttgctctgtcgcccaggctggagtgcagtggcgtaatctcggctcaccgcaacctctgcctcccgggttcaagcagttctcctgcctcagcctactgagtagctgggattacaggcgcgcgccaccacacctggctaatttttttatttttagtagagactgggtttcaccatgttggtcaggctggtctcgaacttcctgacctcatgatctgcccgcctcccaaagcgctgggattacaggcgtgagccactgtgcccggctggtattagtaacttttaacaggaagttcttcctgaaagctaaccatcctccctcttactgcagctgctctcaacttctctttccaaagcttccccagcccagctcttcccttaggcactggcccccaaattttgcatcagtctggacacctgagaaagggataatatctggaatgaatcctgattccttatttccccagaagctatgaacggggtacaggaggtaaaacctaagaaataaacagcctggcttctagtactgtctgctgtaatcccagcactttgggaggctgaggtgggtggatcacctgaggtcaggagtttgagaccatcctagtcaacatggtgaaaccctatctctactaaagatacaaaaattagctgggcatagtggtgggtgcctgtaatctcagctacttgggaggccgacgcaggagaattgctggaaccggggaggcggaggttgcagtgagccgagatcacaccattgcactccagcctggacaataacagcaaggcttagtctcaataaaaaaaaaaaaatacattttaggccaggcatggtggctcacacctgtaatcccagcactatggaggcccaggtgggaggactgcttgaggccaggagtttgagaccagcctgagcagcataggaagactcctgtctctattttcttttttgggacagagtttccctctgtcacccaggaggctggagtgcagtggcgcaatctcagttcactgcaacctccgcctcccaggctcaagtgattcttgtacctcaacctccagagtagctgagattacaggtgcgtgctaccacatccgactaatttttgtatttttagtagagatgggttttcaccatgttggccaatctggtctcagaactcctgacctcaaccaagcgaggtggctcacgcctgtaatcccagcactgtgggaggctgaggcaggtggatcacagggtcaggagttcaagatcagcctggccaacatggtgaaaccccgtctctactaaaaaccacaaaaattagccgggcgcggtggcacgcacctgtggtcccagctactcaggaggctgaggcagaagaattgcttgaacccgggaggtggaggttgcagtgagccacgatcacttcactgcactccagcctgggcgacagggcgagactccatctcaaaaaaaaaaaaagaaaaaaaaaaaagaactcctgacctcagaggcctcccaaagtgctgggattaccgctgtgagcaactgcacccggcctcttcttaattcttacgttcgaagaaactttaggtatctcaattcagcataagcgctaagcctgagggagggcctgggaaggtccttggttaaggccgtatttcctgggaagcccaatttgcccttacacggaaggtatgcttagttccaggagaaactgccctgaggactggagaagttaccaaaacagaacttgcctctggctccagatgaactgcctgtgttttgcctgagcacaagagtctctcccctctcaccttcttgaagacgtggctccagcaattctctcccctgttgaccccacaacaatctacaactcctgccccacttatctgatcctcttacagcagaactcctgaacagctgcctcttcttccttttctgtgaccccaccactccattgcggcagctcaacatcgtcaccactgacctccaaatgatcaaccctcccatgacccggctgtcagtaaggctgaaacagctggtcagccctcacatctcagacatgctcttttcttggccccaggtcaccaccatctcctggtttccccctaactctctgggcgttccttctgagtctcctttgctagcttgtcacatgtctctgactgctcaagttggaaggcctagggcttggtcctgggacctcttctcttttccatctacactcacttcgttcaggcaatagcctgaaataccatctatatagccagagagttccaaattgcctatgtccagcttgggtctctcttctgatttccagacttgtacagatctgggcagaaaccttagttatgcctgaatctttttcctcgcactcaaaccaaactatacgtaagttttgtccgtattactttcaaactacatccagaatctcatcacctccactactcctgctctggctggagccaccatcacctccctgttttcccccatactccccacaatcaacacagcagccaaattttgttaaaatgtattggggctgggcgtggtggctcatacctatatgagcactttgggaggaggattgcttgagcccaggagttcaagaccaacctgggtgacatcgtgagacgctgtctcaattttttttttttttgagacagagtcttgctttgtcgctcacgctggagtacaatggcacgatctcggcccactgcaacttctgcctcccaggttcaagtgattgtcctgcctcagcctcccgagtagctgggattacaggcgcccgccaccatgcctggctagtttttgtatttttagtagagacagggttttgccatgttggccaggctggtctcgaactcctgacctcaggtgagccacaagtcttggcctcccaaagtgtggggattacaggcgtgagccaccgcccccggcctcccgtctcaaacgttaaagagaaatattcttggagttaatctacttctgagagttatttagctaggaaaaggggatatttgctctataggtaagacttgccctaatcttttttttttttttttgacttgccctaatcttagggtatttacttgtgtggagagatgcagtgaggtagcggtggggatgtatttctcaacccagcgcaatgacattatcttcaatttgaggagtatttacgtgggtgaaagatccgccacagtccacagtatgcaaatagacaggtttgcttcagtccgggatgcaaggacctagagggtgtgtgtgtggggggtgggggtgggagggtggaggaggaatcgagttaagggggatatttaccctggcgaggtgattttccctattctgaaatatcaattcttgggcggacagtctgcccctcctctcattctcagagatagttacaaagatggaactatcttctcctttctagtcgtgagggagagatgtgtgtatccctgcgtatttagtagtattcaatcggacaagaaatcatgcatcaacgcaggagtgacatttaccagctggtatcgtgaggaggtgggcactcggttgcacagtacacggtagtccctctccaaaagaaagacctgggtgaagttcttaccttgcaggaaggaagcagagccatctggccgcgacagcaggttctgttcscargcaaagtgccggaggctgcagccaggaccccgagggctggaccctgttccattttcagcacggattttggcgtcagtatgcatctcctcctccatcgcgccgagcccacgtgcggctgcagttgtcacttccgcctggcagcgcgcgccgcaaacaggctgcgtaaccagtgcgcacgcgccgggctgggccatcctcctgggcgtccgcacgtggcttagcgtttaccaacaatctggctccgcccagtcccacctcctaactctggcaacgccattggacttttgggaacagaaggcaggccttggcattgatccgctttactctgggcccccgggccctaaatccctgaggccctggtcaggttgccctcttctttgcctgttacaggagtaactacaatgaggcgattggagaaaattttgggtagatagattttttttctccaaatctctgtgcattctatctaccacagaacgggaagaagatggttttcttgtcagatggtgctggagtttgcgtcaggcacatgaaggggcagccccgaatctagcctacgtgagtgccggaccgctgagtggttgttagccaagatggcggtagcgatcgctgcagcgagggtctggmggctaaaccgtggtttgagccaggctgccctcctgctgctgcggcagcctggggctcggggactggctagatctgtgagtacctgggccccaggcggttttcccaaaggggattagggatgtaaaggctatcttcagagtgtggggtccctgaaggatatgaaggaagggctgtcacaaaagggaaaaagagtgggagactccttggagaagacaccgaagggaagatctgccacttccttaggagacgaaaagaacttccacttctttaggagaggaaaaaacccgtttgcaacttctttgtgggccctgagggagacgacttgaagagagagatgggggttccttattagctgccactggtattcaggggaggctccttggaggaacaggggaagaycgcaagaccttctccctcagggtttggagaatgaaactgactttgtaagggagggactttcttctgggcaaagatccctcttcaagaagaagaaagaagagaacaggtccctgtcacaggctgcatagggccttgtatttctttgctcctttgccacaattctgattttaaaatgaattgtgtaaaaaatttgtttgattcctgtgtctcttgatcgaatatcaagacagrgaattcgtgtgttctggacactgtacagaggagacgattaatatttgttgaattaatgaggggaaaaaaggagggagagaggtacagacagggcactttgcccacatttcttagaaacacttgagaaggctttgtttcttgtcaaaagggtcacaatcccttcaggtggatgctgctaagggcaagattacactgcaaaaaacctaggtggaagcctatctttagacggggagaggcaatgggttgcagaagagctttgaactacagttgacagataggagagtagtggttacatgggtggatgcatgtccttgctctgccgctttccacttgtgtagccttggcaacggactgcacttctctggatctatggagctaattttcctctctaaaatattaacagtggccacctcatagggctgtgaaaaatcaatatgtaaaatgctaaggactggacctggcacatcctaagggcaataggaatgttgatagtgagggtggagggaagggacagaaactaaccttggagatggggagaagaaaggggtgaccttgggaaggcctggattggtgaggccctggggaaaaaaatctgaaaagatattgtgaggttgagtctgatcctctgatccccaatccataaggaggggaagatggaatctgtagaaagaagctctgggtaggggaacaaacgggaggagggtgaagaagatgggccaggagtaggacgtagtaggtatctaggaacggagtcacttgaaacaggtaaatacagaagggctgcaggagcaaggtgtgggtagggcagtctcttgcctttgggctggagaccttttcactttttttttttttttttttttgagcagttcatatcctccacagctgatctcagtcccaggggcccattggctgggcaagtggggcaggaggtgggcaggactggggcaggctagggaaaggtcatttatggctgattaaatctttctctcctgtctcaatctcttgattacctttcctcttgcttcccctacttcatttttggtggggagtggggagggaagaagtccctactttttatttatatatatttaaatttgtattatcttaagagttattgttttttcccctttatttctcccacttgttctttctctcttcttctttctttcctctccttctcctctcctctcctcccctctcctttttcttttcttttctttttccctttcctttcctttccttttctcttctcttttctctctctctttctttctgtacctctctttcctttttctttttttttcttttttgagacagagtttcactctctcgcctaggctggagtgcagcagcatgatcttgacttactgcaatctctgcctgccgagttcaagcaattctcctgcctcagcctccctagtagctgggattacaggcatgcactatcacgcctggctaatttttgtatttttggtagggacgaggtttcaccatgttgtccaggctggtctcgaacttctggcctcaagttccgcctgtcttggcctccaaaagcatgagccactgcgcctagccttttctttttttgagacaaggtctcactctgtcacccaggctggagtgagtgcagtggtgtgatcatggctcactgcagcctcaacctcctgggctcaagcaatccccccacctccacctcctaagtagctgggaccacaggcacgtgctactacgcctggctaatttttaatttttttttttttttttgagacggagtcttgctctgtcacccaagctggagtgcagtggcacgatctcggctcactgcaacctccacttcccaggttcaagtgattctcctgcctcagcctcccraatagctgggactactggcgtgcgccaccatacccagttaatttttgtatttttagtagagatggggtttcaccatgttgaccaggctggtcttgaactcctgayctaaggtgatctgcccgcctcggcctcccaaagtgctgggattacaggcataagccactgygcctggctgcgcctggctaatttttaaatctttgtagagatggggttttgccatgttttccaggctggtcttgaactcctggactcaagcgatcttcctgcctcagcctcccaaagtgcaggatgacaagcgtgagccaccttgcctggccatattattaaattatcatgagtttaagtttaagtagccacaagtgggctgggtgcggtggctcatgcctgtaatcccagcattttgagaggccaaggtgggcgggttgcctgaggccaggagttcaagaccagcctggccaacatggtgaaaccccatctctactaaaaatacaaaaaaattagctgggcgtaatggcgtgtgcctgtagtcccagctacttgggaggctgaggcagaagaatcgcttgaacctgggaggcggagattgcagtgagccgagatcgcaccactataccccagcctaggtgacagagcagccctctgtctcaaaataagatagccacaagtggttggtggctgccacattagatggtgcagggtttttgttttgttttgtttttttgttttttcgaggtggagttttgctctcattgcctaggctggagtgcaatggcatgatcttggctcaccacaacctcctcttcctgggttcaagcgattctcctgcctcagcctcccgagtagctgggattacaggcatgcaccaccatgcctggctaattttgtatttttagtagagacagggtttctccatgttgatcaggctggtcttgaactcccgacctcaggcgacccacccacctcggcctcccagagtgctgggattacaggtgtgagccaccatgcctggctaagatgatgcagttttatccaggtggagatgaagaaatagtcagggaaaggttgagaggstgcatattgtagacagattggattactgggttcactggggaagattggattagaaggaggagtggggctgctttacttgtccccgacttcttgcccctgctctgcccactccttcattgaataccctgctgccctgcagatgtgtttgcctgattttcacctcccttcctgtctctgttatcatagcagacgttttagtgctcagggaaaggaggaggaaggaaactcagattgtcaaggaattgtgagtcagtttctcagccactaccccaggcctgggcttggctaagtcatttcacctctctgaccctagctagtggggtgaatagagtccctaccctgttggaagtcaggaagcccctggagctcgctctgtgctaattatcggtgactatttctgtgacccagctcttcaggggcagcctgtctgggggttccagtgccctgtgcagtatctccaagtggtaggtactcagtgtatgtattagtccgttttcaggctgctaataaaaacacacccaagactgggtaatttataaagaaaaagaggcttaatggactcacagttccacatggctggggaagcctcacaaacatggcggaaggcgaatgaggagcaaagtcacatcttacatggtggcaggcagacagagtgcttgcaggggaactcccctttataaaaccatcagatctcgtgagacttattcagtataatgagaacagcacgtgaaagatccacccccataattcaattacctcccactggctccttcccacaacatgtgggaattatgggagctataattcaagatgagatttgagtggggacagagacaaaccatgtcagtgtgtattgtgggatgaatggagatggtcattacagtcttctaagtgtatgggtccatctcttacttgctagtgtgttaagaaacctggcctcctttttcacatcttgaggcactgaatggtttacaaatccaactctaattttttattatatttaatacaccaatagtgcaaggcctttattggtagtactctcctattacagatggagagactgaggctcagagaggtgaggtctgaacttggagctctggactccaaaacccagtttcttttcatggtaccaggctgccaggaggagaaaggatggagcttagattcaagtcttgcaacattcttcttagtccagtattggcttattttgttttayatttttttgagacggagtcttgctctgttacccaggctggagtgcagtggcgtgatttctgctcactgcaacctctgcctcctgggttaagcgattgtcctgcctccccctctcgagtagctgggactacaggtgtgtgccaccgtgtccggctaatttttatatttttaatagagacagggttttgccatgttggccaggctggtctcgaactcctggcctcaactgatccacccacctcagcctcccaaagtgctggggttacaggcgtgagccaccatgtgtggccgggcaggtgatttttcttgtctttcrcctctttccacttcagtccccctggccatctttcccttccttgaatgtgcctcctcccacctggwggcctttgtaggtatgaggtccttcagatgatggctgacatgacacttcctcagagaagcgttccagaccccaaacaccaggtctctgtctgtgaaacagggacagtgatacctgcctaatctgcacgcctttcccttctcacgagatattctgggaagggggactcaactctttgctctgtttgagggcagagtgcctttgagctcaggagagagtgggtttgggtggccttagctaccctagatacggaggacttggagttaactggcaccatccacaaagccttgcatgcactggacctgaacaagttgcttagcccttgaggcggcgcctcagctaccacctgtctttgatggagttatgataacagtgcctgccccgtctggatgccttatgggttcagtgagcrcataggtgtaaataaagtgctttgagtggcacctcagcatgtagttattctctgattgacctatagcagccatgccagtcttcagggtcccagggcgccaggctttcttctcttgccttggagccttggtttttccctaggactgaagtgttctgaccccttggctgaactcccccttctttaggaagctttccctggtgtgccatctgatgctggtgcttcctggaggggtactatctgatcctagctggtgaggcattcctgccagagctgcggcaggtgctttccccgcctctccaccagcctgtgaggtggatgccatccccacgagggcacgcaggttcacagagactggctcctgtccaaggccgcrtggctggaaagagacagaaccagattcaaacaccagcagtttaaccctagagaccctcatcctacctcctatgtgggtaaccactatacatcctgcctcctctgaaatctcccgtttttttttattttaaaattttatgtgagtatttacttatttatttgctgctgttgttattgttttgagacagagtcttgctctgttttcacccaggctggagtgcagtggtgcgatcttggctcactgcaacctctgcctcctcggctcaagcgattctcgtgcctcagtctcccgagtagctgggactacagacatgcaccaccatgcctggctaatttttgtgtctttagtagagatggggtttcgccatattggccaggctggtcttgaactcctggcttcgagtgaactgcctgccctggcctcccaaagtattgagattataagcataagccactgtgcccggccaaaattttatttatttatttatttttttgagatgtagtcttgctctgtcacccaggctggagtgcagtggcacaatctcggctcactgcaagctctgcctcccaggttgacgccattctcctgcctcagcctcctgagtagctgggactacaggcgcccgccaccacgcccggctaattttttgtatttttagtagagatagggtttcaccttattagccaggatggtctcgatctcccgacctcatgatccgcccgcctcggtctcccaaagtgctgggattacaggcgtgagccaccacgcccagcctaattttatttattaatttatttgagatggagtctcactctgtcacccaggctggagtgcagtggtgcgatcttggctcactgcaacctccacctcccaggttcaagcgattctcctgcctcarcctcctgagtagctgggactataggtgcgtgccaccacgcctggctaatttttgtatttttagtagagatggggtttcaccatcgtgatcagcctgacaggctggtcatgaactcctgaccttaagtgattcacctgcctcagcctcccaaatctgctgggattacaggcatgagccaccgcacccagccatattatttctgtattttcatttggcttacctgtcaacttgacacttttttgtttttttaggctagtcaggtgaagcaatgtgagtaagatcacctgtcttgattataacttgtgtgttcagtgtttgtcattcatccctccctgtctctagccttcagttcagggcatgatttggagcaaatgttcagtatctgtttaacaagaacaatcatgagaaatacttactcactagttgtgtttatgaaacattatgtgccaggcactgggctgagcaatccacacaggtcaactcggttaatcctcatgacaacccctgagataagtacttataccaccctcggtgtacacaggaggaaactgaggctcagggagtttttctttaaaaattttttcttttttttttccttgagacaggtcttactttgtcacccaggctggagtgcagtggtgtgatcttggctcactgcagcctcttgggctccagcgatcctcccacctcagcccctcaagtagttggggagtacaggtgtgcaccaccatgcccagctaattttttgtagggatggggtcttgccatgttatccaggctggtcttgaactcctgggctcaagcgatcctccctccttggcctcccaaagtgctggtattacaagtgtgaaccaccacacctggccttaaattttatttatatatttatttttgtagagacgaggtctcactatgtttcccaggctggcctcgaactcctggactcaagtgatcctcttgcctcagcctccagagtagctagaattacaggcgtctgccactgcacttggctcagggagtttaagtcacataatcaggcagcggtctgctcagttagagtccatgcgcttagccatggtgccttcaagtgactccaccagggtcaccccagtacttcctgggcagaccagaccatccagagcgggcaggttgtgctttcctgcatggtgggagaggacgtggcatgaagctttgtgtaaatctgtgcagcctctgccattgtaaatcactggccaccgggacagactcccccacccccttccaaaaactagaggaacagatgggtggagtcgcatccttcctctgcaggcatttggccacccactcccattatggagcatttcctcaggaccaggcacagcgyggagccctttgcatagctcactgaattggggcagcaaccctggggctggggactaccattatctccaccagcccagcaaagaggggaggagggtacagccgagacccagctscagtatgtggagcacactggggtgccgtgaagatagctgtccagcctctagaggctgacagtcctgccctgacacagtggtttgttctcagactctggcctcccctcttagtgcccgtctgaagacttcagccttcggtcctcttccatcagcatgcygtctcccctgtgcctcagtytccctctctggagtatctgctggggccacagtttggttttattgttctttgagacagggtatcactttgttgcccaggctggagtgcaatggtgcagtcatggctcactgcagccttgacctcctgggctcaagccatcctctcacctcagcctcccgcaactccagtatctggactacatgtaaatgccaccattcccagctaatttttttttttttttttagatagagtctcactcttgtcacccaggctggagtgcaatggtgccatcttggctcactgcaacatccgcctcccaggttcaagccattctcctgcctcagcctcccaagtagctgggattacaggcacctaccatcatgcacggctgttttttgtatttttagtagagacagggtttcactatgttggccaggctggtcttgaactcctgacctcaggtgatctgcctgcctcggactcccaaagtgctgggattacaggcatgagccaccacgcccagccttcctggctaatttaaaaatttttcagagacgrgggttttgcytaggctggactcactatgttgcctaggctgatctcgaaccactggccttaagtgatcctcccacctcagcctcccaaagtactgggattacaggcatgagccgctgcacatcgccacagtttgattttagtatccactttaaggtgcagttagttcttcccagctcctcttttccctatctcatacagtgtagtcacttccctttctcccacttctcaccttcctagattttgtttttctctctcttaccaagttttgagtatgtaatacgtcccagatcggtgctgaacccctggtgtgagttaacttagcaacttttcacgtggtgttctgcagccttcttacagataaggaaattcagagaggtgaagtgtttttgcagagagccacacaatgagctaagaaattagaacccagggcagttgaactccagagccagggaacttaaccgcccattcatgcattcactcaggaattccctcttgagtgcctgctgtgaaggcaacctggacgctctctctgccttcctgggattgtggtgtgtgtgggagacagacacgaaacaaagcaatcttctaggtcagtgtctggctatgctgggtactcagaagggtgaagcactgtgctgcaagaggccggctgtttcctcctcacaaggggaggcctgcagtgacattgccaggcctgaatctgccctgccattgggagtgtaatttcctcacgactacaaatgcaaataaatacacacactgaacatgctaccccgctagaactgtggacagcttgttcactgcagttaaaggaagacggagggacacatttgagcacgcatgtgtgagatccagcttgtggcaaaccctgccattctttaacatctgtgggaagtgaagccaccattactgacctcggaggaatcccgggagtagtgggaagaaaagttgcagatgtttgaaaatcaggctgcaggggcagttggggtgaggagcatggatgtctaggagcctgaatctcagcgttggaagcccagttctgatgtaatttttttttttttttttttgagacagggtctcactttgtcccccaggctggagtgcagtggcacagtctcagctcactacagcctcatccttccaggttcaagcagtcctcctgcctcagcctcccaagtagctgggaccacaggcatgtgtcaccatgcctttctaatgtttgtatttttttgtggagacagggtttctcactgttgcccaggctggtctcaaactcctgagctcatgtgatcctcctgccttggccttccaaagtgctaggattacaggcgtaagccactgcccagcatccagcatccccacctttttttttttttttttaaatttgtggtttggtgcaggttattttacctccccaggcctcggtttcctcatctactcaagggcaatggcagataatcaacctcacaaattccccgaggagttagtaggcttgtgcctgccaggctcagctggcttacagcaggtgcttcataagggggagctattgcaacgcctcggctggttctaggctgcctagctccagagctaagagtcccagtgggttcatatccctttgagcatttataggcttctcacaggtctcctgggctttctcagccattcctcatccgacctgaggaggtgtgatgtccttgcaggactcctccagcccctctgagcttttttttttgtttgagacagcatgttgctctgttgcccaggctggagtgcagtggtgtgatcatggcttactgcagcctccacctcctggggtcaagcgattctcccacctcagccttccaagtagctgggactataggtgtatgttaccatgcttgagtaatttttaaaattttttgtagagatgtgatctcaggctggtcttgaactcctgggctcacctgggctcaagtaatccttgagcccaaagtgttgggattacagatatgagccaccttgccaggccctgagctccttctgtcttccatgaaggacacactattccttgccttttgtctttttttgtgtgtgtggcagggtctctgttgcccaggctgggatgtgttggtgcaatctgggcttattgcaacctccgcttcccggattcaagtgattctcctgcctcagcctcttgagtagctgggattacaggtgtgcgcaaccacgcccagctaatttttgtatttttggtagacatggggtttcaccatgttggccaggctggtctcagcctcccgaagtgttgggattacaggcataagccactgtgcctggccactttttgtcttttgcatgttctatacaccttgccgagaatgtgctttccctgcctcctggttatccctcaggtttcagctctaacatcacttccccagggaagccttaccctcgctttcttctgctataggataatatgaaccaccatcattgttacttgtttagtgtctgccctccctgctaggcagcaaggacagatatcttgcctgtcttaggtccccagaacccagcacagggcttggaacatgtcaggtgctcaaatatttgttgaatgagtcagtctgggctcgcagagggagctgggaccagagtagagtggacactgaagcgtatgtagcagtttgccaggcgatagggaaagagaccttcttgtaaagcaagcagagatgagagggagaaatgagaattgctaagattgttttgagcatttgttaggtggcttacagatgctttgctgaacattttattcatgtgatcttgtttaagcctctcatttccatgaggggttctccatttttatagacaaggaaggggacacgtggagaggggaagttactttgccatatcaccctctaagggatttttttttttttttttttttttgagatggagtctcactgtcaccaggctagagtgctatggcgcaatctcggctcactgcaacccccacctcccgggttcaagtgattctcttgcctcagcctcctgagtagctgggactacaggcatgtgccaccacatccggctaatttttctatttttagtgggtacagggtttcgccatgttggccacattgatctcgaactcctgacctcaagtgagattcgcctgcctctgcctcctaaaggcagtaagggaattgaacctaggcagtctgactcttaagagctcaaagacttaagctctgtcctgagtagcttcgctggtgtatggtatagggatcagaagagagctggtctgtatgcctagagggcatcctgcagtgggcatgtgtgtctgtggtcacagtgggagagagagaggagggggcatctgtggccagaatggggaggcctcgaatgccaggatgaagagtttgggcctatggtaatgagaatagtaatagctaccagttattgacttgccagccacttgattgagtcatttaacctcacaacagtcctatgggataggtgttaactgttttcatcccagtttttcagatggggaaactgagacacagaagttgtagtcagttatccaaagtgtcgcagtgagaaagtgctggagttggggctcagaccctgtgagtcaggccccagagttcactggggccacatgctcaaccaccatgccgcctgcctgccgccrgggctgagccagcggaaacctgggtgctgcttctgatgcaggtggtctcctctgctctcttccccagcacccbcmcaggcagcagcagcagttttcatctctggatgacaagccccagttcccaggggcctcggcggagtttatagataagttggaattcatccagcccaacgtcatctctggaatccccatctaccgcgtcatggaccggcaaggccagatcatcaaccccagcgaggacccccacgtgagaggcggcctcccccacttcccgtgccccccacgcccaggccccttgcctgtctcctctctggtcccaactgccccacgtctatctgtgcctccacccgcagctgccgaaggagaaggtgctgaagctctacaagagcatgacactgcttaacaccatggaccgcatcctctatgagtctcagcggsaggtgcgtggggacaggactaggggcggggggctggaattacctgaggtcccctacctgtgtttgggccaaaggaatggctcccaaggaggacagattcttttttgggggggttccatagagttctgagggttctcttgggactctggaggagaagtgtgagagcagtcctgccttagggcagaaggatggacctgatcactaaaaaacacctactgtgtgcctggctgggggctcgcctgtgtggggagagggcagggagaaggcctgacagcccttcctcttggaaatgcacagtcctgagaaacagggtgggtccccagtgcttcctggagtgctccaggggactgccctaggcccatgtgaaatgggctgtgatcccctgataaatcctagtatcagggacaaggatccagtcaagccagtgtcaacaaagagggaagttattgactccaatgaccatacatccagagggtcctgttttggggcacagctagatccagggggctcttccaggcaggaagtagagggaaggcggaaggccagacatggcacatcccagctatcccacacccccacctttatagagctttctgggtagtcccacctagtgacatctgcatacatttcctgggccactcctagctgcaggggagactgagaaatgtattaataatactttagtcccggcagttgctgcctgygggagattgagacctctgttaacagaggaggggaatagtatactgggaaggcaaccaggagcctctgccagtagccccgagtcctgatcctcagggggctggttgcaggctcttacccacgctaacctggacagtcctgccaggccctcagtactcagcaccgcccactcacttggcactggaatgtgcattaacttttaattggctccccacttagaagaaagcacacattcatcagtttcccccacagcaaygggaaagccaggcctgggaacacatggaggagggcaccgccgagccgcgaggagctctggccccggggtgtccctcagggtgctggccaggctgcctttgttccgctttacacatggccctgtgtgatctcatgtccatcygtatgccagggctgcccagagccccagccagactgcttgtcagarccctgcttggcttctcgccctggatgtcccacagcaaactaatcctgtctgaacttgacctcgacatcttcctcccaggcgtgctcctttgcctcacctagtccgtttctcagtgaagagcaccaccatccacctgcttgcccacaccagaaacctcatctcatccctgtctcctccctcccccttgctatccctttctcccctctcattccctctgtctgtagatatttcttttttttttttttttttacttttgagatggagttttgctcttgttgcccaggctggagtgcaatggcatgatcttggctcaccgcctccctggttcaagcgattctcctgcctcagcctcccgagtagctgggattacaggcatgcgccaccacacctggctaattttgtatttttagtagagatggggtttctccatgttggtcagtctggtctcgaactccctacctcaggtgatctgcctgccttggcctcccaaaatggtaggattataggtgtgagccactgcacccagctgtagctacttcttttcttttatgttatttttatttatttatttagagacggagtccacctctgtcgcccaggctggagtgcagtggcgcaatctcggctcactgcaacctccgcctcccaggttcaagtgattctcctgccttagccccccaagtagctgggattacaggcgcccaccaccacactcggctaatttttgtatttttagtagagatggggtttcaccacattggccaggctagtctggaactcctgacctcaagtgatccgcctgccttggcctcccaaagtaccgggattacaggtgtgagccaccgtgcctagcctgtctgtagatacatctttaggaagtgctcagctgctcagaagcacactctgagacccagccccatcctttctctgcttcactgttgttggtgagttgaccttcgtgctctgcttgtggcctcgtgttcacagcatggctgctgcatgtccaagcttcatggctgtctgcaaggcaggaagaagtagggagtgggtagggctggcaccagcagcagtggtctcttctatccagaaagcaaaagcagacttccaccaaaatatctggctaaaactgtgtcccatggccacctctggctgcaagggaggccagggacctgagtgcgtgtctttttgaggctcaggttaggggatttgggagaagggaactgggcactggtgtggccagctgacagggtctgctgccccctagcacagccgactcagcttcctcagacacatccacctgctcctctcccgcctccctctgctaccaagctgggcctctgccccctctctcctggcttgctgcaatcagccttgatgactccatccatttacctcactgcagcctgagagcaattctaaaacacaggtctgaccacattgctcccttgagaagactgtcggcaggttaccactattctcagagtaaaatcaatgtatcgttccctttgttatctgggtgccayctcctctccctcctcatctttccccacccctaccactgtatgtcccagcccttctggcctcatggtctatcattccctctgcctggaaccctccacccaccccatctttgcgcactggtcctcaccgatgcccttccgtggtggaacaggtgcttcctttgggcttctatcacagcaactcgatccctctggcagttctaagcagtctggcagcrtcttcttaaaggcaggaaccccagcatggcctggcccaggactggccttcaggaggactgtgaattcatggaggtgttggaagctgggcaggatttggatggctctctgtcattgcccagcataaccaattgtgggaccccggtcccctctncacccccagggccggatctccttctacatgaccaactatggtgaggagggcacgcacgtggggagtgccgccgccctggacaacayggacctggtgtttggccagtaccgggaggcaggtacgtctgtccgtggtttggccctgtggtccccattgaagtgtacactttagtttttctgagtgttcttccaggagcagcatagtgccaggaaggtctaaggagctggaagaagagctttccaagcaagaaagagacaagccagggtyaggactctggagggggcagtcttcccactctgaaggccagaaagtgtagtggctcagggtctgtgctcttaaccctttgttaccagttgtcaggttttgggcaagtcacttcccttctctgagcctcagttttctaatctccagaagagggattatgacggtacctgcatccaagggtcgctgggaggatgcagtgaagtcaacgttcgctgtgggtgtggcctgtgctggagaccctgtctccctggtgcagtgatcccctggcccctcctcaggtgctgtatccttcggggagcaggagcaggtggaagaaccttgacagacctgagtgcggtgcaagattagaggggcccggcaagcccagatgagtgaaaggaaggaagggtcaaagaccaggaatgaagaaaatcattgagcaggaatgagtgcctgggagcgaaggagtgagcccagggagcagtgagtggggtcttccagggagcttgttggtgtggggccctgcatggggactaccctcagagtgtcagcgagcactgatagggccaggaaggcayatcttaaccctttgtcttagatgcttggggcaagttgcttaactgccctgtgcctctgtttcctcattcgtaagggggatggtagcccttcccaagacagctgttgagggcagtcttggggcagttggcaaagtgccctcagcacagagtaagcgctcagggccaggggttggtgtcatgatcggggactcgccctgggacagcccttcagcagggccagaccacgtggctgtccagagcccccatggaccagcatggcttgcagcctgctcctggactgtctactgctcacagctggaccaggcycttggccccacatgctctaggagggcaaacgccctgtggtgtttgtctaaggtctagtgtcatccgtgcggaaaaagatttccagacaccaggcagcaagctgggcccccgccagctgtgctgagcactgcacctgtttttgctgaagggttctcttgtgagggcaccaggcaggaccgagcaagcctcatgggaatcatgggagccgctgagctctccacatgggagagctggccgcctctgcaagaatgactgtccagcactgagggtcagcagaagtgtctgggcagctgcaaatgggactcatgcagaggcagcatggtgcagggtaaggagttgagtcacatccactctagacttcacttggcaggccactcaccttggtgacgctgtctgtcgtctgtgaagtgagaagagtggtgttcatcatgataggtagtgcctccctgggctcttgacaccagagtgctgttctttttttcttctccttttttttttttgagatggartctcgctctgttgcccaggctggagtgcagtggcgcgatctcggctcactgcaagctccacctcctgggttcacgccattctcctgcttcagcctcccgagtagctgggactacaggcgcccaccaccatgcctggctaattttttgtatttttagtagaggcggggtttcaccatgttagccaggatggtcttgatctcctgaccttgcgatccgccctcctccacctcctaaagtgctgggattacaggcgtgagccaccatgcctggcctttttttttttttttgaggtggagtctcactctgtcgcccaggctggagtacggtggcgcagtcttggctcattgcaacttctgccttccaggttcaggtgattctcctgcctcagactccggagtagctggaattaaaggcatgcaccaccatgcctggctaatttttgtatttttagtagagatggggtttcaccacattggtcaggctggtttcaaactcctgacctcaagtgattcgtttgccttggcctcccaaagtgctggggattacaggcatgagccaccgcgccgggccagccaaggtgctgttatatgtgctctttagcctcggagactgtcatttcccctcactgcactgcagagcgagggcacaccgggtgaggttagggcaggccccagtggtgttgcctcattgaggcacctcccccatccatgtgaggcaggagaggcaagcattaccatcaactctaaaagccaggtaagaacctgagtcaacaraggtgaggtcatgggcccaggccacattctcctaaggagtggagccgagtctttttatggcagtctgacccagagacagctctcgctgtttcccacccttggctgtcttcccagggctatatgtggagtatcagtggtggcactggcagggagtggcgcccggtgaaaaggagtgttaagaggaagcacgtgccaggtgtggtggctcacgcctgtaatcccagcacttcgggaggcygaggcgggaggattgcttgagcccaggagtttgataccagcctgggcaacatggcgagacccccatctctaaaaaattaaaaaattagccaggcgtggtggtgcacacctgtagtcccagctactcaggaagctgagtgggaggattgcttgagcccagaggttcaagactgcagtgagctatgmttccaccaccgaactccagtttgggtgacagagtaagatcctgtctctgagaccaacaagaaaagaggtagcatgtgtcaagcaagagcagcagttcccactggacctggagtttcctggtgcaaatcagcctgtgagtctgtattttcttttttcttcaagacggggtcttactctgtcacccaggttgaagtgcagtggcatgatctcggctcactgcaacctctgcctcttaggatcaagtgatcctcccacctcagccccctgaatagctgggaccacaggtgcacaccaccacacctggctaattttttttttgatttttggtagagacggggtttcgctgtgttgcccaggctggtctcaaactcctgagctcaagcagtccacctgcctcacccttccaaagtgctgggattacaggcacgagccactgagcctgacaagtttgtacttttagcacgttcccctgcccctgcccagtccttctcacatgggtggacctagtaccacattctgagaaagcctgattccaaggycctgtatcagtcccttggaccttctttgaccctctacaagacctttctttccctccttaaccagagcaactcctgtttctatctgttacatatgcagcacagccacatcttgtgtggatttgtattatgtccattcaaaagcatgtgtcagaaaataccagtaaacctgtattaaagttggatgttgaagtagtgctaaccaccctcaactctaactaaaatatcaacaagtgggctgggcgtggtggctcacacctgtaattgcagcactttgggaggctgaggtgggtggatcacctgaggtcgggagtttgagaccagcctgaccaacatggagaaaccccgtctctcctgaaaatgcaaaaattagctggatgtggtggcacatgcctgtaatcccagctactcaggaggctgaggcaggagaatcgcttgaacccaggaggcagaggttgcagtgagccaagattgcgccattgcattccgggcaacaagagcaaaactccgtctcaaaaaaaaaaaaagaaagaaaattaggtagatctagtggtgcacacctggaatcccagctatctgggaggctgaggcataagaattgcttgaacctggaaggtggaggttgcagtgagctcagattgcgccactgcactccagcctgggtggccaagccagactctgtctcaaaaaaaaaaaaaaaaaaaaaaggtaactgctgtgtgtaatgtgatctccattaaatttgtatctaaagagcgggttctgcggtaaagaaaggatttggaaagcactgtactagagagctccctctgaataatgttcccggtctgagtgcttgcagcattgatccacagcgctgcccctaaagtgttggtgtgaaggttgtcccactcttcaggcggggcaaagagcttgtctgagggcaatcacaaacccccttctgtcttctaacttcggaggaagggcccccttaacctggagcggttccctttgatggggaggtgggtgttcaccagaggttttgtttgaagaaaaggttttactgccatacatgggttagagtacttctgtagtccagaagttgtaaattagtggtctatgctgttatttggttcataatgatgatttttttttttttttcgagacagggtcttgctttgtagcccagattggagtgcagtggcacgatctcagctgcctgcagccttgaacttctgggctgaagcaatcctctgcctcagcctcccaagtagctggaaccacaggcacacatcaccatgcctggctaatgttttgatttttttttttttttgtagaagcgaggcctcaccatgttgctcaggctggtctccaactcctgggctcaagcgatcctccaacgtcagcctctcaaagtgctgggattacaggcatgaaccaccatgcctggccatagtaatgatttatggttagaatatttcttaaaggtaattgaattagttgaaagcacttaaataccagacaatatctcactaagagaaagaaagaaaaaggctagatttctgctttcttttgaaaaatcagattggccttgctgggcagagtcagtcagtctgaacatcagtcttcctcttaaaacaagcctgagctttcctgtctgcctgccagcatgctgcaggtcacccacagggctgaactgtccccctgtactgcccactcggctaaccattgcctcctcccctcctaggtgtgctgatgtatcgggactacyccctggaactattcatggcccagtgctatggcaacatcagtgacttgggcaaggggcgcmagatgcctgtccactacggctgcaaggaacgccacttcgtcactatctcctctccactggccacgcagatycctcagggtgaggatgcatgccctgtaccttgcacatgtgcagaccaatgtcacacccctgtccaggcctcagctcttttgcctgccttctgggtggaattctgggttggtgacaccactagagccctggtctgtgctccagacttcttcttcttatttttttcttttttgagacggagtcttgcactgttgcccaggctagagtgcagtggtgctrtcgcagctcactgcagcctccttctcccagcttcaagcaattctcctgcctcagcctcccgattagctgagactacaggtgtgcaccaccacgcccagctaatttttgtatttttaatagagacagggtttcaccgtgttggccaggctggtctcaaactcccggcctcaggtgatccacccgcctcagcctctcaaagtgctgggattacaggcgtttaagccattgtgcccagcccactttttttttggtctgagacggggtttcactctcgtcagccaggttggagtgcaatggtgcaatctcggctcactgtaacctccacctcccaggctcaagtgattctcctgccttagcctcctgagtagctgggattatgggcatatgccattgtgcttggctaaatttttgtattttttgtagagataaggtttcaccattttggccaggctggtcttgaacctgagttcaagtgatctgcccaccttggcctctcaaagtgctgggattacagatgtgagccactgcacctggcctgtgttccagactttgaatgcacctcttgtctgggacccttcagaagagggctctgttgctgtccccaccccattcaggggcctgaagcctgtgtgaccacactctggatttcccaaccacatgccyactgcatttgtctgctcacaaacatagccaacgtgtgcaccaggttccactgtgccaatgcttcacgttcatcatctaataaggaccctcattgtggccatggggacagaggttattatttgctcttgttcctgttttcaagagcaggatgcccgtgttttgtgtgtgtgtgagagacagcaagtgaatgggaaaaaaaaaagtgcaggagcctggccaacatggcaaagccctgtccctactaaacatacaaaaattagcttggcatggtggtgcacacctgtaatcctagctactcaggaggctgaagcaggaggattgcttgaacctgggaggcagagtttgcagtgagctgagatcgtgccattgcactctagccaaagtgagatcctgtctcaaaaaaaaaaaaaggaaattgaagtcaaagagggaagtcactcgctaacggtcatgtggcacagagggagaggagcagggactcaagtcattgactgtgtacctccagagcctgggttcttggccctgacctttgtctgcctcagtcctcagagtcaagtaagcttccccaaagcttaccgtaggtgccctgaagtcccttcccttataagagcttttttgggaagcaaacccactgggtgccaggcctgcaccctcatagtgtggagaacaaggaatcggagccccttcctgycctccggggcctgtagcctgatctagggttggtctgggccctggcttytttgccctagggcagctgagatgcatgagtttgtgtctctccaggcctcagcactgtgcccagcacagcaggaggctccacaccccttagctcatagtgttcttttgttgaggaacaagaagcagtttgagcctcttaggtgggaggtgggcagggaagctttctcagaggaggggrcatttagggggcatttgagctaaaggtaatagggtttccacaaggctggggcgtggccctaaccttccctctgggtccctgctaagtcacttcaaatacacgaagttcctgccrtgtgccggtgccactccaagtgcagggaacaaaagcaacgcaaacctcagccctcctggtgctgccattgtggtgggggagacggacagtaacagagatggagagggaactcctggagtatatgagggtgggggtcctgtagggagcagccaagccagccgggtgtggtgcactgtaggggtggctggggtccgtcactggagtgacactgaagtatggaccagaggatgtgagggggggagctgtgtggtgtcttgaggcaggtgtgagcctggcgtgtttgaggagctgggaggagcccagaggggcaggtgtggagtgagcaggtgtggagtgagcgggtgtagggtgagcaggtgtggggtggttggaggtaaagtccaggaggtggtgggtgggggtgcagatggtgcagggttgggtggggcctcaaggcctttgcctgttgcagggatgtcgacttttactcaaagtgggacaggagccgtgggtggggaggagtctgctcttccttggcctggctcacctcttcatggaatccgcgggctgccctgtggataagggattgggcagtgtgtgaagggctagtaaggaggctgctcagtaacttgggcttgaccagggtggtgcagaggaggaggtaagaggggttaggttctgaaggtggagtagatgtggagaatggcgggaagtttggcttggagatgatactggactcttcagcctgagcagttggaagggtggagttgctttcagctgagcaagaggagacctgggtgggcagatgctggggggcatcaggagctgaggtgtttcctttccccttgaagcctggtgactgctggcctgagccacgcttgagccgtgggtcatgtgagtgtgaatgagtgtgagtgcatgtgagtctccgcccctgctcaccaccctctcatcccctgcagcggtgggggcggcgtacgcagccaagcgggccaatgccaacagggtcgtcatctgttacttcggcgagggggcagccagtgagggggacgcccatgccggcttcaacttcrctgccacacttgagtrccccatcatcttcttctgccggaacaatggctacgccatctccacgcccacctctgagcagtatcgyggcgatggcattggtatgggctctgctggctgctccccaccccgctgggatcatctccttccctccccaatccngccaccttcctgccacccctaccctccttcctggttctcgtcctgtgtcctgtggcrtctggcacttggtcagccacaggagttgaggtcctgagcactcagccttgctctctgtcctctccctgctcgtccccttggcctcgtgcatgttccttatctcagccctggcctgacctgccttctctgtgtccccacagcagcaygaggccccrggtatggcatcatgtcaatccgcgtggatggtaatgatgtgtttgccgtatacaacgccacaaaggaggcccgacggcgggctgtggcagagaaccagcccttyctcaycgaggccatgacctacaggtgcctgcygctccccccgtcagcayccccacagcactgacagccaccrtagcatcttcctcatatcgatcactgtctccaaaacatggycttatcacctgatgttgcatctcccccttgcctttattccgtttccactcctccttccctagttcatccyccatcctccctcctgacccccactccagggascccacactgacctggggccccttgcccctrtgcaggatcgggcaccacagcaccagtgacgacagttcagcgtaccgctcggtggatgaggtcaattactgggataaacaggaccaccccrtctcccggctgcggcactatctgctgagccaaggctggtgggatgaggagcaggagaaggcctggaggaagcagtcccgcaggaaggtgagggtgccccgcccgggagggtgtgctgggggctgctgcggcctgcagagcttgggaaggatttgtggaacaccgaactgggaggctcagggataaccccagtgatgtctcagatgtggcctgtggagccaggctgctggggccatgtgtgtcctggctctgtgtccttggcaygttgccctccacttccttgtctttgaaaggggatgctggtggtgcccatttcagaaactggtttgagactgggcatggtggctcacacctgtaatcccagsactttgggaggccgaggtggcagatcacttgaggtcaggagcttgagaacagcctggccaaacatggtcaagccctgtctctactaaaaatacaaaaattagggctgggcgcagtggctcacgcctgtaatcccagcactttgggaggccaaggcggacagatcacctgaggtcgggagtttgagaccagcctggccaacatggtgaaacctcgtctctaataaaaatacaaaaattagccgggcatggtgccgggtgcctgtaatcccagctacttgggaggccgaggcaggagaattgcttgaacctgggaggtagaggttgcagtgagctgagatcgtaccattgcactccagcctgggcaacgagagcaagactccatctcaaaaaaaaaaaattagccaggcgtggtggtgcgtgcctgtagtcccagctactcaggaaggtgaggcagaagaatcgcttgaacccgggaggtggaacttgcagtgattggagatggcgccactgcactccagcctgggcaacagagcaagactatctcttaaaaaaaaaaaaaagctsgtttgaggattaggtggcaaaccgtggtggagtgtacatgccctgcccagagtcagtgtgccaccctccctgrcccggtcattaggacccagggcccgtgcagcccagtggtgagggcagcacccggcatagggcagcaccgtgtgtcctgtccctgcccttctctgtgcctcagtttcctcattgcttagctgtctacctcttagggctgctgaaagccttaaatgattccacacacttggatagcacctgatccctgctgggatttgagggttttcattacacttctgctaggataatcatttccattgtcgaggtgggaacacaaaggcttggagtggttaattccttgccaaggcccygcaggaggaagcagggtcctgcatgggaggccggctagcctgcccactgccccatgtccccacaggtgatggaggcctttgagcaggccgagcggaagcccaaacccaaccccaacctrctctkctcagacgtgtrtcaggagatgcccgcccagctycgcaagcagcaggagtctctggcccgccacctgcagacctacggggagcacwacccactggatcacttcgataagtgagacctgctcagcccacccccacccatcctcagctaccccgagaggtagccccactctaaggggagcagggggacctgacagcacaccactgtcttccccagtcagctccctctaaaatactcagcggccagggcggctgccactcttcacccctgctcctcccggctgttacattgtcaggggacagcatctgcagcagttgctgaggctccgtcagccccctcttcacctgttgttacagtgccttctcccaggggctgggtgagggcacattcaggactaraagcccctctgggcatggggtggacatggcaggtcagcctgtggaacttgcgcaggtgcgagtggccagcagaggtcacgaataaactgcatctctgcgcctggctctctaccacctctggtctttgtttcctggagtttgggggtgatttgaggccacccccagcttctccaccttagataaataaggtcaaggctcttgagatacctacttcccccggaagcttgcgcaagctggaaggttaacttcagcagacaggatgggggtgggggggtcctccagagatggtctcctgctctctcacagaatgggagaagcctgctgtccagcagagtgatggggagcccagtggagctagccctgcccagcaggggtgcaggggagcgtccaggatgaaggtcagggtgtggccaagccctgctccccaccactccagggccccacagatgcaaaaacaaccccaggcctcagagtggggagtgcatgtttttcaaaaacaaaaagtaggcaaaaacagtccaccaccccatctttcctgcccaggcccctggctgggggaggccaaggagtggcttaagttgtccagcttctgggccctcctccctcccatcaagacctggaaggaggggctgagccaggggccggccccagaggcccaggccagggccggggccaggtcagcacctccgccctccccaatgagagtcagcactggagccttgggtcttgcagttgtttccagagccgaatgctggcctgggggcccaggggccgtaccagcagcaggttgcggaaagcacagtggtccgcagtgcggtctgctggccaggctgtgaggaagcctgggtgggcctggggcaccaggcccagggctcggatgcaaaggccagtgtagacgtcctcaaaggggaagggtgccacacgggctgccgcccgcagcagccagggtgccaggcgcccggcaatgacgtagccacccccgcttgcataggctgggtagccaccttcgaagaaggactcgggcacatagaagggtcctcctggcttccggagaggcatggcctgggtaaagacctcacccaggtagaggcttcgggccgaggcaggtggcagggcccgcaggtgagccagcagggcaggggtgtgtacaaaggcatcgtcctgagctcgcaagacaaaactcacggtggggcagtggcggcccagccaggccagcagcagcaggtctttgagcgtctggttgaatgggacgtcgaggaagtcccagagcagcaggtcrctgtagcgacggctctcccakgccactagtgagtctaggtcaggccccrcctcaccyaccggagaccctagcaggaagagcagccggatccctggagctggactgccccacgtctctctcacggcctgtcgttctgcaaagcgccctggttctgacttgacggccaacagcaggtaggggacatcagtatctgagcagctggagacttggcygccaccacctccaggcagccactgtgggaagctccggcaggctgctgacagcaagaagcggcggaggtccttggggtaggaggcgaagtcagggatctcggtggcggcggcggccccccaagcctggcagccccccgtttcagtgctgtccccactgggcagggaccccagccgccactgctgytggttccagtaagcaaagggcagcgggatagtctggcccaggcgggtggagaggttggcaggtagggtgggctcagggttggctggcgtggggcttggcggggtgccccgagggctggggtaggccttgctgagccgggactcggatgtccaytcgatgtacactttgaggcccaggagtgtgagcagtgctgacaggcagagaaggcacttggggyagcgcatgacccggcccagggaaggggcggccgcgggagctacaagggagccacaggggagccacggaggccattggggtgtggggatgggcctccagagagggcccagccaggccccaggcagacagcttcacaatctcccatagtccccgccaacccccataacagattctctcggtcccagatcctaaacagctcccctgacccagggacctcgttggtccttattcctagacctaggagtcccccattccaatcccgtaccagcaccctgttcttcccactccgtccaaatgcttccaccttcctaaaagcccaagggtctacctcttccctgtctccatccaggacaagggaccttgccgtctatctcctccctctccctccatttattgccctcaccaggaaatcaggagcgggattcctagctccctggggttagaaacccagcctgcctcccgcaacaccccaaccccagggactggggaaccagggatcccatgcttttttacctctgggtctggctcccgccagctccgggtgccggcctcaggtcaggcctccctcagctccctctgatctgcctgccccagcccctgtgttgtcgaccggcggggcccagccctgcccagccagtccagaggggcggggaggggagtggagcgggassagggagggccccaggggccggggcggggctgaggcaggagagagggagggagggagggagggaggagggcaggaggccgacctgagagatggggctctggcgtgttagggctggtttctggtgagacagctgggaagggtgcagggggcagccacagaaacaagacgggggctttgtgaggcctgggaggggagaaccagggccagggggtgccagggagggtggggctgaaggctgggcctgggctggggagtgttagagtgaccagggcgaggcagggtcccactgaggcagagatggggaggctgagaggctggcgcccggctgcacccatggccaggaggcggcagtgaatgtgctgagtgggaagggatcggcgggcctgccagagggatgtttgttgttgctgcccagtcagggtgaggtggggggaacggggctggtgagaaggagagacagagacattgtggagagggaagagacggccagggagcagagagaggagaactggggtgagacaggcgatggagagagctgagggggagagagagagaagacgggcaagtgggaaggtggccaggagggagagggggagggaaatggagatggcgagaaagataaggggttgcggaagccctgtggggtgctcatggggaaagagaggttgagagaggcaggtggagggcagaggggagggactcaggcttccgagccagacccaggcagaggcggagagggagccaaggggaagaacaggagaggaaaagactggagcttcaagggcaatagagggtgacggggtggggcccacggggaaccccgggagctaagctgatcccctgtacctcctccatccctctcggcacccgggctgcctgcccagcagcgtgggaatctgttcctaccttacccccaacctccggcctggagccagcctcaccccgggcccctcccctcccccagcggcactgtgactccaggaacactcacatccagccccttggggcaggagggggtgtctgcctgtgtttgcatccctgccctccaggggcccctgctgttgggactgcatcagctctctgaagacctcccaagacatggggtaagactaaggggctcccactaagcctgggctgaccccttcactccaccctggtttggggcaggcctgtccccatcatggcaggaacacagtctgtcagcagcagcagttgatgatctgtccagccctgatttcctcccccaaagtttgaataatggagcctgtgggaacagctggaggaagagagtggggaggaagtggtgaatattaatggaataatagttggagtgggaaatgacagctaggggctgggggcaggggcccgagcacctcctgagggagtctgcaagcccactccactctggggctgggggagagggactccaggccccctgagctcatctagcttctgggggcagggggtgctgctcctcctggaagcattaggaagcttcacaaggtgcctttctttttgcctttgccatgtgcctcagtccgggtccaatcaggagagagaaaccacacaggaatgggaatagggaaagttcaatatacagaatgattaactctcatgggattggccactaaggggtgccttcttggggaacatggttggagggtggacatgctggtggaacacgatcattccaatccaacacttctgtctccccaagccttgggactcccctcacccatcttatgctagggcagttctggtctctctgcctcattaactttaggccactgttggatccaagttccggttaggcacccaagcaagctattagaactacgtccagctgcacaaggtaacccatgaaatccagaagctctagaaagcgcactcatgccagtaaatttggcctgagctagtgttacatccaccctcattggtgtaacatccttaaaatccccttctgcacacattccccaagtttctgactctgtatatttgcgaagccttgtcattcttatagtgtaaaagctgctcccgcctaggtcctagctggcacctgttcacctggagcaagctgatttcaccctaggtatttatgggtctagaggcagcaaggggcgctgtggtgagtcttaagaagaatggggtgtatctgttatttctgtataagagctggccataagaaaaaaaaaactgtggtgggacagtggctcacccctgtaatcccaatactctgggaggccaagagggaaggatcactttccaggagttcaagaccagcctgggcaacatagtgagatcttaccgctaatcaaaaaaaaaaaaaaaaaaaaaggacgaccactttcaaggtgtctgcccctggtgaggtcatcacaaggtttcttttttttttttttgagacggagtctcactctgtcacccaggttggagtgcagtggcatgatctccgctcactgcaagcctcacctcccaggttcacgccattctcctgcctcagcctctcaagtagctgggactacagacgcccgccaccatgcccggctaatgtttttgtatttttagtagagacagggtttcactatttctactaaagtagagtacttaggcaggatggtcttcatctcctgaccttgtgatccacccgcctcggcctcccaaagtgctgggattacaggcatgaggcactgcacccggcctctgtttttttttttgagatggagtcttgcactgtcgccaaggctggtgtgcagtggtgcaatctcggctcactgcaacctctccgcctcctgggttcaagagatcctcctactcgggagggttcagccttccgagtaactaggattacaggtgctcgccaccacgcctggctaattttttgcatttttagtagagatggggttttactatgttggccaggctggttttgaactcctgacctcatgatccgcctgccttggcctcccaaagtgctgggattacaggcgtgagccaccgtgcctggccacatcacaaggtttctaagcacaggaaggctggtaggttcctcagatgctgataagtcactcgcttggagtgacttgggggttcaagatcgcctgtttactctgggtccaattagatgaccccattccaaagaagtaaaaacttttgggccgggcatggtggctcacacctgtaatcccagcactttgggaggctgaggtgggtggatcacctgaggccaggagtttgagaccagcatggccaacatggcaaaaccctgtatctactaaaaacacaaaaattcgcctggcgtggtggtacacgcctgtaatcccagctactcggtaagctaaggcaggaaaatcgcttgaacccgggaggtggaggttgcagtgagccgagagatcgcactactgcactccagcctgggtgacatagcaagactgtctcaaaaacaaacaaacaaaaaatctgggggctgtcatgaaagctgtctagttctcagactgtgacttgagctgagttagcggacccaagcttgtcactgtctgtgggcactcaagggcactctggagaatccatccaataccctggtcttcagaattggcacaactagcacagctgttgagcacagcagccacagggggtcccaaggcacgt

SEQ ID NO: 95045 - DNA, 42337 bp, Homo sapiens
acccttgctgttaatccttatagccaaacatgttgttattattattatttgtaaaagtaagttattctaagagtaattgattaaggctgttgtcttttaattgctttctaatctggcttcaaaacaattacgtaattgtcttcatttttcctttaaaaacctttgtcttcctttacatccttgaatatgtacatagtttactatggcatgaattttcccactgcaatgccgtattctcaaatgtcattttcttttagagggcttctctctgtttgttatttaggttgacacagcaaaagtgggaagtaacaaaaattgaataaataaaattttatactcctatataaataattatatgtagctactgatgatagaagcagaaatgggtttacctcgaagcaaaagaagcctgagttcagggaccctcacttgcactggctccttccaagaccctaagagcagctctagccattgctcactttgttgttattattattatttgcaaaagttcttctaagagtaattgattagggctgttgtcttgtaattgctttccaatctggcttccctctgccatacttcccctggtttggggtgacattgtagtgttactggtattttgtattataactctctttttttaagctctctgccccaccaattatgtaagcttcaggtcctaaatagaatggatccgtccctggttatagattaatatttattggcaatggggaatggttcattagatattgttgagtgaaagaggcaacttacaaaacactggtaaaggaagacctcattatattaggcaattcttgtattgctataaagaaatatctgagactgggtaatttatctaaaaaagaggtttaactggcacacagttccacaggctttacaagaagcatgctgctgacatctgctcagcttctaggtaggcctcaggaagcttacgatcatggcagaaggtggaaggggggcaggcacatgagatggtgaaaacaagagtcagagagaattgaggggaggcgccacacacttttaaaccaccagatctcacatgaactcagagtgagagctcacttattatgaagcagatggcccaagccattcatgaggcatctgcccccatgatccaaacacctcccaccagaccccaactccagcattggggattacaattcaactatgagatttgggtggggacaaatatccaaactatatcacccatgtagaatgcttatacatacgtatgttttttggtgctagatgaattacaatgcctcaggcataagtcacttttacaataaatgaaaataccaaaatggctcccatttaagaaatagttgccaattaatttttaaattaaaatatatttgtgttctgggtagggataaaaactaactggaaatggggatgaatgaattttctggggtggtggaaatgttctttatgttgttttgtgcaatacttatatgatgatatggaaatgttacaattcattgaactgaaaagctgcactctgcattttattgtacactaattatacctccatataatatatataattaaaataatcacattaaaattgaaatattgaaaagaaaaaattacactcagttccatcaccttaaaacaactacttaacactgtgggatgtttcgccgaaatgtgttttcccccaacttatcaccttttcatatttatactatatgaaaggtatgtgtatgcttataaagaaatgtgtgatgacaaaaggaattgctaaggtcaattgagctcaccatgtgccaggcactgcagcaagaagtttacatgcatttacgtttagtcttctcaaccatattattctcattttacagatgaggaaacatgcaggaagagtaagtaatctgccagagtcacacagctaatgttacagagctcagacctgactccaggcaatctgattcccccacccttctagatgccctacctggctagatgagccattttcttgctgggaaatatatgagctcaactgttccaacttctccatatgcattcttggttcccctcagcccacatctacccttcagtctttttggaaagtcaatcaacacattcataagtactcccacttcagccactggcaatggaggcttctgcatgggtcccttggaaactgggacacattccttatagggtttcttgatcttgattacttttttttttcccccacacagggtcttgctttgtcactcaggctgagtatactggcattggaacaggaattaaaagaaattaaaaactgtgtaagcaaaaactcggttgtatgtaaaaaaacccaatttcccttgaggaagagaaagggctggagtcctttaaaattaactgcctgtttttctttctgaggctagtgagccttatctctccctttcccaggcattgtgaagactctgtttctctagctgtgcagctgcaaggtcactagacagatactctcaagtcgtaaaacgtgttgttccttgaaaagtaagatataatgtaatgccatgtctcaattgaataactgtctttgtttctcgcttctgtaatatgcttcccactgcacaaatctccccctgccccacgaaatgtttaaaaggtagcttgactctttgttcagggctcagtcctttggatgttaatctgactgggtttgtgcacctaaataattaaataattcctcctcaacccctcggtccctttggtttcttaattatcccgcagcagcatgaacatggctcactgcagccttgacctcttgggctcaagcaatcctcccacttcagccccctaagtagctgggactaagggcgcatgccaccaagcctggttaatttttgcattttttgtagagacggggtttcaccatgtcgcctgggctgatcttgaactcctgagctcaagcgatccacccgcctgggcctcccaaagtgctggaattacaggtgtgagccactgcacccagttaaagtcacagatctccaagtcaggtctgagctctgtaacattagctgtatgactctggcaaattaatcttcctgcatctgttttttcatctttgaaataagaataacattaaaatagtttattcttactattttttaaaattagaatattgagaagaaggaaaaaaaatacctatgtttccactactataatggaaactttgccatcattttgcttttggttgacatctccccctcccccatttttaaaaattaaaattgactctctttctttccttctttctttttctttttttaaagatgatgtcttgctatgttgtccatgctggactcacactccagagcccaagcgatcctccctcttcagcctcctggatagctgggactacagggatgtgccaccacacctggcttaaaccaatttctttttaattcataatttttaaatcaaaacaatttactcaactctttattttgaaaagttttaaacctcaaaaaagttgaaagaatagtacaatgaacactcacgtacccttactctagcaccaataattcaccaattattaacattttgactgtgtccccctctgccataatatacttttctttttttctgaaaccagctgattgattagggtggtggttgctgaaaggtgaggtgctgtggcaatttcttaaaataacacaacaatgaagtttgctgcatggattgactcttcctttcatgaaagatttctcagtagcatgtgatgctaattggtagcattttatccacagtagaatgttcaaaattgtagtcaatcctctcaaaccctgccactgctttatcaactaagtttacgaaatattctaaatccttcattgtcatttcaacagtgttcccagcatcttcaccaggagtagattgtatctcaagaaaccactttctttggtcatacattagaaggaactgttcatccattcaagtttctcacgagattgccacaattcagtcatatcttcaggctccgcttgtaattttagttttcttgctatttccaaccacatctgcagttacctccttcactgaagtcttgaacctctcaaagtcatcaatgagaactggagtcaacttcttccgaactcttgttaattttgatattttgacatcttcccatgaatcacaaatgttcttaatgatatctaaaatagtgaaccctttccagaaggttttcaatatactttgcccagatccatcagaggaataactctctatggcagccatagccttacgaaatgtatcttaagtaataaaacttgaaatgcaaaattacttcttgatccatgggctgaagaatggatcttgtgttcacagacatgaaaacaacattcatctccttatacatctccattagagctctcgtgtgactatgcacattttcaatgagcaataatactttgagagaaatccttttttctgagcagtaggcctcaacagtgggcttaaaatattcagtaaaccatgctatgaacagttgtgctgtcatccaggctttgttgttctacttacagagcacaggcagattatatttagcgtaattcttaagagacctaagatttttataatagaatggtaaacaagcactggcttcaatccaaagtcactagctgcattagcctctaacaaaagagtgagcttggcctttgaggccagacattgacctctctagctatgaaagtccttgatggcgtcttcttccaatagaaggctgttttgtctacattgactacttgctgttcagtggccaccttcatcaacgatcttacctagatcttggggataacttgctgcagcttctccatcagcatttgctgcctcatcttacactttcatgttctggagacggcttctttccttaaacctcatgaaataatctcttctagcttcaaacttctatagcttcctcacctctctcagtcatcatagaatagaagagaatcagggccttgctttggattcggttttgggtttaggggatgctgtagccggttttattttctatccaaaccactaaaattttctccaaatcagcaataaactgtttcgctttcatatcattcatgtgttcattagagtaaaatgtttaatttccttcagtaacttttcctttgcattcacaaactggctaactttttggtgcaaactttcagcctagctttcagcctatcttgccttttgacatcccttcctcactaagcttaaccatttctagcttttgagttaaagtgagagatgtgcgactctttctttcacttgaacacttagaggcccattgtagggttattaattgacctaatttcaacactgttgtgtctcagggaatagagacccaaggaaagggagagagaaggaagaacggcctgtcagtggattagtctgaacacacacaacatttatcaattacgtttgtatcttatatgggcacagctcatggcgccccaaaacaattacaatacaaggaacactcatcacacgtcacccttgtagcagagcacatctccctatgatctaggtacgagcattgtacctaggatggacgcgttcgtcctcttaccttcgggaacgccctactctgtctacggagtaaagtacttaataaacttgcttttgctttgctatgcggactcaccctgaattctttcctgtgcaagatccaagaaccctctcttggggtctggatcgagacccctttccggtaacgaaactacactaagaatacaagaaaacttacgttactgtgcgggagctgacaaagtctctcgccggagggagcacacagaatttcaccttctccggccttttcccaagctggcaggagtaaagctgtaagaggaggtgccagcgccccaagccagctctcccgccggcactgctgcggtccgcgaggcagccaatcaggtagctgagtttgccataggggcgggacttcctccccagcgcgcacgagtacgtgcgtggaggtcccgccccggaactgcagttgctgctgcagctgaggtacagcggcggtttctgaggttcttcactcgcgrctgacggagctgcggtrgcgtctccacacggtgagtaccaaaacgagcggggttggagccgactctggagaggggctgaggccaggaacccgggttcctatcgcgggtcgctctgggcckgtgggttcccgggtccagagagggcggccgccggcccaagcsgtccaaccgagctgcgtgccacggtccccgcgccttgggctccttgtccggtcatcagagcctgacggccttggcttctcggcttctcggtttctcggtttcgtgcgcgcgttcgtgcctgagacaaagmgagagggccgcgcgggaccggcgtcacgaggagacagaggcccttctactctgcctggcgctctccgtgtcctcgcccggttcgcgtggcacccctcgccctctccttgttgaaccccgcgtgtttctttgtgtttttttttgtttgttttttgtttttttgccgtggcgcagcgggtccggcgggcactgtgtgcgaacgtgctctcctcgccgggcgccatgctcagcggttttttttgacgtgcgtcactttttcgtagtggcgtataaggattctgtgggacagatgtcctcgtttttcccattgtgcagactgggaaataagagactcagagattaatacgtccaccgcagagccacagctgacaagtggtggatctggatttgaaccaaagtttaccttggtctttttcacggaatctgttatctttcttggcctttctgaaaaggaaaaacctggatcgagttccacccaaacgagttgggcctaaatggccattaagccacttaaaatatgatgaagaaactggatgggttttaagacgcttggcaaaggaaaggatggtggagcasgcatttgctctctcaggcaaggcttgagaaggaagcaagcgcagtacgcttttaataaagctcacccctcctgcccccacaagaaaaacccctgagattcttactctgccttcagaacgacttagrtgtggcrggtttcatcctccgtgctttacataatttyctttatttacataaaatgtacaacttagatattgwtaggtaccctcccccctttttatagatgagagcactgaagttcagagaggagtgggtggcactatccaaggtcacacagkcagtaagtgttggatttggaattcaaaccaggtctagctcatatgtctttgttccatcacatgtgtaccctgtgttccaggcaaagctgtctgttctgtggtattctttgttcttctctaggtgggagcaactgtgtgatagccatctttgtatcytcagttctttgtagggcctagttgcttagaaaatatttgttacatcagaaccctctgcttctcagacaccaacctaatagaacatgtatctccttttcagcaaccatgaagttgaaggacacaaaatcaaggccaaagcagtcaagctgtggcaaatttcagacaaagggaatcaaagttgtgggaaaatggaaggaagtgaagattgacccaaatatgtttgcagatggacagatggatgacttggtgtgctttgaggaattgacagattaccagttggtctcccctgccaagaatccctccagtctcttctcaaaggaagcacccaagagaaaggcacaagctgtttcagaagaagaggaggaggaggagggaaagtctagctcaccaaagaaaaagatcaagttgaagaaaagtaaaaatgtagcaactgaaggaaccagtacccagaaagaatttgaagtgaaagatcctgagctggaggcccagggagatgacatggtttgtgatgatccggaggctggggagatgacatcagaaaacctggtccaaactgctccaaaaaagaagaaaaataaagggaaaaaagggttggagccttctcagagcactgctgccaaggtgcccaaaaaagcgaagacatggattcctgaagttcatgatcagaaagcagatgtgtcagcttggaaggacctgtttgttcccaggccggttctccgagcactcagctttctaggcttctctgcacccacaccaatccaagccctgaccttggcacctgccatccgtgacaaactggacatccttggggctgctgagacaggtaagggcaactctggccaaagcaggattgcttctggattgagcccatagctgctaataggccagataattgggagagagaagaatgttgaagaacataaccacaaaagcaacgctgaataaaggtgtttagaagtcagcccctctggtttgaaatatgctcttcttgaatggtatcctagccagatcacttttatctctctcagctctgtagaccccattatcaaccaaatggagataacagtttctacctcttgcattgctgtgagggttaaatgccacagtaaactaaagcttacactgtacattggaagtggtctgcaaatcgtagtttctgctgttcttgagccttttctaartagctcaaaggggtaaggcaaggctaagatcagccctttggagaggtagatcttcatgagtatagggaagaactgtctaattctcaggagttgtgcaaaggtgaaaagggttgctgctttgggagttgatgagtttcttgtcattggaaggatttgagtgtggtgggtagtcattgggtggattttgtaaacagattcagctatgaagtgttaggactatgctgtgtttgaggttcctgcgagacttttggaagcaatgacaggttgactttgctggatagactagactgctgacttgggggaggaactagtactgcctggaactattggtctgtttagaccagcagtgtccattagaaatacatatagtcatctcttgatatccatggaggattggttccaggacctcccttggataccaaaatccagggatgctcaagtctctgatataaaatggtgtagtgcttacatataacctatataggcacatcctcctgtatattttaaatcatctctcgattacttataatatctcatacaacataggtcttatgtaaattgttacaccgtattgtttagggaataatgacaagaaaagtctgtacagtgtttagtacagatacagtttttttttttttacccccccgaatattgtcgatccacagatgcagaacccacggttacagaagggtgactgtataatgtgaaacacataagtaatttaaaatttactaggagtcacattttttaaaagttaaaaactagtgagatattttatgttctttttttttttttactaaattttcaaaatctggtgtgttttaaacttgcagcacatgtcattttagagtaactacattttaagtgttcagtaracacgtgctttgggtttctggaacagtggtcaggaaactcargatgatgttctgtggcagtcatatagatggaagagtgaggaactacaggaaaggggaatggarataataacttagaacatttactgagcatttaagatgtgtcatgcactgtgttaagtgctttatgttgatgaaatcggttgtcacaaccaccctgrggtaagtaccattattcccatgttacagatgagaaaactcagcctcacagagcatagacagcttccctaaaattacacaactgaaatggtagtgtatggattccaggctagttctgtgtgttgttaagcattctgctacactgctttggtatgkgcagcagagtcctggaagtaagtccgtggaaggcagaaacaaggtttatatgagccgttgtggccagagattgacatttggatgtataccacagttcctgtcaggttgtgaatctacaagtccrgaattcaaaacgacttggataagtcatccatctggggctgtgaacagaccactgcccatgcaataataaatagacccttaatgtggggattaggggcattggtcccctgtgcagtcgaaaatccatgtataattttgaactccccccaaacttaaacgctaatagcctattattggctggatgccttacagataacataagcagtctattagcacatattttgtattatatactttattcttacagtaacataagctagagaaaaaatgttattaagaaaattgtaaggaacagaaaatatatttactattcattaaatggaagtggatcatcatraatgtgttcatcttcatcttgactttcagtaggctgagtagaaagaggaggggttggtcttgctgtctcagggtggctgaggtggaagaaattctgtgtataagtggacccccaccttcaaatttgtgttaaagggtcaactgtatatccattatccccaaaaagataccctgggttttttttgttgtccctccctccctccctcagttcttgttcctcctcaggcaaccactgataggctttctatcactatagattaatttgcattttcttgctttcttttttttttttttttttgagacggagtctcgctctgtcacccaggctggagtgcagtggcccaatctcggctcactgcaacctccgcctcctgggttcaagtgattctcctgcctcagcttcccgaatagctgggattacaggcacttgccaccacatctggctaatttttgtatttttagcagagacggggtttcactatgttggtcaggctggtcgcaaactcctgccctcatgacctgcctgcttcggcctcccaaagtgctgggattacaggtgtgagccactgtccccggcctaatttgcgttttctagaattttatataatgaaatcatataatatgtactggagggsgtggtatctgagtctttgactcagcataatttgagattacgccatgttattacaattactagcagttcattcctttttagtgatgaatagtattccaatgtgtgggtagagcagtttgttcatctattgatggacatttgtgctttttcttgtttttggctattacaaatatagttattgtaaatactattgtaccagtctttgtatggatrtgtgctttaatttctattggataaatacctaggtgtggaatggctaggtcttgtggtaaatgtaacttttaaagagttttccaaagtgattataccattttacgttgtcactaggtggtatgagttcaagttggtccatattcttgtcaataactaggtatgctcagtctttaattttattttagacttttaaaattttactattatttccttgtcatttgaatttgcatttccctagtgactagcaatgtagagcattttagcatatgcttatttgtctgtttgattattttgcccatttttaaaatagggatgttctgttgtagagttttgggagttcattgtgtattctagatacawgtcctttatcagatgtgagatttgcaaatttttctcccagtttgtggcttatcttttcgttctcttaacagtgtttttcaaagagcagaaagtctttattttgatgaaatccaaattagccttgtcttttatgaatttatgcttttggtgccgttggtgttttatctaagaaccttttgcctaattcaagatcacaaagatttctcctgtgttttgttctagaagtgttaatagtcttaggttttatgttttggtctctgatccttattgagttaacttttatttagagtgagaagtatggatcaaagtttgtgggtttttctgcatatggctaattatttcagcaccatttgtagaaaaactattctttctccactgagttgactttgcatctttgttgaaagtctgtgaccatataggtgtgggtctttctctggagtctttttgttttccattgatctgtttgtctagtctttatgtcagtttcttattctcttggttataatagctttataataagtcttaaaatcaggtagtatgagtcctctaactttgttctttttaaaagttattttgactgttgtaggcctttgcccttccatatggattttagaatccgttatatcagtttctacaaaaaaagtaagctgatatctggattgggattctgttgattacagagcaaattgaggatagatgacgtcttaacaatatttaattttccagtctatgaatatggtatctctccatttctttagatctttaacttttcttagcaatgttttaaaattttcagtatatagatttttcacatcttatgttagatttatccytaagcattttatatttttgattctattgtaaatggtaatttaaaattttttatttccgattgtttgtcgccaataagtagaaatatgatggatttttgtatattgatcttgtgtcctgcaacttagttccaccaagtagttttctgaggattccatggtattttctgcaaagatgatcattatccagtcttggatgccttttgtttttcttgttgtattgcagtggctaacacctttagcagaattttgaattgtagtggtaaagtgggcattattgctttgtgtttgatcttctggggaaaacatttagtctttcaccattaagtctgatcttagctgtaggttttttgtaggtgctttttatcacgttgtggaagttctctttgatttctcatttgctgagaggttttatcagggwtggatgttggatatttttcaaatgcttttttactgcatatattgaaataggtggtttttcatttttagtctgccaatgtggtgaatgacattgattttcaattatgaaattagacttacattcctgggataaactgaacttggtcacaatatactattctaattatattttgttggatttgatttgctaaaattttgttgagaatttttgaacttatgttcatgggatagttgtagttttcttgtaatgttttggtgttggaatcagtaatgtagcttcagaatgatttctgaagtattctgttcagttttctgaaagaatttatacaggattgacattttatacccaacttaaatttttggtagaattcatctgagcctgcacttgtctttgtaggaagatttttgactacaaatttactttgtttaatagattagagatatttgtgttacttatttttttctttttttttttttttgagatggagtctcggtctgttgcccaggctggagtgcagtggtgcgatctcagctcactgcaagctctgcctcctgggttcacaccattctcctgccccagcgtcccaggtagctgggactacaggtgcccaccaccatgcccggctaattttttgtatttttagtagagacagggtttcaccgtgttaaccaggatggtctcaatttcctgacctcgtgatctgctcgcctcggcctcccaaagttctgggattacaagcatgagccgccacacccggccacttatttttttcttgagtgactgttttctacttgcagttctattagtttttgtttcatgtattctgacaatcagtttatgtgaatacatgttttatggattaaaatattagattattattatatcctctaaatgaattggcttgttatcgttatgaaatggccccctttatccttagtaatttttttttgttctaaaatgtcctttggtattgatgcagccagtccagctttattgattaaggggttagcatggtatgtgyttttcaataytattactttcccttatttatatttaatgtgaatttcttataggcagcatataaatgggtcttgctgtttaatcagacagttcgtgtctttgagttgaattattgaagccaggcatggtggctcacatctgtaatcccagcactttgggaggccaaggcatgtggatcacttgaggccaggagttcaaaaccagcctggccaacatggcgaaactgtctctactaaaaatacaaaaaaatagccaggcgtggtggcatgtgcctgtagtcccagctgcttggggggctgagccacaagaattgcttgaacccagggggcggaggttgcagtgagctgagattgtgccactgcactccatcctgggtgacagagtgagactctatctcaaaaaaaaaaaaaaaaagaaaagaaaattaattgagttactgagattatttacgtttaatgattattgataatggtgggtttacttatttattttttgactgatagcatacctgatttatttatttttttcacatttctgttttttattttaaatttttttttccttttctatgtttagatgtttatttttaatttttttaaatttttccataagttattggtgtacaagtggtatttggttacatgagcaagtttttttgtttgtttgttttttgagacggagtcttgctttgtcaccctggctggagtgcagtagtgctatctcagctcactgcaatctccaccttctgggatcaagccatcctccttcctcagcctcccaagtagctgaactacaggcatgtgccaccatgcccggctactttttgcatttttagtagagacagggtttcaccacgttggccaggttggtcttgaactcctgaactcaagtaatctgcccacctcggcctcccaaagtgttgggattacaggcrtgagccactgtgccagtttagtggtgatttgtgagattttggtgcacctatcacccgagcaatatacgctacaccatatttgtagtatttcatcccttgcccctctttcattcttccccccaagtacccggagtccattgtatcattcttatgcttttgcatcctcataacttagtcctgcatatcagtgataacatacgatgtttggttttccattcctgagttacctcacttagaataatagtctccagtctcatccaggtcactgcaaatgctgttaatccattcctttttatggctgcatagtattccatcctgtatataccacagtttctttatctactcgttgattgatgggcatttgggttggttccatgattttgcagttgtgaattgtgctgctataaaattatgtgtgaaagtatcttttttgtataatgacttcttttcctctgggtagatacccagtagtgggattgcttgatcaaatggtagttctacttttagttctttaaggaatctccacgctgttttccatagtggctatactagtttgctttcccaccaggacatagaagtgttccttgttcaccacatccatgccaacattgttttttttttgagatggagtttcgctcttgttgcccaggctggagtgcaatggcgcaatctcggctcactgcaacctctgcctccygggttcaagtgattctcctgcctcagcctcccgagtagctgggattacaggcatgcgccaccatacccagctaattttgtatttttagtagagacgtggtttctccatgttagtcaggctggtctcaaactcccgamctcgggtgatcygcccatctcggcctcccaaagtgctgggattacaggtgtgagccactgtgcccggctttttttctttttttaagtcaaaggctcactctgttgcccaggctggggtgcagtggcacaatcttggctcactgcaacctccgcttcccaggttcaagtgattctcctgcttcagcctccttaagtagctgggattacaggtgcctgccaccatgcccgactaatttttgtatttttagtagacatggggtttcaccatgttggccaggctggtcttgaactcctgacctcaggtgatctgcccacctcaacctccggaagtgctgggattacaggcatgagcaaccgtgcctggctgccaacatctactgttttttgattttttgattatggccattcttgcaggagtaaggtggtatcacattgtggttttgctttgcatttccctgatcattagtgatgttgagcattttttcatgtttgttggccatttgtgtatcttcttttgataattgtctatttatgtygttaacccactttttgatgggatttttttttcttactgattygtttgagtttgctgtagattctggatattagtcctttgtcagatgtatagattgtgaagattttctgccactgtatgggttgtctatttagtttgctgactgttccttttgctgtacagaagctctttagtttaattaggtcccagatatttatctttgtttttattgcatttgcttttgggttcttggtcatgaaatccttgcctaagccaatgtccagaagggtttgtccaatgttaattttctggaatttttatagtttcaggtcttaggtttaagtccttaatccatcttgagtggatttttgtataaggtgagagatgaggatccagtttcattctcctacaggtggctagccagttatcccggcaccatttgttgaaaacaatgtcctttccccactttaggtttttgtttgctttgttgaagatcagttggctgtaagtatttgggtttatttctgggttctctattctgttccattggtctttgtgccgatttttataccagtatcactctgttttggtgactatgggcttatagtatagtttgaaatcaggtagtgtgatgcctccagatttgttctttttgcttagtcttgttttggctatgcaggctcttttttggttccatatgaattttagaattgttttttctaattctgtgaagaatgatggtggtattttgatgagattgcattgaatttgtagattgcttttggcaacagtcattttcacaatattgattttacccatccatgagcgtgggatgtgtttccatttgtttctgttgtctgtgatttctttcagcagtgttttgtagttttccttgtggacgtcttttgactcctttgttaggcatattcctaagtattttttttttttgcaaccattttaaaagggattgagttcttgatttgattctccacttggtcgctgttggtgtataaaagagctactgatttgtgtacrttaatcttgtatccggaaactttgctgaattgtttatcagttttaggagctttctggaggagtccttaggattttcaaggtaaatgatcatatcatcagcaaacagtgccagtttgacttcctctttactgatttggatgccctttattttttttctcttgtcttattgctctggctaggacttccaggacgatgttgaagaggagtggtaagmgtaggtgggcatccttgtcttgttccagttctcagagggaatgctttcaccttttccccattcagtattatgttgactgtgggtttgtcatagaaggcttttattacattaaggtgtgtcccttgtatgccaattttgctgagaattttaattgtaaagggatgctggattttgtctaatgctttttctccatctattgagatcatgtgattttggtttttaactctgcttatgwggtataccacatttattgacttgcatatgttaaaccatccctgcatccctggcatgaaacccacttgatcatggtgggttatctttttgatatgttgttggatttggttagctagtattttgttaaggattttaggatctatgttcatcagggatattggtctgtagttttcttttttggttgygtcctttcctggttttggtattagggtgatgctggcttcatagaatgaattagggagggttccttctttctccrtctcgtagaatagtgtcaaaaggattgggaccagttctttgaatgtctggtagaattctgttgcaaatccgtctggttctggacttttttttgttggtaattttctaattaccatttcaatcttgctgcttgttattggtctgttcagggtatctcattcttcctgacttaagctaggagggttttttttccaggaatttatccatcttttctaggtttyctagtttatctgtgtaaaggtgttcatagtagccttgaatgatctttcttatttcagtggtttcagttgtaatatctcctgttttgttttatagtgaggttattttgattttctctcttcttttcttggttaatcttgctaatggtctgtcaattttatttatcttttcaaagaactagctttttgttttgtttatcttttgtttttttgtttgtttgtttcaatttcatttagttctgctctgatcttggctatttcctttcttctgctgggtttgggtttggtttgttcttgtttctctagctccttgagatgtgaccttagattgtctgtttgtgctctttcagacttttcgatgtagccrtttagggctatgaactttcctcttagtgctgcctttgctgtatcctagaggttttgatacgttgtgtcattattgtcattcagtttgaagaatttttaaatttacaaactgattttgtttttgacccaatgctcattcaggagcaggttatttaattttcatgtatttgcatggttttgaaggttccttttggagttgatttccagttttattccactgtggtctgagagagtgcttgatataatttcaattttcttaaatttattgaggctcattttatggcctatcatatggtctatcttggagaaagttccatgtgctgttgaatagaagtatattctgcagttgttggatgaaatgttctgtatatatctgttaagtccatttgttccaaggtatagtttaaatcgattgtttccttgttgactttctgtcttgatgatctgtctagtgctgtcagtggagtattgaagtcccccactattattgtgttgctgtctgtctcatttcttaggtctgttagtaattgtttcgtaaattggtgagctccagtgttaggtgcatatatgtttaggattttgatattttcctgttggacaaggccttttaccattatataatgttcctctttgtctgttttaaccattgttgctttaaagtttgttttgtctgatataagaatagctacccctacttgcttttggtgtccatttgcatyaaatgcctttttccacccctttactttaagtttatgtgagtccttatgtgttagatgagtctcctgaaggcagcagatagttggttgatgagttctgcatccattctgcagttctttatcttttaagtggagcatttagaccatttccattcaatgttagtattgaaatgtgaggtacccttgcgttcctcatgctctttgttgcctgtgtactttakttttgtttttttgtttttgctttttaacttgtatgtctgcatcctgtgtgatttttactttatactttaaagaggttgttctgttttaatacgtctccagggtttgtttcaagatttagagctcsttttagcagttcttgtagtggtggcttggtaatggcaaattgtctctacatttgtttatctgaaaacaattgtatctttccttcatatatgatgcttagttttgctggatacaaaattcttggctgaagattgttttgtttgaggaggttgaagatagggccccagtcccttctagcttgtagggtttctcctgagatgtctactgttaatctgataggttttcctttataggttatctggtgcttctgtctcacagctcttaaaattctttcctttgtcttaactttgtataacctaatgacagtgtgcctaggtgaagatctttttgcagtgaatttcccaggtgttctttgtgcttcttgtatttggatatctaggtctctagcaaggctggagaagttttcctcarttattcctccmaatatgttttccaagcttttagcattctctccttcctcaggtacaccgattattaggtttggtcatttaacataatcccagacttcttagagcctttgttcattttttcttattcttttttctttgtctttcttggattgggttaatttgaagatcttgtctttgagctctgaatttctttcttctacttgttcagttctattgctgagactttccccagcatttcacatttctaaaagtatgtctagagtttcctgaattttttattgttttctctttatgtatttcctttaatatttctccctccacttcttgtatcattttttggatttccttgcattgagactttatctttctctggtccctccctgattagcttaataactaacctcctgaattctctttcaggtaaatcagggatttcttcttggtttggatccattgctggtgaactagtatgattttttgttgggggctgttgaagagccttgttttgtcatattaccagggttggttttctggttccttctcatttgggtaggctgtttcagagggaaggtctagggctgaaggctgtkgttcagattcttttgtctcatggagtgttcccttgatgtagtactcccccttttcctatggatgtggcttcctgtgagccaaactgcagtgattgttgtctgtcttctgggtctagccacccagcaaatctacccggctctgggctggtactgggagttgtctgcacagagtcctgtgatgttaaccgtctatggggctctcagccacggataccagcgcctgttccggtggagatggctgagggtgtgttggactctgtgagggtgcttagctttggtagtttaatgctctgtttttgtgttagttggcctcctgccaggaggtggcactttccagaaagcatcagctatagtatggagagggaccagcagtgggtagggccctagaactcccaagattatatgccctttgtcttctgctaccagggtggatagggaaggaccatcatgtgggggcaggtctacgcctgctctgactctccttgggtgggtcttgttgtgggtgttgtgggggatgggggtaagattcccaggtcactggagttgtgtacctaggaggattatggctgcctctggtgagtcatgcaggttgtcagggaaatgggggaaagccagcagtcatgggcctcacccagctccctcacaaaccgaagggcagtcttactcccaccgtgtcctccccaacagccccagtctgtttccrggaggagggcttgaaaacttgcccaaggttatctgcttcccagctctgaaagaaaaggggctttagttcttcccctacctgtgaagtctggattcgtgccctcccccgagttctggccaggaggcttctggtcctgttcagattgttaaatcaaattgttacagaatttggctagagaatgccttctttctgtggagttttgcccccagctcctgtggccaccctcccagtggatccctgtggtgccaggcaggaatgggctgcttggggacccagcgagctcccagggcctttctgctgcttcttctacccctgtatttcgctcagctctctaacttgactcagctccaggtaaagtcagaaacttctcctgcaaacagaccttcaccttctctagtgggggtgtgtgtttgggagaggagagcctccctcctctccacagttggggcactcacggtatttgggggtctcctgggtcctgctggagcagtccagttccttcagagggtctgtggttcctctcaggattactggtttgttcttgcagtcaatctggagctaaaactcacaatgcaagcctccccttgctgctctttcaggagttgcaatctagtcctccctcctgtctgcagtgatcccgggagcagcatcagtggttaggtttaaatctgttacttttctattagtcccagctcttctttgtttccttctttggcactgaatttgtgtgtgtgtgtgtgtgtgtgtgtgtgtgtgtgtgtgtgtgtcagagagagagatactattaagatctacccatasgccgggtgcagtggctcacacctgtaatcccagcactttgggaggccagggcaggtggatcacgaggtgaagagatagagaccatcctggccaacatggtgaaactgcatctctactaaaaaaaaaaatcaaaagttacttgggtgtggtggcagatgcctgtagtcccagctacttgggaggctgaggcaggagaatcgcttgaacctggaggtggaggttgcagtgagctgagattgtaccactgtactccagcctggcgacagagcaagactgtgtctcaaaaaaaaaaaaaaagattttctacccacagaacactcttggcatcaaatgtgtgggtttttcccacactcacaaccagctctgcaactctgtggacaccaactggttatcctacaattctgttcaattcagacactatctacctggagctagtgtcattccttacaggttaagggctcagtcccacaaggttgcccccattaatgatgctaatcacaaataatggtacttctggtcagcttggctacaaattgggtattcccacaacaccttcctcaggttcagcactttgctatgcctgacagaattcagggaaacactttacttgtatttaacaatttattataaaagatgtaaytgagaaacagccagatggatgagatgactagggcaaggtatggggcggggttggaagtcaggagaggtagggcatggagttttcatggtccctgggtacaccaccctggaatctatccgaactccatcgtttagagattttgtggaggttccattgcataggcatgattgataattgattaaatcattggttgttagtgactgagctcagtctccagtccctcttccctccctggaggttggtggggagaggcagctgaaagttccatcccccatcctgaagctgtctagggactccagccactagtcatcttattaacatgcaaaaagatgctcttactactacagatatttttaaggtatcacaaggttttatatcagcaacagaggactaagaccaaatatttcaacaaaagatgcccctgtcactgagaaagttacaaggctcttagaagctctgtgtcaagaattagggacagggactataatacatatatatgcatagataccattttatcttttttgttgtcttattagctataattcttaacgtctttttagtgattgctttggggtttatagtatatatcttttattatagtttaccctcaagtaatttactacttcgcatacaatgtaagaaccttacaagagtattttccatttctcccctcctttgtgctttttgttgtatacttcatatgtgttagagattctagaatacatttttattatatttgctttaaacaattatttttaaagatgtttaaataagaaaaataaggggttttgtttttttgtttgtttttagagacagtrtctccctctgtcacccatgctggagtgcagtggcacgatcatggctcactgcagcctcaaactcccatgctcaagcaatcctcctgcctcagcctcccaagtttcgaagactacaggagtgtgccaccatgcctggcaaatttttttaaagatgggagtctcactatgttgcccaggctggtcttgatcctcccgcctagacctccccaagtgttgggattacaggcatgagccaccatgcctggccataaaaagaagtttttaaatatttacctacgtagttactgtttcggttgctctttatttctttgggtacatccagattttcattttatgttatctttgctattgcatgaaagactaatatttctgatagcttacatttgctgctggtgaattatttcagcttttatatgcctaaagtctttatttcacattttgttttgagtgggtgtagggttatagattgtcagggttttatttttaggcattcaaataaaaaatattgctacactgtcttctggcttttcattgtttctgataagtctgctgttcttcttatcraaagtttcatgtgtctgtttttgctctcttttttccttatagtatcttatttttgtgtgtgtggttattttttactgagagctgcttatttcctttgaaaattgtgaaaatttttggagatgtatgrtaatggtttctcccttgagaaagcatttattggcttctgcctagggcattatcactttggaacttctttaaattctcagcctgagatgttttgttttgaccacccagatgatttggactctgtgtacattcaaaggccagtttgaaaatgttcaggcatagacaaaagttttatatttacattttctgaaaacttaagaaaattttcttttactcctttctcaccaaagaaaagtcttgggaaagtattgtatggattactgtttcctgctcctcacagaaacaacacatacacccaaaacttgccctttctctctttattgtttcatttcttggacatttgtaattcgttactggtgacctaagacctcagtgctagcctgccatacttttcctcgggttctaatttacatgtgccttctggttycttctggggaaatctgtgtagagtggaggagctttgggtcrgtcagggtggcacttggctaccttattctatgcaaaagaatgaattccagactaaagtatgttcatctgttgattcacactgtttttactttgttttgtttttttacttttaaggaagtgggaaaactcttgcctttgccatcccaatgattcatgcggtgttgcagtggcagaagaggaatgctgcccctcctccaagtaacaccgaagcaccacctggagagaccagaactgaggccggagctragactagatcaccaggcaaggctgaagctgagtctgatgcattgcctgacgatactgtaattgagagtgaagcactgcccaktgatattgcagccraggccagagccaagactggaggcactgtctcagaccaggcgttgctctttggtgacgatgatgctggtgaagggccttcttccctgatcagggagaaacctgttcccaaacagaatgagaatgaggaggaaaatcttgataaagagcagactggaaatctaaaacaggagttggatgacaaaagcgccacctgtaaggcatatccaaagcgtcctctgcttggactggttctgactcccactcgagagctggccgtccaggtcaaacagcacattgatgctgtggccaggtttacaggtgaggtttagttccatttaataaatattttctaggtaaatcccaaatgctcgttggtaaagatgaatgagctgtggctcctgccctctagggtaagccactctcatctataagccagacaattaagccctacagaaaattgatatagtgacattttttcagttccctcaaggataatacatggttggtgccattgtggatgcataggaaatttattggatacagtagatgctcagggcagggattagcaaactgtctggttttataaataaagttttgccggaacacacccacacscatttggttttatattgtctgtggttggttttgtactacaaaggtgaagttgagtagagttaatagttgtgacagagaccatctggcctatgaggtcagtaatgttcactagtgaccctttcagaaaaagttggctgatccctgctctaagctattaggatttaattctctcagggaattcactctgggaagggcttcactctgggaatcttaattttataatgaaagcagcaattaattaccaagttgttactattgctaagccctttacccacatgatactatgagaatttctgcaccagagacgaaaacaacagggcattagtggacctttcagaataattctaactgagggaatggaagggcttcctaggagaggtgtagcacagctgcaggtcatattcctcccagcattatggtgccccagtgctccgttttcccagagctttggaggtaagcatacctgggttcaaattcagcccctttggtgtggttggaggggagggagtagaaaagaaatgaggctgaagaagtagagctcagatcacagaagacttggtaagccctctaggagtggcgtcaacagtctggccaggcctgctcttttagcartgctctagrgcattacactgtgctgatgtctgtctctgctaatctggggtgcctgtgtcagccatgtaagaaaatgatcacccagattgaataagtgtcccttatgttttctgtcccataggaattaaaactgctattttggttggtggaatgtccacgcagaaacagcagaggatgctgaaccgtcgtcctgagattgtggttgctactccaggccggctgtgggaattaattaaagaaaagcattatcatttgaggaaccttcggcagctcaggtaatagatggcacttctcttttccccctcactgccttttctgaaatgagccttaggtgacatggtgtgggcaatgccttcttctcatcrcagaatgctatggtgtggtatcatccagaccctggcctttagaaagccaagagtgcatgagggagattagttgagggcctgatggtggtggtggtagtggggtgtgtacgtgtgtgtgtgtgtgtgtttaggatgagtgtagggtgtgctatagatgattcctcttaacccgctgctgaccaatgatatgggtctctctggatctgcaggtgcctggtagtggatgaggctgaccggatggttgagaaaggccattttgctgagctctcacagctgctagagatgctcartgactcccaatacaacccaaagagacaaacgcttgttttttctgccacactcacmctggtgcatcargctcctgctcgaatccttcataagaagcacaccaagaaaatggataaaacagccaaacttgacctccttatgcagaaaattggcatgaggggcaagcccaaggtcattgacctcacaaggaatgaggccacggtggagacgctaacagagaccaagatccattgtgagactgatgagaaagacttctacttgtactacttcctgatgcagtatccaggccgcagcttagtgtttgccaacagtatctcctgcatcaaacgcctctctgggctcctcaaagtccttgatatcatgcccttgaccctgcatgcctgtatgcaccagaagcagaggctcagaaacctggagcagtttgcccgtctggaagagtaagttaggactgtccccagaggcttaacctctagttagttactggggtaaaaggggtcaggatggtggggaaatggtagaaaagccaccttctgtcataggggccttgtctcagtagtaggtagcctttttttttttttgcacagcatttggcaaggttactgtcatttagtgaatttggttgcagttaaatgccatacagaaacttcaatactaatgaatataggtgacaatacataatattgaatgtatagacaatagattaggtcctgtgctggcactttagattcagaatcacattcagttactctcctaacatccttaagaggaagcagaatagattcatggttaagagcacagatcctggaaccagaatgcctgaaatcaaatcctakttctgtcactccttaggtggtcaagttatttaatttctctgtactttaattttctcattatttggataataatagaacccattctagggttgttatgaagattgattgtaaattcatgcgtgtaaagtgtttagaacagtctctagcacatagtatgtatatattgctaaatgttagctttaataatttctagtccctttactacttattaccattatcactattctcatttatagatggaaaaatgaggtctagaaaagctgatcagtgtgcccaaggtttctctgcctggaagtggtagagctgggcctcagacaagcctgtcggacctcagagcccatgctatttcttattcctgatgtctttgtccatctgcctttggaccagactgatgctcagggaatggggtgcagattgtcaagatgagggcctggaaagttgaggcagactacaaagtgtcttttgccagtgttttgtcaggtcatggggtaattagtttctagaacaagtgtttgatttactggtttttaaaaattggtaagtagtatcagtggtttactgagattagcttagaacaaggcttggcaaactataggcctcgtgccaaatcttgcttgctgccctttttttttctaagatggggtcttgctatgttgcccaggttagacttgaactcacgggctcaagcaatcccaccttagcctcctaagtagctaggactaccagtgcatgccatcacacctggctgctgcctgtttttttagtagacgttttactggaacacagcaagacccatttatgtattgtcaatatcctcttttgcggcagagttgaatagttgccatagagactgtgtggttcacaaagctggaaatgctctctggctctttacagaaaaagtttgctgaccttgatccagagcagtagtttaatgttttacaaactaggatttgcattgcatttcccggcctcagctcagacatgcagggagtgaggaccctgaagggccagagtcttatgttttgaagcacctcaagtacttttgactttccatgaaccacacattgagaaacatcatccaacacatttatcaagtgcttaccatgaaccagatgttgttctctgtggtggtaataacagcagtgagtaatgcaaagtccttgctctcatgaagcttacattctagtagagggagataataaattgcaaagtaagcccacagtctgccaagtgatcctaagaagtaagtcgagcaggggttggagaaaagagattgggtatgtgtggtcagtctctgatgaagtgagaattgagcagagagctgaagaaagtaatgaagtgagtcatatggacatctgaggcaagaccctttaaggccttaaggagtagcaagtgcaaaggcttggaggtgagagcatgcttggtttgtttggggaagagcaaggaagtctgtgtgccactgggaggaagtaaatgagagggtgctaggagaggagtcactgacccagaatatgtatggcctcatttaactcactgaagggagtctttawcattgcagagtatggcatgttggttggggtcaatgagtcccaaatttggatccagactccacagctgaatagccatgtagatagcttgggaagttaatctctcygagcctcagtttttctgtaaaagggtatacaagtgatatcttacagagtattggtaaggastgtaatgtttaggatgctcagcagttggtaagaatttgattaaagatagctgttagttattattaataagctttctctctctaccccagctgtgttctcttggcaacagatgtggcrgctcggggtctggatattcctaaagtccagcatgtcatccattaccaggtaggggcatctgaaaatttataggcatctgcctgcactgaatggggaatttttaaggcaaaggttgggggagggaggaggaattgttggttccaaggctcttgcatcagagaataccactggcatcgagtgcccactactcccacttttgcaacactgctgagatttggtctccagaaaaccttgctttgtctcatgtcaagtagcccttctctccaagctacttgatattgtcaggttagagtcttagttttttctgtgaaatgggcataagttaagcatgtaattggttaccctgatgtagagaagtattaatagaagagtgtggtagtttagatctctctgggctcaaatcccagctgtgtaaccttgaacaagtcatgtaatctctctgtatctcagttttctcatgtattaaatggcagtgagtacctgcttcttagggttcttactgaggtaaaataagttactaagtataaagagcttaagaagccacctggcacattgcaagcacttactcatgttaactgccattgatagtagcagtaatattagtgtgtgcatctagtgaatatcagcataaaattttggttaggagtatgggcaccggagccagactgccaggctttgaatccccagtctgctgcttcatagttggttagctttaggcaagttatttagtacctctggtttcagtgtcattgtttgtaaactggaagtaacaactagctaccccatagggttatcctgagaattaaattgagctgatgctgatgaagccggtagcacagtgtaagtactcaataaatggtagctggtatggcattatcatttttcctctttaattcctctttgtgcttttaaaaatcttttaggctgctgtttcagagaaacaacaaactcacagtgctttttcccattctctcacttcacaacaacaatcaacatagaagacttctgtaaccaaatgtgtgggcgtttttcaccacatatcaagcagcagccaccagctgggtgtcctctaatttagtttcattttctgatgctgtcttcctggagatagcctcagatcccacaagatgtccctcctccccgcaaccagtcgataagtcagggcctctggaacttctgaccaaccagcttcaagttggggttctcatgaccccccgctttgggttcaattaatttgctacagcagctctcagaactaaaagaaacacatttaccagtttattatagaggatattacaaagaatatagatggggagatgtataggctgaggtacaggggaaggagcatggagttgccatgcccctcctgggtacaccaccctccaggaatgtccacatattcagcttattcaaaagttctccaaactctgtcctttaggaatatttatggagacttcattgggtaagatgattaattaagccattggcctttaggaagtagtgctgcaagtcccaaccttctaatcctgccttggcctttctggtgaccagcccccatcctgaaactacctggggggctatcagccatcagtcaatagtttgtcattagtatacaaaaagacattacttttgagattcctttgccaggaaacaggatgaagagcaaatacatatttcactgtaycacaggtgctaattttggtttagcaaatctctatagtcttcccttttttggggaaggagctgggtcaacctttgtggagtcaagatgaatcaaatacagtcccagcccctaagaagtattggatccagcagaggaggtgagatgaccacagccataatttaaggcagaaggtattagaaaattacaaaatacaatggaagagagaggtaacttctagtttgggaggttggaaagtactttctaaaaacatgcctggcatttaagggtgaagaggatttggacatatagaggcattaaaggaaggagcaaagaaatgggcagtgttcaggggcacttggctcacagtgagaagagggtatgtgttgggaaaggaatagttgctgaggctggaggggtaagttgagggcaagtcactaaaggcgctgagtgtcaggttgaagagttgggcctttatcctgtaagtaaagaaaggcaaatctcatttctagaactcttatgaacagttcatagtggctacttaaagtactrtattgaaaaggatacctagatgttatctgggcccagtggagaagactgttgtgcttgattaatggtgtgtgccaggggctcagtgggtgtgttagcaaccatgccacattatctatggataaaatatatataggagtagagaccgtataacccagggattaacatggtctgtggagctgggctgcttaaatcctggataagaagtgactgctgtggtctggctgcatggtcctgaggacctgaaccagggtcaggggcatgggagggaagagcctacacagtgaatgggctaaacctgggaacattttgaatgtgggactaagagaggagggctagattgctctacaatgctgcagaagtttctacctgcctggctgggaggtaggagggtctggtttggggatgtggccctgaggagaggaccagtgtttggcagtggccatgtattgatctcccagttcttcctgtggcaggtcccacgtacctcggagatttatgtccaccgaagtggtcgaactgctcgagctaccaatgaaggcctcagtctgatgctcattgggcctgaggatgtgatcaactttaagaagatttacaaaacgctcaagaaagatgaggatatcccactgttccccgtgcagacaaaatacatggatgtggtcaaggtagaaagcagttaaaaccccagtgctaatgaagggattgtgctgctcccttgcagagcacyttgctgtgggactctgrcagcataacccttgaaaactaaggaatggttctgccaacagctgaacaaggagacttgtagaaaggattgagagcaacatacctgggaaaagggagaaaaggggagtgactgaaggtgggaggcattttctccctgaaccatttcttccttctctggccctgaagtyccccctcctcaccagacagtgcagtggtcatggctgtctggatatcctgtcagagggttgtagacagtgtggttagtgtttcctgctgaggcagatgctacaggtttggcacatccctggagcaggtgccagtaaattctgtcttttgggttttaactcagcaggcattccccaggtaggtgccgcttaccatgggacactgtattagtgaccaaagtggggtgggttctccttcccagaggtttgccagctgtgaataaagttcaggtacagtggagcagtatggaattactgggcatatggttacattgggaggagaagaggttctatcccagcttcctgctggcaaagatgtggaagggtacagaggaggtggaattccaggaattgagggagcaaaascatggcacagttcaaggaatgttggcttctctggctcaaaaggaatattagctgtgtggggaaatagggtggagataaggatggaaaagtggaaatcatagagaattcccattagtaaggaggattaggagccacccaggcttcccttggtttctttccccacatcacaagatccttctcattttgccactgcactgtaaccccaaaaccctctagagggagagttgaaatgttttatcttagctcagctgtggaagcaagctgtggcatctgcgtaaagacttcactttggttacctataggttggcagtcaaaccagtaagggttttcaaaggatgtggctgttcaggtwgattgttgggaaagctggcagttgtgtttagatgtgtacacacagacgggtaatggttgcccactggacttttatcaggaaacaataaatgcatttcaacaggaactgaactgcatctcaccactgatctcaagagctttttatttatttatttttaatttttaatttttaatttttttttgagacggagctttgctcatgttgcccagactggagtgcagtggcacaatcttggctcaccacaaccttcgcctcccgggttcaagtgattctcctgcctcagcctcccaagtagctgggattacaggcatgcgccaccatgcccagctaattttgtatttttagtagagacggggtttctccatgttggtcaggctggtcttgaactcctgacctcaggtgatccgcccgccttggcctcccagagtgctaggattacaggtgtgagccaccatgcccggctcaagagctttttaaaaacactacttgctgggcacggtggctcacgcctgtaatcccaacactttaggaggctgaagtggaaagattgcttgagcacaggagttcaagaccagcctagacaacacagttgagaccctgtctttacgaaaaaaaaaaaaaaaaaaaaaaaaaaaaagaaattacctaggcatggtggtgcctcccagctgcttgggaggctgaggtgggaggattgcttgatccaaggaggttgaggctgcagtgagccatgatcatgccactgctctccagcctgggcagcagagtgatacctgccttaaacacacaaacacaactcaagtgagactttgcttcccagaggcctgaactctatttcagatgaatattttctgttacttccccccaggagcgaatccgtttagctcgacagattgagaaatctgagtatcggaacttccaggcttgcctgcacaactcttggattgagcaggcagcagctgccctggagattgagctggaagaagacatgtataagggtaagcccttgggcgggatgggaattgaggaagttgaaatctctctttaacttttgctttgttggaaccatctctactactgtgggtcttgtcaaaatcagcaaggcgtccttccccctctttgctaacaggccctggtcccagrtgagcctactgccctcggtcagtctttgtttcctctgtctctgtcttgtgccctcagctgcctcctcttacatggacaggcagtggagtacagtgaggaagggagcaggctctctggccaggctgcctgtgttagaatgccggctcattgccttaactatgtgactgagtcaagttatttaacctctgttgtgttctcagctttctcctccayaaaatggaagtagtcaactacctacttcatgggattgttgtgaagactgattgagttaaaaaatgttaagtgcttatagcattgcctggcaaatagaaagtattacattttaagttatttgtcattatggttcctactacacctgccttccaagctgacaaagcacttccatgccattatctcatttgatcttctccactttcatgacatgaacacagcaggaagtactcttcttttacatatggaaactagataccacagcagaggcagtttgtgcagggaaacagctctgtcacaaggcatttccagagctgctactctatatgtgaccacaggctgaggcttcagggatgaatctgcccggtccctgcttgagaaaactcctggtctaaaaagtggtagaaccaaatctagaactccatgctccttccacaccaccaagtatgcagctcagcagagatgttgacacctcggtgcccaagtcagcaaattcagaggcagacttaactgctgtctgctcagcatggaagccaggagccaaaccagtgggcttgatgacagtgagctattyctggtggctcagggttggggcttgggccgaagatgtggaggccctggcttcccttcctgaggacagrctgaggtggaaccttttggctctgccagcttctccatgtgcagtcacagcactggtggcaaggcataggagagctgggctacaaagaagcattcagtgtctcctggggcggcagggaggtgggggttgtaattgtgaastcaccaaaccccaggtgggcagtaagtgggtgggtcataggaagaaaagtgatcttcagtcaggagacttgggttctgggctctgtctgatgactggctctgtgatgtgagccaggtgacttctctaascctgagttgcctcatctgtaaagataattccagtcttggaggatttttatggagtaaaaaaggacagagcggtcctgtgtatcccctgcaaatggttagacgttatccatttacagcccctgccaagccaccactagcttcttcagagaacttttgaaccctgcctccctaaagtagttctaaaacatttttcactgtgttacccatcaagggaaacaaaatgtttctacaaaccatagtaaataggatcgtttttgtattgtgtttcaaggaggaaaagctgaccagcaagaagaacgtcggagacaaaagcagatgaaggttctgaagaaggagctgcgccacctgctgtcccagccactgtttacggagagccagaaaaccaagtatcccactcagtctggcaagccgcccctgcttgtgtctgccccaagtaagagcgagtctgctttgagctgtctctccaagcagaagaagaagaagacaaagaagccgaaggagccacagccggaacagccacagccaagtacaagtgcraattaactgccstggtcaagtgtgtcagtgactgcacattggtttctgttctctggctatttgcaaaacctctcccacccttgtgtttcactccaccaccaaccccaggtaaaaaagtctccctctcttccactcacacccatagcgggagagacctcatgcagatttgcattgttttggagtaagaattcaatgcagcagcttaatttttctgtattgcagtgtttataggcttcttgtgtgttaaacttgatttcataaattaaaaacaatggtcagagccattgtgtcatcctgattttttttttttttttttagatagaagatgggggtggtggtgtagtttgtttcattattaacttagtgattctcctgggccagcacagtgctaagcccttgaaaggacaggaatagtgtcaggcctctggctgcaggccaagattggacagtgtgaatggagcaagaggctggaatgttcaagaggtgcatgttcctgctttacccagagcagcaccctaatagctccttagctctctccactctcctgggtattgtctgagccaccgtgggaggtgggcagggatgaggttgctgtcttcaggcttccctcacatcacagagccaacagtaacagtcgctaggtctggcgtgtgaagccctcaggatctagccccagccttgtctccactccctcctgtttgacagagcaggctcctgcccacggttccatgcaccccttctcttgtcctgagcctttgtgcagaataggcttttccctcggtctggattgccttttggccttctccatcctggagcactgccatgggtcctctagtcctgagcctctaaggggaagcagtgcttctcctggggctcccttagtgtcccgtgcttaccctcttcatagcacttgccatgctgtgttcccttagctgagctccttgggagaagaggaactcaaggcttggtcagcctggtataaatatgtgctcagggaactagggacttcctgatgctgccccagctttgtctggatcagtgtaggtgagtatccacaactcccacaaccatgggagaagcatagatgatttctgcacagctgtctggcttccaaacaggtattcgtcggggcacaatacaatacagctgtttagttcaaggggtgctagggaattgaagaggatacacaaagggaccaagataccccaagatctaagtagctagcctctctcagcctcatggttggcacttttatctaattagcatttagtcttgaaggtcctgagaaataattttcttttttttttgagacagggtcttgctccattgcccaggttggagtgcaatggcacaatcacagctcactgcaacctcacactcctgggcccaggcagtcctcccgcctcagcctcccaagtagctgggactacaggcacacaccaccacacctggctgaattttttttttttagtagagatggggtctcactatgttggcgtaggctggtctcaaaactcctgccctcaagtgatcctcttgcctcagcctcccaaagtactgagattacaggtgtgagccactgtgcccatctataagtctttattagtgttttttgtacttgagcatatagacacccagtgattgagacttgcccagggccacacagcagccaagtagcagaggtgggattagtatcttccttctgggcccaggacaagttcagaaaactacttcagtctcagaagtgttgccaaggaatggcctcccatcccccagtgtcaccagtgaccggaataggaggggaaattgcccgtctgtgaggtcagctcctgactgacagctatcagagaatggcagggagactctccattttccaaatgatgcagtggtggtcagtggggttagtaagcgggcttaatatcccctaatggcacctgagccgtgggagtgaagccacttgccataagccaaacatagatcccctgatgactgtccgtgtcctgccctagccatctaacagcaaattcttttccttggtggaggagctaatacgtagacaggctttaaaaggcaggagcagccttccaagcagtgctactctcgcctggtaaggtgaagttggtgggcagagcttccggagtgtcctggatctgccattaaacaaggaatatccctccccagctaatctacttaatacataagcaccacggaaaagcagagttcttggctgcatgccaggtacccagtattaagaagccaggacaaaagtagttatggaaaccattttaatgctaggagaatgtttttacttactgcctagggaagctgtagggcttggcccacatccagcagggcctggggcccctggaagccactcactgagttacagccccctccccactcctgtatctgctcagggtggtgatgtgtttgctcctagactctctctcatggttcccctgacactcctgcttgggaagccaccgagtcactgccaaggtgacatgcttccccatctgcagtgccctatgcttcctgtcaggaaggacaggttggggaatatccctttgcagagcccatacgatgagtgtgtcaggtataatagctattttcacacaaggaatctcattctgttttaaccaataatccagtgacacataggtattgttgccatttcacaaacttgggaattggggctcagggaggtgaagtgacttggccaagatcatacagctagtaagtgaatgctgaagttagaaccctggcattctggctccagagctctcatttgtgcttaaaataggaacccagtcaaaagcagggactgtgctctttctgttgctaattgttcccattgatttaaaagtttcctttggagagaaagtatcataataaacatgcagttgtaaaaacaagctctcaaagcaactctccttccagcttttggtctggagagagatggctctgtggggtgagggtagagaattatccaggaagtgggactggccagggtgactggctgctgtggacaagcaaggtaacatccacagatgactagaaattttaacaaggtgccaaagcctgccacaccttttcatccactatgttttcccttcgagacaaagatctgagagagaacgtgggggaaacaagggcaatggttcggatttggccagtggttttttgcaaaaaggggaaaagcagagggtaagaccatgaaagtaacttggccttcctctgccagagcttgagtgtcctgattctgaagtgatagaatagattcttttctgggaagagggcccctgtgagtttccggggggctctgtgacctggaagcacagcacaggcaagtctcctagagggaatttctccagccagtctgccaaacagctctgcttctgaggctaccacacaagccacaaatacagagacatagcagcccagtgaggcttctgctgtgcttgagagcctagctggaaggcccagagcccaccttacagccccttagaacagccaaggcgtcatccaggctgtgtgtgtgtccgttcacacctttcagttgggaaacagggatcccctggagacttgtctggcaaagatgatgatattcacaaatcatgtcatgtgttccccccacgcttccagtgtacttctcatagaccatggtgggacactgaacaaattcagaggtgacagtcaaatttacattcctgtgaaaaagtgacataatgacttagccagagcctttggatccaaactccagctgagggcagtatggaaaccagggtccctgcttggaactaaaatcccctgatatctgagagtgctattggcttttcacgaaggcagaagagtgacacaaatctgacatttgtgtcaagaggactctgaggagtctgctacccagtccttgtgcagtcaggttgtcagcagactcatgcagcagcaccaatagattccagtaaatccctgcagaatgaaacctgtgagaaggtggccttcaattaaggaaggaccccaaagggcaattccacaccctgcattttccatttcctcttatagaggaagagaggttgctagcagcacctctgcccagccagggtgtgggtccccactggtgccatcttgccggccagcccacagatggaatcttgaaggtcctgaggcagcaaggtgaggggcttatttaaggggtatggccaggtggctgaaggaggaagctgctggccggaattcccaggcggtttccacagtggaaatctccccactgccaacttcccatggcttgtctgttctttcccacctaccctctgaccagtccataaagagagcagaagcgggaaagggaggaagaagccaggggcagcctgcaaagcgtctgctctgctcagctgggtccatggctgtgcgtgccaacacttctatccttgaagtatccagactccacttctaggatttgctggggatgatgggacagctgcrgcttcctggtcccagacagaaatacacagattctggtccagaccctagtcttgtaagcctctgtccaggtggggctgaaagcagaaccctgaagggctcgtccaccaagagtcaggcagttctagccctgagagaggtagaggggccccaacaatttgagctcctactaaaggctaaaggcccctttctggactttggcaaaaaaaggaagtctttttttttttctccttaagttaggggtaggaaaatacatccatcatgaatgtttgaaaccacaccgcagccctcacattcaagttgacctcaataggccatctgtcagagcccagtccaacaagtgactggactggactcttttgtaggcctggtaagtcacttgggttaagacagctaaccttgagcttttcctcccccgcagagaggcactgcccctggtaaagagacaccagaggccccatttttctacaatggaatgtcagcataggcagggacctcctccagttgaagaaacaagtccagagagggcaggtgacccacccagggcctcactgcgaactggggtgcggagtcgggggcccagttagaaagcatttgtccctccattaaaataaatactaaaaatcctaccaagttaccatagtccatagtgggtaggcctcgttcccaggggctttgcccaaaaggctgcacattttcttgctacagtctaaattgcttaaaaaattgaagagccggaatgttccattcagaatgcagtcccattaggtgacaggttccactgcatggcctaaaattaatcaatgtttatcggctgcataaaggatgttgtagtgggatgttttatagagcaggtaaacggaaggggtggcggcctcagggaacacgtggtggttcagggcggtatccatctcgtccacgtactccacttgcagggcaatgctcagggcctgcgacaaygccgtgatctggatgtggtcacactccgtggccatgggctctacttcctgcaggggccaaaatgaaaacaagccagcttaggagggaggcctggcagaggacaagtgagttcagctctggctctcagggtcatggtcacagcctctgtgctgggacgtcatcttcacaacatcccatgagttgggtatggacgttctcatgccacacgggaaacagcctcattgagaggcagcatagctagaaatcgctacaattgcaagaatcgaacctgaatcttttccattctagaccttgtagttacacctgacagcaggctactaatttagagggatctggaaacggggggcagacatttttcaggttgggcatcaaagaatcttagagataaaaggcaccctgtcatccaggggtgcctttcaagcttaagtgtttacagaggctaggctggtgagtgagggtgcgagtccgggtgctgcagagacgatggaagaagcagaggcggtggcaagcaggcgtatgtcctacatagagagggcagctgctgcttagtgcctgctgagactgccctgcaagagcaaggacctgggggctgtacttcttactttccagcagaaatccaaatattcatatgaaaagtgcctaatttttaaatatcggcaactctttctggtaaataccatgcatcataaacacgtcaagcaaatgtgactcttggactatgactgtggttttgtaaacaggccagtccaaatcccttatttttcagatgggaaatctccagagaggggaagtgacttgcctcaggccacacagctcaggcagctcaggtgggacctgtctgcagcttgctgacctagc

SEQ ID NO: 95046 - DNA, 33713 bp, Homo sapiens
  misc_feature (1)...(33713): n = A,T,C or G
agaaaagttaaagatctaaagaaatggagagataccatattcatagactggaaaattaaatattgttaagacgtcatctatcctcaatttgctctgtaatcaacagaatcccaatccagatatcagcttactttttttgtagaaactgatataacggattctaaaatccatatggaagggcaaaggcctacaacagtcaaaataacttttaaaaagaacaaagttagaggactcatactacctgattttaagacttattataaagctattataaccaagagaataagaaactgacataaagactagacaaacagatcaatggaaaacaaaaagactccagagaaagacccacacctatatggtcacagactttcaacaaagatgcaaagtcaactcagtggagaaagaatagtttttctacaaatggtgctgaaataattagccatatgcagaaaaacccacaaactttgatccatacttctcactctaaataaaagttaactcaataaggatcagagaccaaaacataaaacctaagactattaacacttctagaacaaaacacaggagaaatctttgtgatcttgaattaggcaaaaggttcttagataaaacaccaacggcaccaaaagcataaattcataaaagacaaggctaatttggatttcatcaaaataaagactttctgctctttgaaaaacactgttaagagaacgaaaagataagccacaaactgggagaaaaatttgcaaatctcacatctgataaaggacttgtatctagaatacacaatgaactcccaaaactctacaacagaacatccctattttaaaaatgggcaaaataatcaaacagacaaataagcatatgctaaaatgctctacattgctagtcactagggaaatgcaaattcaaatgacaaggaaataatagtaaaattttaaaagtctaaaataaaattaaagactgagcatacctagttattgacaagaatatggaccaacttgaactcataccacctagtgacaacgtaaaatggtataatcactttggaaaactctttaaaagttacatttaccacaagacctagccattccacacctaggtatttatccaatagaaattaaagcacatatccatacaaagactggtacaatagtatttacaataactatatttgtaatagccaaaaacaagaaaaagcacaaatgtccatcaatagatgaacaaactgctctacccacacattggaatactattcatcactaaaaaggaatgaactgctagtaattgtaataacatggcgtaatctcaaattatgctgagtcaaagactcagataccaccccctccagtacatattatatgatttcattatataaaattctagaaaacgcaaattaggccggggacagtggctcacacctgtaatcccagcactttgggaggccgaagcaggcaggtcatgagggcaggagtttgcgaccagcctgaccaacatagtgaaaccccgtctctgctaaaaatacaaaaattagccagatgtggtggcaagtgcctgtaatcccagctattcgggaagctgaggcaggagaatcacttgaacccaggaggcggaggttgcagtgagccgagattgggccactgcactccagcctgggtgacagagcgagactccgtctcaaaaaaaaaaaaaaaaaagaaagcaagaaaatgcaaattaatctatagtgatagaaagcctatcagtggttgcctgaggaggaacaagaactgagggagggagggagggacaacaaaaaaaacccagggtatctttttggggataatggatatacagttgaccctttaacacaaatttgaaggtgggggtccacttatacacagaatttcttccacctcagccaccctgagacagcaagaccaacccctcctctttctactcagcctactgaaagtcaagatgaagatgaacacattcatgatgatccacttccatttaatgaatagtaaatatattttctgttccttacaattttcttaataacattttttctctagcttatgttactgtaagaataaagtatataatacaaaatatgtgctaatagactgcttatgttatctgtaaggcatccagccaataataggctattagcgtttaagtttggggggagttcaaaattatacatggattttcgactgcacaggggaccaatgcccctaatccccacattaagggtctatttattattgcatgggcagtggtctgttcacagccccagatggatgacttatccaagtcgttttgaattccggacttgtagattcacaacctgacaggaactgtggtatacatccaaatgtcaatctctggccacaacggctcatataaaccttgtttctgccttccacggacttacttccaggactctgctgcacataccaaagcagtgtagcagaatgcttaacaacacacagaactagcctggaatccatacactaccatttcagttgtgtaattttagggaagctgtctatgctctgtgaggctgagttttctcatctgtaacatgggaataatggtacttaccccagggtggttgtgacaaccgatttcatcaacataaagcacttaacacagtgcatgacacatcttaaatgctcagtaaatgttctaagttattatctccattcccctttcctgtagttcctcactcttccatctatatgactgccacagaacatcatcctgagtttcctgaccactgttccagaaacccaaagcacgtgtytactgaacacttaaaatgtagttactctaaaatgacatgtgctgcaagtttaaaacacaccagattttgaaaatttagtaaaaaaaaaaaaagaacataaaatatctcactagtttttaacttttaaaaaatgtgactcctagtaaattttaaattacttatgtgtttcacattatacagtcacccttctgtaaccgtgggttctgcatctgtggatcgacaatattcgggggggtaaaaaaaaaaaaactgtatctgtactaaacactgtacagacttttcttgtcattattccctaaacaatacggtgtaacaatttacataagacctatgttgtatgagatattataagtaatcgagagatgatttaaaatatacaggaggatgtgcctatataggttatatgtaagcactacaccattttatatcagagacttgagcatccctggattttggtatccaagggaggtcctggaaccaatcctccatggatatcaagagatgactatatgtatttctaatggacactgctggtctaaacagaccaatagttccaggcagtactagttcctcccccaagtcagcagtctagtctatccagcaaagtcaacctgtcattgcttccaaaagtctcgcaggaacctcaaacacagcatagtcctaacacttcatagctgaatctgtttacaaaatccacccaatgactacccaccacactcaaatccttccaatgacaagaaactcatcaactcccaaagcagcaacccttttcacctttgcacaactcctgagaattagacagttcttccctatactcatgaagatctacctctccaaagggctgatcttagccttgccttacccctttgagctatttagaaaaggctcaagaacagcagaaactacgatttgcagaccacttccaatgtacagtgtaagctttagtttactgtggcatttaaccctcacagcaatgcaagaggtagaaactgttatctccatttggttgataatggggtctacagagctgagagagataaaagtgatctggctaggataccattcaagaagagcatatttcaaaccagaggggctgacttctaaacacctttattcagcgttgcttttgtggttatgttcttcaacattcttctctctcccaattatctggcctattagcagctatgggctcaatccagaagcaatcctgctttggccagagttgcccttacctgtctcagcagccccaaggatgtccagtttgtcacggatggcaggtgccaaggtcagggcttggattggtgtgggtgcagagaagcctagaaagctgagtgctcggagaaccggcctgggaacaaacaggtccttccaagctgacacatctgctttctgatcatgaacttcaggaatccatgtcttcgcttttttgggcaccttggcagcagtgctctgagaaggctccaacccttttttccctttatttttcttcttttttggagcagtttggaccaggttttctgatgtcatctccccagcctccggatcatcacaaaccatgtcatctccctgggcctccagctcaggatctttcacttcaaattctttctgggtactggttccttcagttgctacatttttacttttcttcaacttgatctttttctttggtgagctagactttccctcctcctcctcctcttcttctgaaacagcttgtgcctttctcttgggtgcttcctttgagaagagactggagggattcttggcaggggagaccaactggtaatctgtcaattcctcaaagcacaccaagtcatccatctgtccatctgcaaacatatttgggtcaatcttcacttccttccattttcccacaactttgattccctttgtctgaaatttgccacagcttgactgctttggccttgattttgtgtccttcaacttcatggttgctgaaaaggagatacatgttctattaggttggtgtctgagaagcagagggttctgatgtaacaaatattttctaagcaactaggccctacaaagaactgaggatacaaagatggctatcacacagttgctcccacctagagaagaacaaagaataccacagaacagacagctttgcctggaacacagggtacacatgtgatggaacaaagacatatgagctagacctggtttgaattccaaatccaacacttactgcctgtgtgaccttggatagtgccacccactcctctctgaacttcagtgctctcatctataaaaaggggggagggtacctaacaatatctaagttgtacattttatgtaaataaagraaattatgtaaagcacggaggatgaaacctgccacacctaagtcgttctgaaggcagagtaagaatctcaggggtttttcttgtgggggcaggaggggtgagctttattaaaagcgtactgcgcttgcttccttctcaagccttgcctgagagagcaaatgcctgctccaccatcctttcctttgccaagcgtcttaaaacccatccagtttcttcatcatattttaagtggcttaatggccatttaggcccaactcgtttgggtggaactcgatccaggtttttccttttcagaaaggccaagaaagataacagattccgtgaaaaagaccaaggtaaactttggttcaaatccagatccaccacttgtcagctgtggctctgcggtggacgtattaatctctgagtctcttatttcccagtctgcacaatgggaaaaacgaggacatctgtcccacagaatccttatacgccactacgaaaaagtgacgcacgtcaaaaaaaaccgctgagcatggcgcccggcgaggagagcacgttcgcacacagtgcccgccggacccgctgcgccacggcaaaaaaacaaaaaacaaacaaaaaaaaacacaaagaaacacgcggggttcaacaaggagagggcgaggggtgccacgcgaaccgggcgaggacacggagagcgccaggcagagtagaagggcctctgtctcctcgtgacgccggtcccgcgcggccctctcgctttgtctcaggcacgaacgcgcgcacgaaaccgagaaaccgagaagccgagaagccaaggccgtcaggctctgatgaccggacaaggagcccaaggcgcggggaccgtggcacgcagctcggttggacggcttgggccggcggccgccctctctggacccgggaacccacmggcccagagcgacccgcgataggaacccgggttcctggcctcagcccctctccagagtcggctccaaccccgctcgttttggtactcaccgtgtggagacgcyaccgcagctccgtcagycgcgagtgaagaacctcagaaaccgccgctgtacctcagctgcagcagcaactgcagttccggggcgrgacctccacgcacgtactcgtgcgcgctggggaggaagtcccgcccctatggcaaactcagctacctgattggctgcctcgcggaccgcagcagtgcmggcgggagagctggcttggggcgctggcacctcctcttacagctttactcctgccagcttgggaaaaggccggagaaggtgaaattctgtgtgctccctccggcgagagactttgtcagctcccgcacagtaacgtaagttttcttgtattcttagtgtagtttcgttaccggaaaggggtctcgatccagaccccaagagagggttcttggatcttgcacaggaaagaattcagsgtgagtccgcatagcaaagcaaaagcaagtttattaagtactttactccgtagacagagtagggcgttcccgaaggtaagaggacgaacgcgtccatcctaggtacaatgctcgtacctagatcatagggagatgkgctctgctacaagggtgacgtgtgatgagtgttccttgtattgtaattgttttggggcgccatgagctgtgcccatataagatacaaacgtaattgataaatgttgtgtgtgttcagactaatccactgacaggccgttcttccttctctctccctttccttgggtctctattccctgagacacaacagtgttgaaattaggtcaattaataaccctacaatgggcctctaagtgttcaagtgaaagaaagagtcgcacatctctcactttaactcaaaagctagaaatggttaagcttagtgaggaagggatgtcaaaaggcaagataggctgaaagctaggctgaaagtttgcaccaaaaagttagccagtttgtgaatgcaaaggaaaagttactgaaggaaattaaacattttactctaatgaacacatgaatgatatgaaagcgaaacagtttattgcygatttggagaaaattttagtggtttggatagaaaataaaaccggctacagcatcccctaaacccaaaaccgaatccaaagcaaggccctgattctcttctattctatgatgactgagagaggtgaggaagctatagaagtttgaagctagaagagattatttcatgaggtttaaggaaagaagccgtctccagaacatgaaagtgtaagatgaggcagcaaatgctgatggagaagctgcagcaagttatccccaagatctaggtaagatcgttgatgaaggtggccactgaacagcaagtagtcaatgtagacaaaacagccttctattggaagaagacgccatcaaggactttcatagctagagaggtcaatgtctggcctcaaaggccaagctcactcttttgttagaggctaatgcagctagtgactttgrattgaagccagtgcttgtttaccattctattataaaaatcttaggtctcttaagaattacgctaaatataatctgcctgtgctctgtaagtagaacaacaaagcctggatgacagcacaactgttcatagcatggtttactgaatattttaagcccactgttgaggcctactgctcagaaaaaaggatttctctcaaagtattattgctcattgaaaatgtgcatagtcacacgagagctctaatggagatgtataaggagatgaatgttgttttcatgtctgtgaacacaagatccattcttcagcccatggatcaagaagtaattttgcatttcaagttttattacttaagatacatttcgtaaggctatggctgccatagagagttattcctctgatggatctgggcaaagtatattgaaaaccttctggaaagggttcactattttagatatcattaagaacatttgtgattcatgggaagatgtcaaaatatcaaaattaacaagagttcggaagaagttgactccagttctcattgatgactttgagaggttcaagacttcagtgaaggaggtaactgcagatgtggttggaaatagcaagaaaactaaaattacaagcggagcctgaagatatgactgaattgtggcaatctcgtgagaaacttgaatggatgaacagttccttctaatgtatgaccaaagaaagtggtttcttgagatacaatctactcctggtgaagatgctgggaacactgttgaaatgacaatgaaggatttagaatatttcgtaaacttagttgataaagcagtggcagggtttgagaggattgactacaattttgaacattctactgtggataaaatgctaccaattagcatcacatgctactgagaaatctttcatgaaaggaagagtcaatccatgcagcaaacttcattgttgtgttattttaagaaattgccacagcacctcacctttcagcaaccaccaccctaatcaatcagctggtttcagaaaaaaaraaaagtatattatggcagagggggacacagtcaaaatgttaataattggtgaattattggtgctagagtaagggtacgtgagtgttcattgtactattctttcaacttttttgaggtttaaaacttttcaaaataaagagttgagtaaattgttttgatttaaaaattatgaattaaaaagaaattggtttaagccaggtgtggtggcacatccctgtagtcccagctatccaggaggctgaagagggaggatcgcttgggctctggagtgtgagtccagcatggacaacatagcaagacatcatctttaaaaaaagaaaaagaaagaaggaaagaaasagagtcaattttaatttttaaaaatgggggagggggagatgtcaaccaaaagcaaaatgatggcaaagtttccattatagtagtggaaacataggtattttttttccttcttctcaatattctaattttaaaaaatagtaagaataaactattttaatgttattcttatttcaaagatgaaaaaacagatgcaggaagattaatttgccagagtcatacagctaatgttacagagctcagacctgacttggagatctgtgactttaactgggtgcagtggctcacacctgtaattccagcactttgggaggcccaggcgggtggatcgcttgagctcaggagttcaagatcagcccaggcgacatggtgaaaccccgtctctacaaaaaatgcaaaaattaaccaggcttggtggcatgcgcccttagtcccagctacttagggggctgaagtgggaggattgcttgagcccaagaggtcaaggctgcagtgagccatgttcatgctgctgcgggataattaagaaaccaaagggaccgaggggttgaggaggaattatttaattatttaggtgcacaaacccagtcagattaacatccaaaggactgagccctgaacaaagagtcaagctaccttttaaacatttcgtggggcagggggagatttgtgcagtgggaagcatattacagaagcgagaaacaaagacagttattcaattgagacatggcattacattatatcttacttttcaaggaacaacacgttttacgacttgagagtatctgtctagtgaccttgcagctgcacagctagagaaacagagtcttcacaatgcctgggaaagggagagataaggctcactagcctcagaaagaaaaacaggcagttaattttaaaggactccagccctttctcttcctcaagggaaattgggtttttttacatacaaccgagtttttgcttacacagtttttaatttcttttaattcctgttccaatgccagtatactcagcctgagtgacaaagcaagaccctgtgtgggggaaaaaaaaaagtaatcaagatcaagaaaccctataaggaatgtgtcccagtttccaagggacccatgcagaagcctccattgccagtggctgaagtgggagtacttatgaatgtgttgattgactttccaaaaagactgaagggtagatgtgggctgaggggaaccaagaatgcatatggagaagttggaacagttgagctcatatatttcccagcaagaaaatggctcatctagccaggtagggcatctagaagggtgggggaatcagattgcctggagtcaggtctgagctctgtaacattagctgtgtgactctggcagattacttactcttcctgcatgtttcctcatctgtaaaatgagaataatatggttgagaagactaaacgtaaatgcatgtaaacttcttgctgcagtgcctggcacatggtgagctcaattgaccttagcaattccttttgtcatcacacatttctttataagcatacacatacctttcatatagtataaatatgaaaaggtgataagttgggggaaaacacatttcggcgaaacatcccacagtgttaagtagttgttttaaggtgatggaactgagtgtaattttttcttttcaatatttcaattttaatgtgattattttaattatatatattatatggaggtataattagtgtacaataaaatgcagagtgcagcttttcagttcaatgaattgtaacatttccatatcatcatataagtattgcacaaaacaacataaagaacatttccaccaccccagaaaattcattcatccccatttccagttagtttttatccctacccagaacacaaatatattttaatttaaaaattaattggcaactatttcttaaatgggagccattttggtattttcatttattgtaaaagtgacttatgcctgaggcattgtaattcatctagcaccaaaaaacatacgtatgtataagcattctacrtgggtgatatagtttggatatttgtccccacccaaatctcatagttgaattgtaatccccaatgctggagttggggtctggtgggaggtgtttggatcatgggggcagatgcctcatgaatggcttgggccatctgcttcataataagtgagctctcactctgagttcatgtgagatctggtggtttaaaagtgtgtggcgcctcccctcaattctctctgactcttgttttcaccatctcatgtgcctgccccccttccaccttctgccatgatcgtaagcttcctgaggcctacctagaagctgagcagatgtcagcagcatgcttcttgtaaagcctgtggaactgtgtgccagttaaacctcttttttagataaattacccagtctcagatatttctttatagcaatacaagaattgcctaatataatgaggtcttcctttaccagtgttttgtaagttgcctctttcactcaacaatatctaatgaaccattccccattgccaataaatattaatctataaccagggacggatccattctatttaggacctgaagcttacataattggtggggcagagagcttaaaaaaagagagttataatacaaaataccagtaacactayaatgtcaccccaaaccaggggaagtatggcagagggaagccagattggaaagcaattacaagacaacagccctaatcaattactcttagaagaacttttgcaaataataataataacaacaaagtgagcaatggctagagctgctcttagggtcttggaaggagccagtgcaagtgagggtccctgaactcaggcytcttttgcttcgaggtaaacccatttctgcttctatcatcagtagctacatataattatttatataggagtataaaattttatttattcaatttttgttacttcccacttttgctgtgtcaacctaaataacaaacagagagaagccctctaaaagaaaatgacatttgagaatacggcattgcagtgggaaaattcatgccatagtaaactatgtacatattcaaggatgtaaaggaagacaaaggtttttaaaggaaaaatgaagacaattaygtaattgttttgaagccagattagaaagcaattaaaagacaacagccttaatcaattactcttagaataacttacttttacaaataataataataacaacatgtttggctataaggattaacagcaagggtgacaccagtctgaggttgggcaggtagtttctgggcagatgtgctcacggaagtattttttgtgtaaggttgtgatggcctttgtgcaagattgcaatttttgcagatgatagttttgttctcaggcatacaaaagcgtgaaaaccctctcttcatggattttccctagctctatttgtcagagtttgggtgtgttttttgttatttttatttttatttttgttttgttttgagacggagtctcactctgtcacgcaggctggagtgcagtggcgcatctcggctcactgcgagctccgcctcccaggcttcacgccattctcctgcctcagcctcccgagtagctgggattacaggcactcgccaccacacccagctaattttttctatttttagtagagatggtgtttcaccgtgttagccaggatggtctcgatctcctgacctcgtgatctgcccgcctcggcctcccaaagtgctgggattacaggcatgagccaccgcgcccagccgattgtcgtttttttttttaacacaagcaactccattttgactctgactgcttttatagttgtcatcaaaaacacggtgatcatcattcatgtgcagatatttgtgcacatctctgattcttttcttgtgatgaattccaagaagtaaaatttctaaaccaaataagctttcactacatgctgtcaaataaagtatgggttagaacaygccatacccagcagtgaatgaggatcactactcctttcctcatgcaaacactgcatgttccagttatttgcttcctgaggcagwttataaggatgtagtcactcagctctgtttcaygctctgctgtgaaccctcaaggatggaaagttaatgactctattcccctggcttccccatatgccagttctgcaaatgacctgaattgtgccaagctgactcccctgtgcaaggatgtgaaggtggaagggacacaggggctgtgcttcggctkcttctactgccaagcattgtagtagggacttgtttttttgcagtagcagaagcagagtcccaggatccatttcttacgttactatgcgagatgcagaaggtaagttttcattttactggcatagatgccccagagccaacaggtgtggcagtggcttcccgatatcccagtttcgtgatcatggcactggctgaagcattcttggtggcccacttttagggtggagccacattctggggttggggcattcctggaacatcagcttagaccctcctcctccaatcctggaacaatctttttttttttttttttggagacagagtcttgctctgtcgcccaggttggagtgcagtgacacgatctcagctcactgcaagctccaccccctggaacaatcttatagtcacctaattccctgtgtcaaaacccactctgcttaagttggctggagtgacttctgttatctgcagctgaactctgactaatagatgcatgtgacacacatacaaaatgttacctcctttaaatcttttactattagtaagattgaccatctttttaagtgtctattagtcatgcgtaattctgtcttggggagctgtctcctagtcttcggagttccttgttaaaggcagttccttttaaaaattgattcataaggaaaactctctttgagttggggatactaatcgtgcaaaagtattattttgtttggtttgttttcccctcagtatgtcacttgtctcttaaccttcatgataaatccatttttcaccacgagggactttgttcatggtgtttttttgtttgttttgttattttgttatttttatttttagagagagtgttttgctctgttggctaggctgkagtgcagtggttgggtcatggctcactgcagctgttactggatagaggtcccgatgcatatcctaagagaaggttcttggatatcatgcaagaaagaatttcaggtgaatccataaagcaagagcaagtttattaacaaagtaagggaataaaagaatggccattccatagtcagaatagcagcttgagctgcttgaatgataatacttatagttatttcttgattatatgctaaacaagtggtggattattaatgagtttttgaggtgggcaattcctggaactgagggttcctccccctttcagaccatatagggtaacttcttgatgttgccatggcgtttataaatggtcatggtgctgctgggagtgtcttgtagcatgctaatgcattataattagtatataatgagcaatgaggatgaccagaggtcactctcatcaccgtcttggttttggtgggtttgggctgtcttctttactgcatgctattttatcagcatggtctttgtgaactgtatcgtgtgcctatctcctgtctcatcctgtgactaagaatgcgtaacctcctgggaatgcagcctagtaggtctcagccttattttacccagctcttattcaagatggagtcactctggttcaaatgcttctgacatatttaccccctcccttttacaaggaaacccttaagcctaagggttgtagaagtatgtagatccatcttctgtaatttcttcagactgaataggggcgatgatattcctgcctaactattagggtctcttgtattcagggtagagtggagctcagtcagaaagtgtcggtatggcaaggaccattcataactcttgagttccgacaaaaggtgrtatctggaagattagtaagtgttcaatttaagaaaacattgagtaagctcatcctacatttctatacaaagagtacaacagcaacatattccacaacagtaaagtaaaataagcaaaattatcccaagtaaactgaataagaaggctttccaggaactgggcaattgttggaaccaagctgatatgggggtctctagctgattccaatatgtgcccaaattagaatattgatccagatttttacattacccatccctcttgtttcttctgagctgcagccagagatcaccgattggttcacaggaataagcagggtcagtctaaattgcagaaaaaaactcaaaaacaactgatgagactagaatttaataactggtgtaccacagtttttgaaacctaatttttctctctccagtcctcattttagtataaaacaaatcataatttgacagatttggtttattatacctggcctgattatttgtataaagtgcagcaagaatgattatttttcacataggctttttaaattgactttggtggaactttgttccatgaaaggaatctcagataagacatttttaaagctgaggccagccatgggttggtagcagatacctacgagtttgggtaaattcctctccttaagaggtttcaagataacttggggctcttgggcctgtcagaaagtgacattctttggtcaggaaccctgtacagtgactgtgtaggcaagatacgaggctagttttcccaaggggcttttattggctctataagtcaagtttgattccttaagggaaagcacatcattacagtcaaagccttggtaaaataaccgatgtctccaattgcatccaattgcaaaatgaaatggattcttattgtacttatgcagataactatattgycataaattaagaatatgcagtttcyaaattctggagaaatcaggtagagagaagcaaatatactccaaattttgttcacagtagtatactttactcaattatcaaaagttgtaaatagctcaaaataaaaatttttttggctctgtaaaagatcaggaaaaagtcagaaagattggttcagacttctgttagtttagttcatgcrcttaattcctgttctgtctgatgctcatgaacatttcagctctccatgaaagtcctgaaagattttttctaacatcacaatgtccaaagttatcagaaacctgcatccaagagcatctgtcaaagtcctatagctgattaagggtcaccttttaaagaggatcaaaacaaggtaacagttgcctgtggatgacaaaaagttttaggacagccgctattatagccacaattggctagaaattgtggttacttctatggcatacaacaattttacataacaattataactattagtagcatacactaagtcatatcatgattataggagtttcccataattttagaacacataccaataacttagttatacaaatacagccaagaaagccaaacacccaaccatttcatatttaaccatgcttcctatatgatttttataccaaataaggcaaatatgtcatttttggacttgaggagacctartatctaaaagattaattaggaggtcagaagaagacataatttataatttgattttggaaattttgycaaatatcagaggyttaaaacacttgatattataaaatcaaatcccaggtcaccataagtcatttacttagctgaaacaataactcagaattttttaaaaggcaaaacctttactcattaatagagrgaasatttagctttccaaacaatctctttcctttcccttcttttgtctatagcttattcaaaaggcaaacaaaaatctttttttttttaatataacatgaaaatcagctgggtgtggtggctcacacctgtaatcccagcactttgggaggccaaggcaggtggatcacctgaggttaggagtttgagaccagcctgagcaacatggtgaaaccctgtctctactaaaaatacaaaaaaattagccacgcatggtggcgggtgcctgtaatcccagctactygggaggctgagtcaggagaatcgcttgaacctgggcagtggaggttgcagtgagccgagattgcaccactgcactctagcctgggtgacagagtgagactgtgtctcaaaaaaataaaaaaaaaaaaagaaagaaaatcttaagagagaaagccagatttcaccctttgcgttagtgtactattgatatcaaattcaatccttaataaaacctggccgtgcgctctggctcacgtctgtaatcccagcastttgggaggcygaggtgggcggatcacgaggtcaggagtttgagaccagccagatcaacatggkgcaaccccgtctctactaaaaatacaaaaattagccagctgggtggtgcgcttttgtaatcccagctactcaggaggctgaggcaggagaattgcttgaacccgggaggyggaggatgcagtgagccaagattgcaccactgcactccagtctgggcaacagagygagactccatctcaaaaacaaaacaaaacaaaacaaaaaaaactttacagacaaatcaatcttaatcagtttgtctatgaggcaagattctcataaaccttttataaccctttacaaattcttgttaaagagaagatcagtgctctaagaaaaactctgttgtgcttttattccaatgttcaatttacagaaaaactgaagaatacctgatatggtttagctgtgtccccacccaaatctcttcttgaattgtagctcccataattctgatgtgttgtgggagggacccagtgggagataattgaatcaccgggatgatttcccccatgctgttctcgtggtagtaagtctcatgagatctgatgattttataaggggtttccctttatgcttcgcttttcatttgctctttgccagccaccctcctgggttcaagcgattctcctgcccctgcctcccaagtagctgggactacaggcgcacaccaccatgcccagctaacttttgtatttttagtagagatggggtttcaccatgttggccaggaaaatctaattccaacacatcccaataccaggagcattacttttcccctcaaartgcccttcttggagatgtgaggaattcaaaatcctccttttcatcaaaatttttgactgcatttcttttctttttttttttttttttgagatggagtcttgctctgtcacccaggctggagtgcagtggcatcatctcagctcattgcaagctctgcctcctgggttcacgccattctcctgcctcagcctcccgagtagctgggactacagacacccgccaccatgcccggctaatttttttttttgtatttttagtagagacrgggtttcactgtgttagccaggatggtctcgatctcctgacctcgtgatccgcccgcctcagccttccaaattgttgggattacaggcttgagccacaacgcccggccctgactgcatttcttatgaacttcattttgtatggagaacatccctccatcccacatagaagatttatagtatgaaacattctacactagctgacaaatggcatggagccctactcccatatttgtgataagcaggaagtcagcatggattggtggctaacagcatgatctctgaccaggggccctggttgaaatccttagagctgtggccttgaggcaagttaatgaaccttgatgtgccttagtttggtgacaaatagggagttagtagatatgtactattgttttttgcatttgcttgtttctgtccttttcccctactggaacaaatttcatgaaataaggatgtgtctatctttttctcttgagtcagtgctcaggagcttggtaaatatgttttgaatgaaagaatgagtgaagagaaaaaaaaggaaagtgagagtctcagtgtgaagtctgcggagagaggaatacagaaaattaaagaagtgacagaatcggggtgggaaaggccctctgcttgggatatcctctaatgtcctggaaatgaggctgtgtcccttttgcaagacaaggaaaggagggaaaatgagccctgcaccccaaccccagtcctgcaacgatgcttgaccaaacttgggtttgaggcccaatttaggaatgttagagtccttccaaagattcagggggttagaggtccctctcagtaaagtctctcttggttaaaaatggatttggcactacgargtattaactgctaytctctttgggttaatctgcctcgcactctttgctgatggctgtgggtggcaggattgagcatgtacaggatcatgggacattgggagcttttttctctctaaaggcggaaacttgagagctgatcccttcaggatgacaagtggccgcctgaatttttgagtcagtgttgctgcaacgggtgggtctttctctggcctccctgagctcttcaccttctccaccctgccgtttccttgcacagtcctgtttagttttggaacaacactcccaaataattcagcaaaagactttgctgataaagcagcatgatgtaaagaagtcagcccaaatccaccaaaacctagatggtgacrgaagtgacctccatcactctaggaattgtccacccctttcccagaaaactcgtgaatgagccatcccttgtttagcatataatcaatataatactgtaagtattatcagtcgagcggcccaagctgctgctttgctctcacttcactctggatttggcttgaagtcttcctgtgtgaggtccaagcaccctctcttggagtctggattgggacccctttccagtaatatactcctggtgaaccatgaaaggacgatattgaggagacccctgaactaaaggaaatagaccgcaacaccaattggctgactttgggtaagtggtggggtacattttacctgggtaaaggatgagaatgggttagaagtccaacttaggggaattagagtctctcctaagatagagcgagttaaaggcccctcttaataaaaggcaaggatgcacaaaggcacacttaaaaaaaatttagagacaggatctcactgtgttgcccgggctggagtgcagtggcatgatcacagctcactgcagcctcgacttcctaggtacaagcaattctccagtttcagcctcacaagtagctgggactgcaggtatacatgacagcacttggctaatttttagagacttttttagagatgagggtcttggtatattgcccaggctggtctggaactcctggcctcaagtgatcgtcttgtcttagcctcccaagtaactgggattataggtgccagccaccgttccaagccttaggcacactctttatccatatttctttttatgaaatactcaatgtctacttgatctccggtctgggcctagcattaagggaggcagcaatgaatgactcctgactcgtgttagtcagttttacatttctatcaaggaatacctgaagctgggtaatttataaagaaaagaggtttatttggcatggttctgtaggttatacaagcatggcaccaacgtctgctcagcttctggtgaggcctcaggaagcttttactaatgcagaagttgaagggggagcaggtgtgtcatatggcaagagagggagcaggagtgagaggaggaggtaccagcctcctttaaacaaccagctcttgcatgaacaaacagagtgcgaatttgttcattaccatggggagggcaccaagccaccatgagggattttcccccatgacctgagcacctcccaccaagctccaccaccaacattgaagatcacatttcaatatgagatttggaggggacaaacatccaaaccatagcagtccttgattttaaagagctctgaatccagcagaggagatagagaacaatgttgcattgtgggaaattctgtggcagaaagaatatagtggactcacatttgagagcataagtgggggtatagttgctcaagcgagattgggaatgtgtggccagggaagtcttcctggagaatatgtaagatgatgaggtcctgaaaattttcctgaatctagcatgcaaaggatcagaggcctaaaagagcagggaatgacttctatttgtcccccaggacagaaacgtagctggatattggcaacaataagtttagggcgaggcagaagccagttcatggaggacttgcttatcccatgggccatacaaggctgttgaggggttttaggcagatggatgggtaaacaccatgacttttccctgtaccacagcagccagtagatacgtctccattcagtgttttatatccctgatgcttgggttgcttccatctcttagctattgtgaataatgctgctacgaacatgggtgtataaatatctattcaagactatgctttcagccgggtgcagtggctcacacctgtaatcccagcactttgggaggccagggtgggcggatcacgaggtcagggattcgagaccagcctgaccaacatggtgaaaccctgtctctactaaaaatacaaaaattagccaggtgtggtcgcacgcacctgtaatcccagctactcaggaggctgagggaggagaatcgcttgaacctgggaggcagaggttgcagtgaacagagattgtgccactgcactccagcctgggtgacagagcgagactctgtctcagaaaaaaaaaaaaaaaaaggctatgctttaaatacttagggtagttactcaaaagtgggtttacgggattatatgttttatatgataattctatttttaatgtttttatagtcccaggagggatgcagagttctttattaatgcagctttattcaaaccagatcctgaataaagtcaaaactcaaccaacaggtggaagtccaagaatccgagtggaggctcacygaggcgaaggggccaaccatrggaaaggagagtggatgggactcaggtgggtactgcacatgattctgggggctgctggtccttccgaggtgaatgcactttgtgtcccactcttctgacaccagattatgtcaaccccaaataacagagagggaggctatccatggaaaagaattattcaggaatgaatgacgggatttttaaatcccagaatacacatgccacagtggaccatggcggggycacagatgtacccaggaaggcaaaggaagacaaaggtttttaaaagcaaaacaaggaaagttactaagtggttttgaaacaatgatccttggctacaagtgtggcatcagcccaagattgaacgggcagttgctgggcagtcatccattcagaagtattctttatggaaggctgcagtggcctttctgcaaggttgtggttttcagagcatctttgtaatagctcttttcataggcatgtgtgcctsagagcccctccttggtggcctgcctccattttgttaggatttggcataagcgactccattttaattctgacaactttcatagcaggaaggcttttggcctgagctgctgagaggatggattccgggttcagcagtgacttgggccagagcagaggcagagagacaagttaggaagctcctccagtcatcccactgagagacgcgggtggcttggtccgggactggagctgcagaagtatgagggatggtcagactggatatttctgaaggtgaataagcrttcrcggatagattgctgtgaargagagaaaccatgtggagtcaaggaggactccaggccacttaccctgagctactgagagaacggggctgccctttacagaggctgggcagctgttggagggacagcttccagaggggaaatgggagtgcacttgggtcacttcatgtttgaggtgcttctcagatacccaagggacatgttaagtaggtctaggctgagcacatcaatctgcaagtcaccagagtacttaacacagtgggactgggtgaagtgcccccaggtgtggggctaaagcaggggagtctgaggacggaccctggacacacccacactgcactgagttcagggagaggggctgaatgagactgagaaggagaggctagtatggcagggggaaatgtggaggatgaggccaggtgaggaagatgtgtcggcttctagggctgctgtcacaaaggtccatggattgaatggcttaaaacaacagaaatttactttctcacmgttctggaggctagaagtctgaaatcagagtgtcccagggccatgctgtctctgaaggcccttcaggagaatgttccatgccactccctagtttctggtggctgctgtcagtcttcgacgtccttgccttgtggctgcatcactcccatctccatctctgtcttcacrtgggcttstccctgtgtgactccaagtatctgtgtctcttctttttcccttacaaggacctcagtcatattggattaagggcccaccctactccagtatgaccacatcttcattacatttgcaaaaaccctgtttccaattaaggtcacattcacaagtaccagatgttaggactcgaacatatcttttcgggtgatgcaattcaaccygcaacaaagacgttttgaggaagagagagtaatcacccctgtcagacactgctgagagctgggaacgttgaggcccgagagggagggctctggatgggcaccaaggaggtcagtggggacgttgtaagtccagtttcttggggactgggttggggagaaggcttatgggtatgggtttgagagtgcatgagaggagtggtggtgtgtcgtgcctatacacacatcttgaygattcactcatgttctcatgctttgcattagaccctcccactaaccctgtgaggtggctgctctcattatcttacacattttatagaggggacaagaaagctaggtaactgctcaaggtcatgcagctctgagtctgggtgcctaaccacggtgccattctgcctttccctgaatggacagaactaccacarggagctttgctctaaggagcaaagcaaagtgaggtggcagctggaggaagatgtggtgtgaagggaggggctgtccttgttttactggtattgggaacartcccagagagagggagactttgatgatgcagaagcragggaggcactgctggagcatgacttggagtaggaakagcaggtgggcccagcgcacagggcggcaggcgcacaagtggggaggcacacaggtggcaggtgcaggcactgctcatcacagaagtgggagggcaagggaatgtgggggcaggggtggtgagtggcaggggtagacttgctggtgagagcagggggacgctstcttctggttgccttcattttcttggtgaattrggayccygacagaggcaagagaggaggtggtgcaggtttgaagatccagggagaagttgtgaaatttgcataatctcagagagcggggagtgaaaggaacagaaagacacagagattggagtgatgcagccacaggcccggagcaccaaggattgttggcagccaccagaagctagaaggaggcacaggaggaccctccctgagaggcttcagagagagcgtggccttgctgactcctggattgtggacttccagcctccagaactgagagaattgatttctgttgtttgaagccacccaggttgggttccttggttacagcagcctaggaaactaagacagagctcagaaatcccagggtgactgaagaactcccaaagcttgtgttagagtcagaaaactggaaagggaggagttaggggcctctagggggctgctcgctgtagggagggtaccattttgttattaacaaggtctaggacamwtgctaatagaactaatagaaccttctgttctctgagctgtccattgtgacagtcacaggctacacgtggctcttgagctcttgagatgtgactagtgcaactgaggcactgagttctaagttttatttcatttttaattcactaaactttaaatagccacacatagctagtggttacaagtgggcagcacaggcctagggtttgactgagggaatatggggcatagagtccaagatctttggaagcaaggaaataagaactgaaagacacgtttttgggaaatgtcatctgagtagggattgatatcatcaagacaggtcaggagtcgtgacagagagaaagggaggtcctgagccatgagytaaaagcttcaagaaatggcagggagtgatgggaggattgaggctgatttttgcaccttctgttacttggctgagaccaaggcgcctcttcctggggaggtggctgagctctttcyagcaggccctgaaatctccagaactttggtcccagctgcctaagcaccccagtccctgcccccgtggcagccattgtcagatgttcctgccagccctgagagctcaacacaactcaggaggcccaggcatgctctgcccagtgctgcagggggcccagccacaaggctgggcagaggagacaggtgacttctgatgcggggacctggggaggcttcctgcagaaggtgccacgtgcagagccctgaggatggggccttcacctctgacctatggcctaggatgagtaggggncttcagaagagggaaagaatagcaaagttgaatttgagatgggggtatcagagagtacccactcyyataggtttgtgtttgtttgtttgttgttgttgttgttgtttttgtctccaggcagggctgctgtagcagctgtggtcggaggaggtgagtctctatgggaaggaactcaagcccccatcccccgcctccccccagccctgagcctctgggagaaactggctttgaccaaacccaggattctccaagacatagctgggtagcggtggagtgggcagagtgatggggaccttagagcagcaggaagcaaagcaaagccattaaaggcacagggctttggaggcagccagagctggggctactctcagcttccaccaagtacaaaccatgcaaccccggatgagtcattggagcagtcacagccygggattcctccccgtctaaagcagggcccatggtatccttggggacttttgaagggagtatgtcagctgagctgtgtctcattcctcaaaagtatttgacaaatgctggtagcccatccactgagtcagaagcttttgacctgctataaagcagtgtcctccaatgcaatggccaaaactaaagaaaatcataatgtttctctgtcacctgcaccacatttcaagtgctaaacgtggctaccctagtagacagtacagaaaacaaatgtggctgtgattgcagatggctctctgactgcactgctctggagattttggggagccctagaggacccccgcgtgctgctgcagggccttcagggcctccatccyctcacctctccagaaaagcagctctgatattgtcttctgtcaaccttttgcatggagagatcatgttttccttgccaaaagggaaagtttgaagactgctgtttgcttcaatgtatttattttacattaggggaacagaggcccagggagggccagtgagccctcaatggtgtctgtgaaacaggcgtaaacaagcctgggattcagattatcctgggagccggtccactggctgctttacacgttgactgcccttgttttgggatcccatccctgctcagtctttcctgagagcacagcagacccctcctcctcwtcgccccaggaggatgtcagggaagtctgggggactccgtcccatggggccaaccccaaatctccacttcccgcagttgtggctgtggggactgtgctygtggcgctcagtgccatgggcttcacctcagtaggaatcgccgcatcctccatagcagccaagatgatgtctacagcagccattgccaacgggggcggagttgctgctggcagtctggtggctattctgcagtcagtgggtgagtgttctggacaggatgaccagagccaggagatgatccagccccgaggctgaaccagggaggcctctcctctccctgcaggtccgtgatcctctgcctcttgggccctttgtctttctgtcactgtcccctcttctggttggaggtgggaccaggggtgcagcctaagagatctgcattcctggtgaaccctacaaaacccaggcaggtctcctcccctctctgggcctttggaagataaggaacctgccatttctcagagggtctgccctgttgctgggattcctcaccagagttcttgcctcctcttcgggcagtggcctgcagcagcccctcccagagcagaaatcctagggttttaggaagcagaggtggggaacagggttggantgcctgggcctcaggtctctggagggaccagggtctctggccttcaaccccctgttaggagntgctacccctccctgtgccctgtgctcaccctctcttctcccccaggggcagctggactctctgtgacatctaaagttatcgggggctttgctgggacagctcttggggcctggctgggttcacccccttccagctgaacaccacactgaggcagggagttggctctcttggtggagatgactttcctgggcctctggatgacaatcttccaaaggacaagtctcctactcccaaaactatttaaggaagcatgaaaaataaagatgctggttatcttctcctagtgtcggttctctgttcttgtggtcaggatagggtacagcgctgctgcaggactgctggacagggagggactcaagaggaagcagcatgggatgtctgtgaccggagccaggtctggccccaggctttccactcattctgtggtcctgagcaggtcatgtctgccctttgagcctcagtttgctgcacttcagatgggagagtcagccagagtaagcgttataggatggcgtggctcttgggtcattgcttgagccattgaccctcaattacgaagccctttgtcctcatgcgtgactgatcccttcctttcccacccaggactcagggtgtgactgattactctagaagtttactctagaagtttactctactgattactctagaagtttagcaacactacatttgcctggcctatgggccttctccatacaggtcgagaagtttcattcctccagggagctctgtccctctcagcacagagcccaggctcctcaggccccaggtggactgagcagagcctgtgaggatgggcaaggggctggggctcctgagaagtaggccaatgcagaatacccatttccagagacctcctgtgtgcctggccccagatcaggtgccagctgtcctatgcacactgacctggcatctgccacacggcacctgcctggccttgaggataagtaaaccacacttgacttctgcaaggcctrtttagatgtggcctctgacctcaaygttagtcccactctgggctgtttgaccttcacacttatttttcctttacagctgcactcctgcagggctctccctgggatgctggctgagctgactcccacagctcccaaaggggccccaaggctccatcccacaggattgccctggctacagaggatcacagaggtccatctctgcccagggtgcacaatgttggggaagccagcccttaaccaatgatgtgaagggacttggggtaaattacagaaacgaccatattctccgccctttcagcatggctgtacagctcctcccatcaagaggtaggaatttctttcccctccctttgaatctcctctggcctgcggagttgctctggcctggccgatagaacacagtggaagtgatggcgtgctaatcttgagcctagtccctaagaaaccttgcagccttctgctgtatctcccggaccccatcactgccatgagaacaagccaggctgggcaagcacacaaagtccattcattccagacaagaccccagacatggcagcgagcccagccaagttctgcaaagctgacctgcagctgactgcagatggatgrggggcccagctgagaccagaagaaccacctgcctagattgctgacccacagaatcatgagctacataacttttttaagccactaaattgtgtggtcactttttatccagccatgggtaactgacaacataagacaatgtgtaaaatcactgaagaggatcaggctatatggctcgtaggacagaaaaggaagcgatagattctaattgcagcaacctgggaagacttccctggagtaagtgctgttttacttaaggattatggagttgtaagtactagaaacttgatcgcaacttgctcagagttcaacggacttcattgctttactaaatggaaagctccaaaggtaaagtatgcttcggacagggtttgattcagcaacacagcacggatgccaaagacctgtcttttctattctttgtttctgaggcatcagcttcatcttgtggctgccagctctcgtggttacaagacagctgttagcaagctctggaagctaccttctttattcatgtctcccagaaagaacattttttcatgtactttctcctgaaaagcaaagaaacatctttcccaaatacctctagtaaatgttcatgctactatcttaaatggggtcatttactcattcctaaaaccctttattaggcccaaaggatgggtgggatgtgatgactggtttaagtccacctggactcacctttagaaagtgcgaggagagcccatgcctctgatacactcataggtcaaggcaggggctcctatacctgaaagaggaggtttctgtttcaaagaagagaggggggtaagagacagtgagtgcccaaacacagcgtcctgtacagacagcttgggcgttgttctcagggaagactgcgcctcgaagatccttggaggaaaccaaagtgggctcccagccaggttcgctgcttctgtctctgtctctgtctcgttattctcaccgctccagcctttaaggaagagcacaccggacccgaaggtaagtggacagtaggttactgtctttttgtttttaactttacagtatgggattatattattttctaatgaaaaccaacattttattgcatttaaattacttaagaaatcttgaagtagcttctactcttaaaaatccaaattcatataggtaagtctaaagcccctttggctctgataagcatccttgcccctcattacagcccctactcccaccctcagaagtaaagcactgctgcaatttcatgcgttcctttccaaggaccccccttttatagtgtgataaaaattcataaaattgaccatcttgaccattttttaagtgcagttcagcaatgttaggtgtatattcacgttgttgtgaaacatctccagaattttttcatcttgcaaaactggaactctgttcccatyaaacagctccgctcygcccctccccctgccccggtaaccaccattctactttctttgtgaatttgactactctaggtaccacttaatggtagaattatatagtatttgtcatgtgtgtgtgtatatgtgtgtagagatgggcttttttctccgtgttgcccaaactgatctcaaattcctgggctcagctgatccacccaccttggcctcccagagtgctgggattacaggtgtgagccgccgtgcctggccaaaattatatagtatttgcctttttgtgactggcttatttcatttagtataatgtcctcatccaggatgcagcatgtgacagaatctccttcctcgataaggctgaatgacattccaccggaggtatagaccacatttggttgatccattcacccatcagtggacacttgggctgcttccacctctcggctattgtgcatagtgctgctatgtacgtgggtatgcaaatatctctttaagatccggtgtcttaggccgtttgcactgctgtaacaaaataccatagactaggtagcttaaaaaacagaaatttatttcccacagttctagaagctgggaagtccaagattaagaggtgtcagcccccttggtgtctggtcagggtkcctttcctggtttgtaaatastgctttctgtgtcctcacatggtagtgggataaggcagctctctggggggcctcttttataaaggcactaatcccattcattagggctctgctctcctgatttagtcacctcccaaaaagttccatctcccaataccatcacctttggggttatgattttaacgaatttggcggggccgtggcattcagaccatagcaccctgctttcaattctttgggatatatacccagaggtggggtttcyggatcatatagaagttcttttaattttttaaggaacttccctactgttttccwtagcaactactccatcttacgatcccaccaacagtgtgcaatggttccaattatataagggccaacactttttattttcggtttttttgatagcagccatcctaatggttgtgaggtagtatctcattgtggctttgatctgcatttccctaatgattggcgatcttaaacatcttttcgtgtgctttttggccatttgtatatcatattagttcatcttgcactgctataaaggcatacctgagactggagactgagtactttataaagaaaagaggtgtacttggctcatggttctgcagggagcatggcactggtatctgctcggcttctggtgaggcctcaagaaacttgtactcacaatggaaggcaagaggaactgacatcacacggtgcaagagcaagaggaaggcaggaggtgccagggtcttttctgcagtcagatcttgcgggaactaatagagtgagagctaactcattactgtgaggacagtgccaagcacccccatgaccgaaacacccccgactaggcctcatctccaacattggaggttacattttagcacgagatttggagggggcaaatatttaaactatagcatatatcatctttggtgaaatgtccatttaagtcttttgcccattttatttatatatatcatttattattattattattatttcagatggtgtttcactcttcttgcccaggctggagtgcaatggcacaatctcggttcacttcaacctctgcctcccgggttcaagcaattctcctgcttcagcctcccaagtagctgggattacaggcacacaccaccacgccttgctaatcttttgtagttttaatagagacagggtttcaccatgtcggtcaggctggtcttgaactcctgacctcaggtgatctgcctgcctcggcttcccaaagtagtgggattacaggcgtgagccaccactcccacttttgctcattttaaaattgggttattcgattttttgttgttgagttgtagcattttttggtatactctgaatgtttactcttcattgccaagtttgatgtcatgaataatttcccctatgttttcttctaggagtttcatagttttgtggctcgcatttgggcaattagttctccatgcccttttaaagttatttctgtggatagatgatagaagagatatataggtatctccatagaaaatatttgtatatagttctgttatatgcatttttattgctatggttttgtttaacctaatacatactattctgatgctggcttttttttacattttataagtctttttcattatttttaattgctgcttagtattctacggtaatgatccaccacattttattttgtcttttcccttttaaaggtacttgtgtcgctggttgttaaaggaacatttcctactttggaggaatttcttttttttaattatacttttaagttctagggtacatgtgcacaacgtgcaggtttgttacataggtatacatgtgctacgttggtttgctgcacccatcaactcgtcatttacattaggtatttctcctaatgctctccctcacccagcccccttcccccaacaggccaagtgtgtgatgttcccctccctgtgtccatgtgttctcattgttcaactcccacttatgagtaagaacatgtggtgtttgattttctgtacttgtgatattttgctgagaatgatggtttccagcttcattcatgtccctccaaaggacatgaactcatctttttttatggctgcatagtattccatggtatatatgtgccacattttctttatccagtctattattgatggacatttgggttggttccaagtctttgctattgtgaatagtgccgcaataaacatacgtgtgcacgtgtctttatagtagccattctaacaggcgtgagatggtatctcattgtggtcttgatttgcattactatttactattgaaattgtgtagaactgctggacaaaaactgtgtccatatgctggccgtgtattgttccatccagaagtgatttgagcctcagcattagggtgaccccaacccagcctttggttaggacatggagcctgatgatgtcacatacatacattcatacattcattgtgctaatttgcaaagtctctggtactgatgtagtagctgcacaggggcgtgtggatttctgaatatactgcctccccgggggcccttcccagagagaaagccagagtggacacctgctggacccctgaataggagtatagatcgccatcagtgtggcttaaactag

SEQ ID NO: 95047 - DNA, 68025 bp, Homo sapiens
  misc_feature (1)...(68025): n = A,T,C or G
tctctcacccaggctggagtgcagtggcacgatctcggctcactgtagcctctgcctcccaggttccagtgattctcttccctcagcctcacaggtaactgggattacaggcacatggtgctgcgcctggctaatttttgtatttttagtagagatggggtttcaccatgttggccgggctgatctcgaactcctgaaaagcactaggattacaggtgtgaaccaccgcacctggccccctggctaatttttaaattatgtgtagacatggggtctcgttatgttgcccaggcttcaacttccatttttttatgctagaattttttagaagtatattaatactggccaggcgtggtggctcatgcctataatcccagcactttgggaggccaaagtgggcggaatgcttgaggtcaggagttcgataccaacctggccaacatagagaaaccccgtctctactttacacaaaaattagctgggagtggcagcatgcacctataatcccagctactcgggaggctgaggcaggagaatcacttgaacctgggaggcagaggttgcagtgagcagagatcaccccactgtactccagcccgggccacagagtgaaactttgtctcaatatatatatatattttaatactgagatcatgaaacaaggcaatgtgttctttaagaggaccaatttcagagccatgtagcagtgaagtgagcaaaggcttgcaactgaagtagggaagcaggctcaggaaaaccactacaaggaaagggaaagtaacagcctcaggattcataggcagaagagaaagccaatgggaagcaaactatccttccttgttggactataaagtggaaatagaagagaccaggaaccatgtaaagatcaaacaggccttttcaaggtaagaggaagagaaaggccttcctttaagtataaaggcaagcaaggccaggcacggtggctcacgcctgcaatcccagcacttcgggaggccgaggtgggtggatcacctgaggtcaggagtttgagaccagcctgaccaatatggtgaaacccgcctctacgaaaaatacaaaaattagataggcgtggtggcatgtcctagctactggggtggctgaggcagaagaactgcttgaacctgggaggcggaggtcgcagtgagctgagatcacgccaacgcactccagcctgggtgacaaagcaagaccctgtctcaaaaaaaaaagtatacatatttaaagaaagccataagactaaagctatcctgcctaaagctctaacagtcactatctagatattactggtggaggtatagagtcaaggaagcaattcatcaaggaagcaaagggccatgctttgaccctctatccgtttcattgataagtaggtcacagcattcctggagaagcagctcaattagaaataccatgggaaatacaaagagactaccaagtttagtgtcttcccccatatggggtcacccaagcctcattcttagaggcctggtagcacctcaactttagattatttctaaaagatttatttcaaaagtttatgtatatagctttaaaaagtaatacagaaaggcctatatgaaaaaacaatggtcccctgaccattgccacccaatcaattctgatctgtagagaagactattttattccattagctccatttttttctcatctgatggctaccttcacatcttaataaacgtatgcagctaataaatgtatgcagccattcttttttttttttagatggagtttctcttgccaggctggagtgcagtggcacaatctcggctcactgcaagctccacctcccaggttccagcgattctcctgcctcagcctcccaagtagctgggactacagtcacgtgccaccacgcccagctaatttttgtatttttagtagatatggggtttcaccttgttggccagaatggtctcgatctcgacctcatgatccgcctgctttggcctcccaaagtgctggcattacaggcgtgagccaccgcgagtgctgggattacaggtatgagccactgcgcccggctgcagccattcttaattaatttttgggcatctaaagaatctgctttcttaccccttcacacattccttaaccccatcttctcatcttgctcattttaataaatcagtaaacaacatttaccatttctatcactctgcaactgttgttcattatatagtagcctttaaaacttaaaaagggaggtacaaatttttccctttgattccagtaatttatcctctatggcaaagtttaagtctaattttcattcgtacctctaaccgggtgactgaaaaatatataaatataaacccgctacaaatgggacagatcttactatgataggcttcatagatggccttacttttctttttcctgttcatggtagtgaaggaagatcatttaaaggaggggatatacaaatacacaagggaaatctattaatggtaaattgcatacctaggtgtaaataaactacctcagatcctctgtactacgaataaataccaaactgaataaacttaggaattgaccatcatctatctaacttctagggctgtgatcataaatggcagaatgtcttatttagtgtttcaacactggggcaaaagggagaacatatccttgttaacataaaagaatatagatactgaaaaatagatttttcatttatctagaattttaaaatctagaattctaaaacagaaaattcccctatgttcaaaattgatgtccataatgatactcgaagcattctaagtgttttctgaattgtgaaagtttaattttttccagtcaagtttgcattatacttcaattcattaaacatggtcattgctatggtgaccactgtaaattaaatggccagcaattcagttaacaagaaccccatctccctcctttcatgtatttgtataaatataattattctgaacaaatgtcacggaaacataaaagtatgatactcacacttggcatacagacagtccatcattgactgcactaagtccagtttggcttttatggaaaagttgataaagttggtatcaacgaggatgtggtaaggtgggcccagctgtgtattatattggaaaaataagcaggaagggtgttggggactgaaggaaaaagaaaacaagaacaaagaaaaatttacattgataccctagtattaacaaaaacaaaaaagaagtctgcttgggactgtttgctgtaaactcttttgtccatgttcattggaaataaatcctaaaaaggaaggcaaggaagaaagtaatatcattatcttaatctcagctcccctggcaacctttgtcaccaactttaaaaaagcaattatcaaaaacaaacaaacaaaaaaagcaattatccaatctagctcttcctctagcaaaagtagaatcaccatgggcacagggaggtagaatacagttatcgtgattagaatgatacaacaacacgtttgtcattcttaaaggattctaaaactgctgttatggaatgtgatagagaacagtttgtctagtgttaggattatatactacagcaggacctgtatcacatctagcccaagttgtctgggttgaatatgacagtgattccaaatgctaggccatggatcagtatctacctgtgataatatgtccattaccaatccagggaaaaattagaaaaataaggaaaatgtggtaaagttttcataaagttaaatgtacttacttaaaaggaatgaaatacctttatatctttatataaaggtcatayctttatataaatatctttattctgaaaatatattttaaatattttttggtgatacagtctctcttttatgaactgctggtgtgttaaacaatggcacttatgtctcttaaaagatccctggcaaagaaaaagttaataatcctagataatatctccaggattttaggggaaattttactgctccataaaatcccaaaaccttcaaaccactagaattgatatatgctcatcgatatgactttcatctacatagttgtgctagacttactaacaaataagttagcaaaccagctcagggaaagcctggatttctaagaggtctatggttttaaaggaaaacttcaaacgtttgattactcacacttctctttcctttaatgcgctgggatccttcttttctttctttttaggttttaatctatccttttctttactaggaagaaaaaggtaaattaaatccaagggagaagaaaaaccacagcaattaaaatctcaaaaatctaaagttccatttttttttttttttggtctactgaagaaatcctactttgtgatatcctcatgttaatatcagcatactctttctgagcaaataactctagtgcaaagcacagtacctggaagtatcagaattaaccagtaatgccaataatgcataagaattgttaatgagtaaataaaagctgattatactatatttattttttagtcagaatctctcacatcaaggatcacaatccacttccaagcaatgggtaaaagggtgacagttatcttctgaagattcagatgctttaacttttgggggaaaagtattaccccatatgcttcttataaagggctaaaatgtaaaaacgcatatacagaacttaacccttaactagaaagaaattattattaatggagtgtcattcctaaaaattacacaatacatccacactaaaggctgagaataataattctgaaggttttaacgactattctcttattctgagactcttttttgtatttttagtggagacagggtttcaccgtgttggccaggctggttttgaactcctcacctcaggtgatccacccgcctcagcctcccaaagtgctgggattacaggcgtgagccactgcgcccggctttctgagactcttaaactcagtgaagatcagtctttatttaatagctatgcttattctacacttaagcagggacaccgctttgatcctcttcatactagggaatttcacttcactttcttcttccacagtgatttggattcttatattagtaagacttataaaatggagatatcttggagttttcccattttctctgacaaaaatatttgagtaccaggcactggaaacgccagacaaacaaggtctctaaccttgccatctttcaacaagaaacactcccctcgccccaccccaggggaatgtagtagtgtaatggtaaaaacataaagagaactatacggacttcaccgaactgacatgaggtttaaatgcgatatggcagacaaagcatataacggtagaaaaagtgaacacttaagaaatgtttaattcccatcgcctttcccagtgtgatcgctcagcagctaaattactgttaaacactggctatctcatgctatataaatctaagacacgataataagcaaaaaacaaaataataacaacaaacatttttactacttatcctctctagactcttattagaatatccctgggcagttgattccagacactcacagcctctgatctctgagactaagcattcgcttcatggtcgcatacttccttgttttcttttgcttccccttgaaacagaaattttagaattaaaaaagttggaaacacacggcatcttttaaagtctcttcttttctcttgtctattgccttcccttcttgcctcaaataacccagaccctcttccccactctgtaaagcataacagtcaccgcttggagaagtttaagagctaagaccagaatgaaaatatgctaggataatgtgaaggaaatttggccacggtctgactacctccttctccacccaaaaagtggcctgataacgtcccttcttggaccgtcttctctcaccatggtcacgccaaactcctggttcttccgtaatcaccaacggcgyaatacttctacgtcattcacatactgcttccggcaaaggatagcccggaagcggaaactccttggggaaagggcaatcccccgagccggttcccaggccgggtggagaccaactctggggtctsttggtgggagagtggggagcccgtcttctgctgagtgctgccgccccttcccaggacagcggaggtggaacttcgtcgcgctgcaacccccggctcgggtaacgtttctctccagccttaggcagagcccagaagacctgcctttaccagagttccagagagagagggaggaaaagggtaggggggttcagactcctggtttgcccagtagtttgggggaacacattctcctcaccctgtagcgttggggtatccggtgtctatggtccagccctgaggctgtggttcctatttggttttcctagccgatatggtgctttgtgcagctaggtggatgattgttctcgagtatataccgtgtactcctctcggtgaagagagaaatgaagcagtgtttgagggcctagactatcgctagagaattggggcataagcttgcatatgttactacttacccaagccaagaaaatggtgagatacaatgcacatttattgtgaagccttggtgtgtcatctttaagtaaaaagggagaatttgtgagaacaaggagcgaaaggtagcttttttctttgagtacctgctatgtattccagtggttcttaactttttggagataacttatttcttgaawgtttgtggaaagccaggaacaattctttaaaaaatgggcacacatacagtttgtaatacacttaatgagattggtggactctgaagcccatccgtggaccctctgggtgtctgtaaactttaaatgaaaacccccatcctgtatactgtacttgtcactttattcatattaccttctttgaccttctcaataacataaattcttttattttacatatggggaaattgagccccagactttgttcaggggtctgtttgagtctcgtgattccaaagtctgtacttgtatttctttttttctttttctttctttytttctttyttttttttttttttttttttttgcactttgtcttccattctccagctactgatcaagctgggaacggaatrggtacctctgtcatacttttcttattgcatgatgctatcctagagttggaagtaaaatatgttatcaggtttaaaaaagaaggtgaccattgtataacccttatgatgaaaacacgtttattgtttaacacgaactttggagtctgactgatggggttaaaatccttgctctgccttataactcgccatgacattgggtgagttaatctatctgcatctcagtttctttatctgtaaaatggagataatcatagtagcactcttttattgggatgttatcaggacttatgtttattcatagttaacatgcgaggtccctagaagagtgtaaaccagactactcagagtgttttctgttgttaccattgtgtgtcttccaacttgaggatgtgtggcagggttggaattttatgccaattttattttattttattttattttatttttgagacagagcctccctctgctgcccaggttggagtgcagtggcgcaatctcggctcacagcaacctccccctcccaggttcaagcaattctcctgcctcagcctcccgagtagctgggactgcaggcatgtgtgtgccaccataccttgctaatttttgtatttttaatagagatgggtttcaccatgttggcaaggctggtctcaaactcctgacctcaggtgatctgcccacctcggcctcccaaagttctgggattacagacgtgagccactgtgccaagccccaattttttttttttttttttgagayggagttagtttcgctcttgttacccaggctggagtgcaatggcgcaatctcggctcactgcaacctccacctcccaggtttaagcgattctcctgcctcagcctcctgagtagctgggattacaggcgtgcgccaacacgcctggctgattttatatttttagtagagacggggtttctccatgttggtcagactggtcttgaactcccgacctcaggtgatccgcccaccttggcctcccaaagtgctgggattacaggcgtgagccaccgtgcctggcaccagcccaattttattttaacatagttgcactggaacttgaacgtgttcataaacctcaaaacattaagttttcaggtcctgggatgctcaatcgcagggtgatttcttctgttgatttgggtgtaaactttttctgcttctcctttctctttcaggcacacattcatttagatggcttaatagtttacatatctgtgggcactgaatttttgatgtagaaatggtagctacagatactgtatgtgccttctgctttaccccatttgtggtcactagaagttcctaatctttctggagcagcttgtctctgtcaagctgccattcatgtgtagagctaatagcaaccagttttttgatgtatctcttggtgattagacaataagctttttattgtctaaaagctaaaataacatggtcagttattcttcttaaacatttgactcattagtattatatataggttcagagggaaaattgcatatcattaaatagtaatttgcatttaaatttaggcactgacagaaaaacgctcttctggtaatgtgtactttgaattttggaatccatgaacaacaacaacttaaaaaaaggccatttgtaatttctattgtaacctctattgagagtgttctgatttccttgattgttaatacctaatagggagctaaattagtgtaggaacaccatgggggataagaacatacttagaaaaatttgtttttgttgcattgtaattttattgcaatctgaggttcttatagcgtgaaatgaaagtggtcagatactctacagcattctttgatggggatggaaagtgggggatgcgaagctgggaggtagtgttgatttgtgatggatgggagcagaaagtaattgcttttgggcacatacttgtgaggaaaagaaatgattttagtccttctcagcagtcaagagggttgttttgcatttttctgcagtcttgaagagaaaaaatcacccaaggcattggacacacagtttgaacacataattgggcttggacttcattccattcactaattggtctaacttactaatttaagttggtatcaaatttctttgtaaaattattctggataatgaaagactccttaaagaacatcttgtatttcaatgttagaaagttataagtagattcacttttttgtccattttcaagttatagtttttacatttatttttctgacttacatgataggactttttttctcccaacaaacattagtcgctgttaattatttttcaattaacttgcctgcccctaaatgtggtagcatggcatacagcatgttctgcttctgaggtcttgatattgaattggtttgtaagaatacctcagagatagattactgccgcttggtcattcattcagaaagcatttattgagggcccattctgtcctgggcaatctcaccacagtcctgtattacagaaagacttgtaaataggtaaagtatggttggtggctgaatagagatgtgggagttgaaatattttagaggaattactcttcttgttcatctttctgtaagtggtccaggtcagagtactgttgtgtaatatttatttaatactatcaacatattagtaccatgtaatagatcarattttatgaccttaatggactctagtgtatcattttaccttttatttattatttattagatcttgctatgttgcccaggctgatcttgaactcctggcctcaagccatcctcccacctcagcttcctgagtagctgggagaagaggcatgagccactgtgcctgaccgttttaccttttaaatgactttagctattractracttgggtttaaatttcagttatttttctttggtttctttttctttgaagggttctgaatgcttagccttcactaatgttctttcatatagtagttttcaaacttttgaggttgtttaaccttattgcagtttgtgtgtatgtatgtgtgtgtacacacacgcatgcctgagctgttgatatggtgttacagcaccatagtgatgttttcctggtggctcttttgaagactgttctacaagatagggtttatagagaaagatgggtattcacttagctattagaaactaaatagtcatggtagatacatgttttgtcatttagtctaattgaacggttccatatgattttatgagtttttgttatcttgaatagttgagcaatttgcatcatgtttttcagagcgaaggcatttatttcagtgcagcttgttactgttgagatgccaatagttaacatctgttaattgattttctatatattgtactttttggccagagattagataatttattaatatacaacatattttctgtaatgtccccttgcttttatccagagacccagagcatgttattttaacccctctcttgtccgctttgggaagttcaaattcaaggtacccccggtatatatggtaaacctattaggaacagaaaacagttaaaacttcccaagtgtgatctagtttttcatgtcttggtaaagaagaaatcccrggtgggctgtgcaaacagttcatagaaaggggttaaaaaagatatttaaaaagttttaggctggcattacctgaattggggcaatgattagggagacatgattagaattctaagggggagtgagaatgtaaaggggagcaccatctgtaattaaattgttttaaattgtggaataattttaaatttataaaaaagttgcaaagatagtacagagtattcctgtatacctttcaccggtgtctcctaatgttaacttcttacataaccatggcacatactgtcacatctaagaaattaacattggtacaatactattactaaactatagactttatttggatttcacaagtttctccactaatttcctttttctatacccaaactgaatctagaataccacattccagttagatcatgtgtaatttctttttttttttttttttctgaggcgaaggtctcactctgtcgcccaggctggagtgcagtggcgccatctcggctcactgcaagctccgcctcccgggttcacgccattctcccgcctcagcctcccaagtagctgggactataggcgcccgccaccatacccgtctaattttttttttttttttgagacgaatctcactctgtcgcccaggctggagtgcagtggcgcgatctcggctcactgcaagctccgcctcctgggttcacacctttctcctgcctcagcctcccaagtagctgggactacaggcgcccaccaccacacccagctaattttttgtatttttagtagagacggggtttcacatgttagccaggaaggtctcgatctcctgaccttgtgacccacctgcctgggcctcccaaagtgctgggattacaggtgtgagccactgtgcccggccattttttgtatttttagtagagatgggatttcaccattttagccagggtggtctcgatctcctgacctcgtaatccgcccacctyggcctcccaaagtgctgggattaccggtgtgatccactgtgcccggcctcttttttttttaaaatggagtttcgctcttgtcacccaggctggagtgcaatggcaccattttggctcactgccacttctgcctcctgggttcaaactattctccggcctcagcctcccgagtagctgggattacaggcgcctgccaccacgcctggctaatttttgtatttttagtagagatgggatttcaccatgttggccaggctggtctcgaaattctgacctcaggtgatctgcccgcctcggcctcccaaagtgctgggattataggcatgagtcactgtgcccgaccagatcgtgtataattttgataaataagttggtatttccagtgagtgctttttctgtgctatgtatgtggtccaagaatcccctctgacgagtgttgaagagagtcattgaccctgagaataagtaatacttcataggtagtgttttgtattccttgacccccaaagcattgttaactctatggaagagttgactttgcttccaggagggtgatgtgaactttcctgagaagctaagagctgatcttgattaaggtatccatccataccctctatgctcacctcatagattttactacayggaagtataactacgtaattatttatttgtctgtcttctttactaagcttttatgtttctaaagtgttgagaatattttactcattctggaatctttagggtccaacatattgcttggcatgtggtcgcttcttaatatgcatttgaagaaattaatagacctttctttggtaaaactgattattaggtcaacagaaattttgttttgaataggtaagtgttgagtttctccttcaaatccagctatcttagggtgccatttctgtggctagttgagtttttcttcttggaatcttaactacaaaatgctcatttaattaacattgtttttcctttcaattatataaataatttattttccttaaaaataagcacagaattgaaagtaatggatggtagtagaggcagagttagcttttaagtatacgtgtgaccattccagttccacccgactgggctgcagatctggctgtgtgcctgccacttcaggygcagttaatggaataatagcttcctagacttattgagggagacggcttgtcaggttcaaagaattacttttaaaatcttcctgttatagccaagattcagtggtccaaagtcacctaagcataaaagctgccatgagatgggaacatgggggcctgtcctctgtggctcaggcatagcagagtcagttttgtatatagaaaacacatcaagataggagggaagaggaaactgaagctagtattttctagatttagggttaagaatgggacagtgacatggatgagccagttttctcttttgtttttctccccatgaggttacaaaatgagcaatggtaaattctcacttcttgttttccctgttatactcaacattagctttgaatccctttttcctgctttctctaaactgtgctgagaatgaatggcaaacaactccagggacagctgaatctaagctatgcctttgtgtatactatacaaaaagaaatacgggtctgaagaactctggcttgttttagagagaatggtgcaatagagagaatccaaactgaattaagaaatgcagaattacttttgtcttggttagcttaacctttataagcctaaattttaatttaaccagtgagtgattataggacaacattttccagtctcatcacaggttagagtgactcagtaaggtgggcatgatcttataaaagactctcgttaaagccagaagggtaactagtttattgtccctggcttaacttcaaggtgcatgttctgggttgtggaatttagttgttgttttaagaaccagtatcaggggtgcagaggtcttatgtggatttggagagaagtgagggactaaaaccttggctaaacttaagcattccatttactagattgaagagaggaaaaatctgttaaaatattaaaatctttccaaattcagaaatagactataactggggccaggcatggtggctcacgcctgtaatcccagcacttagggaggctgaggtgggcgaatcacctgaggtcgggagttcgagaccagcctgaccaacatggagaaaccccgtctctactaaaaatacaaaattagctgggcgtggtgacgcatgcctataatcccagctacttgggaggccgaggcaggagaatcgcttgaacctggaaggtggaggttgcggtgagccgagatggtgccattgcactccagcctgggcaacaagagcgaaactccgtctcaaaaaaaaaaaaacaacagaagactgtaacttaaatagtgcatggtaatgtgcrgcattgaatttgaaagaaacaaagggaataaaacttaatgactatgagataaatggaatgcaggagttttaaaaagttcttgttaaaaaatttgacgagaggattttctcttgtgaaacgtttagataaccctctagaaaaaaaccaggagaaaatctttgtgaccttgagctaggcagagttttaaaaaatagaacacaaaaaccacaaactatgaagaaaaaatttatgttggctttcatcaaagttagaaacttgtactctttaaaaagtgtattttctgttaagaaaatgaagaggcaagccacagaaaatatttgcaaaatgtttatctaataaaggacttatatttatgtgaaaggaaaataagtcttggggcccccaaatcactaagctaaagggaaaagtaaagctgggaactgcttagggcaaatctgtgtctcattctgttcagagtcatcccctgcctaccgagatagatgcatatctgattgccttctttggaagggctaatcagaaactcaaaataatgcaaccatttttctcacctggaagcccccctccctactccaagttgtcccgcctttctggactgagccagtatacatcttgattgatgtctcaagtctccctaaaatgtataaaagcaagctgtgccccaaccaccttgggcacatgtcgtcaggacctcatgaggccgtgtcctgggcgtgtgtcttcaaccttggcaaaataaactttctaaattaactgagacctgtctcagatattcggggttcacatttagaatgtataaagaactcttacaactcaatagtaagaagacaaacagctcgatttttaaaaaagaaaagatttgaatagatacttcaaagaaactaatacaaataaccaataaacacatgaaaaaaatactcaatattgttagtccttagggaaatgcaaattaaaatcacagtgagataccacttcacacctattagaatgggtaacattaagacagtaccaagtgttggtggatatagagcaacctgcctcttgtgcattgctggtggaaatgcaaagtggtccagccgctttggtaaacggtttggcagtttcttgtaagttaagtagatacttaccatatgacccagcaatcccattcttagatatttacccaagagaaatgaaatcatgtgcctacacagacttgtagcttaatgttcatagcagctttatctatgataccaccaaactggatgtaacccaaatgtccttcatctggtgaatggataaacagattgcagtatgtccatttaatggagtactactctgcaggaaaaaggagtgaactaccgaaatgtgtaacaacatgtatgaatctaagaaccattatgctaagtgaaaaaatgctacacacgaaggactacattttgcrtgtgatacaaatgtatttctatgtaccttttgaatgtattcacctggatatcctgtagacactccaaacttaacatgtttaattctctactcattatcttttgatatggtttggctgtgtccccacccaaatctcaccttgaattttagctcccataattcccattgttgtgggagggatccagtgggagataattgaatcatggggtggtttccctcatactgttctcatggtagtgaataagtctcacaatatctgttgattttataagggatttcccctttcgcttggctctcattgtctcttgcctgctgccacgtaagacatgccttttgccttctgacatggttgtgaggcctcccagccatgtggaactgtgagtccattcaaccttttttctttagaagttacccagtctctagtatgtctttatcagcagtgtgaaaatggactaatagagtaaattggtactgggagtgaggcggtgctgtaaagatacctgaaaatatggaagtaactttggaactgggtaacaggcagaggttagaacagtttggagggctcagaggaagacaggaaaatgtgggaaagtttgaaacttcctggagacttgttgaatgactttgaacaaaatggtgatgatatggacattgaaatccaggctgaggtggtctcagatggagatgaggaatttgttgggaactggagcaaaggtcactcttgttatgctttagcaaggagactggaatcattttgctcctgccctagaaatctgtggaactttgaatttgagagagatgatctgaaattggaacttacatttaaaagggaagcagagcataaaagtttggaaaatttgcagcctgacagtggcgatagaaaagaaaaacccattttttgaggagaaattcaaactggctacagaaatttgcataaataaagaggagccaaatcaccaagacaatggggaaaatgtctccagggcatgtcagaggttttcatagcagccactcccatcacagacctggaggcctaggaggaaaaaatggttttgaaggcagggcccaggtcccccctgctgtgtgcagtgtagggacttggtgccctgtgccccagttgctccagctgtggctgaaaggagccaaggtacagcttgggccatcgcttcagaaggtgcaagccccaagccttggcagcttacacgtgatgttgagcctgtgggtgcacagaagtcaagaactgaggtttgagaacctctgcctggatttcagaggatgtatggaaactcctgaatgttcaggcagaagtctgctatggggtggggccctcatggagaacctctgctagggyaatgttggrgggaaatgtggggttgaagctcccacacagagtccccactggggcactgtctagtggagctgtgagaagagggccaccgtcctccagaccccagagtggtagattcactgacagtttgtaccatgtgcctggaaaagcctcaggcactcagtgctagcccacgaaagcagctggggaggaggctgtaccctgcaaagccacagggatggagctgccccagaccatgggaacccacctcttgygtcagcgtgacctggatgtgagacatggagtcaaaggagatcattttggagctttgagatttgactgccctgctggattttggacttgcatgggccctgcagcccctttgttttggccaatttctcccatttggaacaggtatatttacccattgcctgtactcccattgtatctagaaagtaactaacttgattttgattttacagggtcataggcagaagggacttgccttgtctcagatgatactttggattgtgaactttgagttaagactttggaggactgttgggaaggcatgattggttttgaaatgtaaggacatgagatttgggaggggccggggtggaatgatatggtttggctgtgtccccatccaaatctcatcttgaattatagttcccataattctcatgtgttatgggagggatccagtgggagataattgaatcacggaggcagtttcccacatactgttcttgtggtagtgaataagtctcacaagatctgatgattttataagggatttctcttttcgcttggctctcattctctcttgcctgctgccatgtaagacatgcctttcaccttccaccgtgatttgtgaggcctccccagccacatggtactgtgagtccattaaacctctttttctttgtaaattaaccagtctctgatacgtctttaacagcagcatgaaattggactaatatatcttttttttcatgtttgctttgcctccttaattctccttcatttatccaggctcccaaccatagaaaatttgcctttttccttggcttcttcctcttgtttattcatttgacctcacagatcattgatcctgttgcttctgagagcataaagcaggagagcaacccatccagggttggctcccaacttgcaccctaagccctggccaccctcaaccaatgtgactaatgagggtctatgttggaccctgtctatattgtggccagtgtatagctactccattggaccagtagccccttatcttgtgctcattaatgggtctgtcccccttcagagtctttcacattgtccccagagttacttcatttaaaatgtgtgatcctttttctctctcggttaaaaaacatctttttgttgttgttgttgcttaaagtctaaaatgaagtcatattcctttaacattcctttttgttttgttttgttttgttttgagagggactctcgctctgtcgcccagactggagtgcagtagcatgatctcagcttactgcaacctctgcctcctgggttcaagcaattctcctgcctcagcttccccagtagctgggaatacaggcgtgtgccaccatgcccggctaattttttttgtatatttagtagagacagggtttcaccatgttagccagaatggtctcgatctcctgaactcgtgatccacctgccttggcctcccaaaatgctggaattacaggtgtgagccactgcgcccggctaaaatttcaaattaaatatttctgagcttaattcttcctatcccaagaataatatctttttccccccttctggaagttctttttgatacatcagtattgccagttaagagtagagaaagaatataaactctggaatcacattgcttgactccttcacttataaactagatggctataggcaagtyattttagctttctgtgcttctgtttcctaatctataaaatatggataaagtatgctttcctcatatggttgatgtgagagttaaatgagataatatagatgtagcactttatacaatgcctggcacatagtaagttctcaataaaggttgattcttgttatcatcatccttcagagaacactggaaaatccattattttggattgttgctgtagttttttccacatggaatctctctggaaaaccagtgagtccttcaggtagattgaagccatcttcctcacttgctgtgggttgggctattgtggcctggcacaaaccaccctcataacctggcaacccagcagcctggtctgtgcatacagccttgtcccccaaggcactccatatcacctgggtgtaaagtttcagtctcaagcaattctccttgtccttattctccaagtcttgctccccaagagcagcggattcgtttcttttctcagtgcatctccattttacatatgaggcaactgaagagaartttacagcaagtcctcacttgatgttgataggttcttggaaacttctccttcaaacaaaatgatgtatattgataaccagttttaccataggctaattgatataaacaagaattaagttcctatggcatatttctggtcacaaaaatatcaccaaactattttaaataaagaccagaacataatatacatattaaaataaatgagagcagtatgtataagaaagattgataaaaacaagttagataattataacatttacccaattattccagtccacggttgagggtggccagggcttagggtgcaagttgggaaccagcgctggatgggacgccattctattgcagggctctctcgcttgtgtgctgtctctctctctctctcttgctcttgctctctctctctctctcacacacacacacacacacacacacacacmcccctcactgtcacttagactgggacactttagacatgccagttaactttgaagtgcacatctttgggatgtgggaggaaatccaagtatccagagaaaacccacacagagaatgtgtgaactccacacattggtgcctgccaggagtccatttttttactcctcaaaatcataagaaaacagtgttgaatgaaactgatgtcgtttgaggacctgctgtaacttgtytaagatcattcagtagtaagattcatgctcttaaccactacatggtagtcatcctagtttagccccaggtggtctttctaaacaccttggttttttttggagacagagtcttgctcttcacacggtctgaagtgtagtggagcagtcagggctccctgcagcctcaccctcctgggctcaaatgatcctcccacctcagcctcctgagtagctgggaccataggtgcataccaccacacccagctttttttttttttttttttagagatgggatctcactatgttacccagattggtcttgaactcctgggcgcaagccatcctcccacytcagcctcccaaagtgctgggattacaggtatgaaccaccatgctcagcctgcttactcattcttaagtaatcagctctgttgtctctgcttttccacttgcacatacagttacttctccttcctctgccctccatactttgcttattcctcttttatggcacttgcaacattgcattgtccttctcccatggcggaccaagttcattgaggttaagaaagcaccctgtcttatttatccttgtgactttagcttttatcacgtagcccagtatatagcaaatgctcaagaaatgtgaaatgaatgaagaatgaacgatgaagaggaacctatagatgttggtagtctgtgaattatcgagtgaattagactgtaaccccatttcatgcctcccagatttgggcatcagggcaggcaagaatgttctagaagccagaagataaatgacacgtgttcctgcagcaaaagattttaggcaaagagaaaataaatatagatatctaggatggggaaacatagcagaaaaataatatcatttaaaatgtgagtatatggtatgagtaaggtaatgcacagtagatcagaagttgagtgagggttttggctcaagtacctctagtggtaaaggatatgttaactccttggtgccgggagcagaggcccaagcagcctttctgcttcaagttcagaatatctatgaatatattcaacatatccatgttttatctttagaaattcatgcaaatattacattctgttttattatctatgagtttgatttaacatgaaatttttttttctccccagtcactcatcctctagtgaaacagatgctgtaggaacatgggtcatttatcctctggcttctagcacattctagcatgccccagtgtccaaatctgggagttatagaatgaggtacagtctaatacggcagcacagtagatttctgtgatttgggggattgcctgctcaagagtagtatgtcatggaactgaggagagtgagttcatcctgctgactaatgaggctgtccctggaaggctgcagtcatttggaggcacctcattaccagatcgttggggatcagctggagagagttcacagaagacccacaggaatgattaagagactggagaggctgactgatgaagaaagtataaatgaaaaccatgtaacttggctaaaccacaatagcagaaatagacaactgtataaatatctcaagagtataaacttgatggaggagggcaatcttttatggtgggattttgggttggggagtataaactaagagtggaattaagccatagtaaatgtaaactgataatccaaagtgtctgatatattcttrgaacctccttagttagaccaccctaacctgtgcactttttgaaaattgaatagtttgtttttttaagttcatgtccctggactcatggctggtgcttctctgtggagaatgctggagattgcatcttacaaaacaaacgtctttcttttgtcttgtcatttggtggacatcagtaggtgatatcagaacttctgtttgctgccactagctctgtatgcaccaaaattttgaaatggacttttacatcatgtttttcatggctgtgtgtgtgtgtgtgtgtgtatgtgtgacaggatctctctctctgttacccaggctagagtacagtggtgtggtgtgatcacagctcactgtagcctcaaacttctgggcttaggagatcctcctgccttagcttctgagtagctaggacaacaggggcatgctaccacgcccagctaatttattttattttattattttattttattttttgagacgaagtcttgctttgtcacccaggatggagtgcagtggcgcaatcttggctcactacaacttaagcctcccaagttcaagtgattctcctgcctcagtctcctgagtagctgggattacaggtgtgtgccaccatgcgtggctaattttcgtattttagtagtgatggggttttgccatgttggccaggcttttctcaaacccctgacctcaggtgatctgcccactttggcctcccaaagtgctgggattacaggcgtgagccaccatacctgaccaatttatttttatttttttagagagggcccagtctggtttcaactcctaggctcaagtgatcttcccagttcagcctcctaaagtgttgggaatacaggtgtgcactactgcacctggcctttcacagctttttagaatagcactttagaagtagagactgagttagtagtatgtgttatagtaattttagcaacccggatacagtatttggtccccgagatactagttttaggaaatattagccttgatcaaatgcaagcatgattgtatgaaatacatactttggaaaatgactgtaaaattcctaattggggtatgggaagaataaagccatcaagtcatagttgaaactagatgtgtttgcataacattgcaagttttgtaattcttttcctaagaagagatggtagaactggaagaaaatgatttgtatgctttctttgatttagaaaaatgtatttgtttatataaggtagttgtgtagctttaagactaagacctctacacctggaattggtatactttttcaataaagcatcagatagtaaagttttgtgggccatatgtctctgctgcaactactcagctctgccattgtgcaaaagcagccacagataatatgtaaatgaatgaacttggctgttttcacaaaaacaggcggctgttaggatttggcttgctgactcttaacttggattctcacttctgaaagcatggtctaggagaccagcagcatcagcattacctgtgaacctgttagagatacagaatgttgagccccttctcatactgattgctctagagtctaaaccatgtttctcaaacttcagcatacataggactcacctggggatcttgtgaaagtacagactctgagatagcagggctgaacaccatactagccttggggaggcaatgttatgacctggtcagtgttccttggggagtccgcaatctattaggagagactgctatataaacaaataatttcaatacagactagtaaatgctataacggaggtatcttcagcagaggagcaccacaaaggaggaagtggctgattctatctggtgtgggaagagtcctcagagaggccttggagcaggaccagagaagggggagtgcttgagttgagttttgaagctcagtagaggtactgaagcattgcggtgagcatggtagctcacggtagggatagtaaagcttatattacaactaggagttatttgatttaataatcaaatagctgatcacagggttggaaacctgctaacatcatagtgaatagaaataaaagttcaggctgggtgtggtggctcattcctgtaatcctggcactttgggaagctgaggcgggcgaattacctgtggtcaggagttcaagaccagcctggccaacgtggtgaaaccctgcctctaccaaaaatacaaaaactagctgggcatagtagtacgcacctgtagtcccagccactagggaggctgaggcaagagaatcgcttgaacccaggaggtggaggttgtagtgaggcagtgagccaagatcatgccagtgcactccagcctgggcaacagaacaagactctatctcaaaaaaaaaaaaaaaaagaaggaaagaaaagttcagtataatctgttatcttaatttctttataccattttctttctttctttttttttttttttttttccgagacagagtctcactctatcgcccaggctggagtgcagtggcgcaatcttggctcacggcaaactccgcctcccgggttcacaccattctcctgcctcagcgtcccaagtagctaggactacaggcacccgccaccgtgcctggctaattttttgtatttttagtagagacgggatttcaccgtgttagccaggatggtcttgatctcctgacctcatgatccgcccgcttcagcctcccaaagtgctgggattacaggcgtgagccaccgtgcccagcctctttataccattttcttatttgaaaaaaggataacttgcccattctctcccttatttaaggaaaatcagtccccaccaaaaatgtgttctccagaaatagaaactttttacatgtccttgcaacattaagaatttgaaaaacactaaaaggtacaggtagaaaataaaaattatttataattccgtataccaagagatgatcactattaatatttttatattttcctttcagtcttctttatgtaatgttatgtttctaaatttggacttgtgctacataaacagttttgttcctacttttttatttaacattttatttgtaagcatttccctatgttgtttattccttaaaagtgtcatttaaaaattccttatatagtattctacatagtgctctcttatagcttacgtatatagtctgttgtttgtggatcctttaagctggttccagtagccagttgacccaggttttggctcttgtacttggcaagtctgttggcattatttatttatttatttatttatttattttgagactgggtctggctctgttgcccagggtggagtgcagtggcatgatctcggctcacgtcaacgtctgcctcctgggctcaagccaacccccacctcagcctccaagtaactgggaccacaggcgcctgccgccatgtctgggtaatttttgtattttttgtagagacggggttttgttatgtcgcccaggctggtcttgaactcctgggctcaagtgatccgcctgccttggcctcccaaagtgctgggattacaggcgtgaactactgtgcccggtcatgttgctgtattttaaactaaatacatatacttatttatttttaatgataaaagtttgccaacttaatttcatttactggtcttcactcattctgttcttttagcattttgtgctttcttccttggtttcccatagtggagaggcagtagagtagtcattaaaagcagggattctgggtccaggttgtctgagtttgactcagctctattactcactgtgtgttttcttggaaaagtactttaacctttctgtgtcccagtttcctcatctgtaaaatagggataattgtatctgtgttaaaatagggataattgtatctgtgagtttatgtgtatgaagcactgagaacagttcctgccatatggtaagactgtctcttcatttactaattagtagtctcttctcatttgtcttatggtggctgtttgtgtatgcattgccataaaccccctttctgctacatttttggttcatgaatatcttcgagagttataaactgactttactggactttatttagtgactttattttgaaagttcacagattttcccctgactcgtagtagcagattttactgttttaaatataaaatcaactttatttaagcatgtcttggaaatgcatatgtgggcacgaagggagcagactgcataggctgatagattgggctttaaagctctttggaagtttctcctttccagctgaatattgtctcaattccttaccatggcatataaggctgtccgtaacctggttctggctgtgcgttcatctcacttgtctttgtggttgctccagaccctgtgctgcaaccccattatattcaaactgggtatgtggttgtgctgaaggttactctttaagtctgtggcctagtttgcttctactgaagaatggactcacacctgtaatcccagcactttgggaggccaaggcaggaggatttcttgagcttaggagttcaagactagcctgagcaacatggcaaaaccccgtctctacaaaaaacacaaataaaaaattagccaggtgtggtagtgcacgcctgtagtcccagctacttgggaggctgaggcgggaggatcgcttgagcccaggaggtcaaggctgcagtgagctgtaatcatgccactgcactccaacctgggtgatggagaaagaccctgtctcaaaaacaaaaacaaaaacaaaaaaactgtgtctaattctgaagctcaatgctcttaacctctatgctgaatcatgaaaaagaataatgtcataaggatagggaagtatttggggacagtgaactgaaggaagctctggcacttctcagccggagacatagttatagacagtgaggctgccagttgacttttcttatggagttggagagaggcctcaaggaaactgtgtggagttttaattgagaatgcttggtcagagtttaccaatttttggttatttttagtgtcccagggtttccactgcctgttctaccttctctttgatttttttctggggaatccttttcagaaataaaaacctattccaactaaccctgttttcttttttggacaggatcctggggcgtcctttggcagtygattgcaccctgcactagagagaagtccaggaatgatatattcttgggctgtatttctctaccctggagttcatccagttcatcccagaaacactgacctgattactgtgacaaagtctgatggatagaccctttctgttgaccttgtggcgtttttctttcatgtggaagttggaagacaaggtgaaaggggccaaaagttacctgctttggtgaataggagtgctctacttggttctcagaacatgggccctcgtttaaaggtaaggtaacagactgagttaagctttagttattgggatgtacaacatggatccagtgaccaattcctaagccttttcagcaagggatagctgttaaagtatacagttgcagtgagaattgactttgtccccagcagagcaattttaaatatgaagaaaccagttctccatttttgggaaatgactttttcacaactggttttcaatgttggggctaaaatttagttgctactgtaattaaaaatctttatactccgaaaaagcagaggattttagaatatgtatgttaatcaactttctaacagtcccttgagacagatattttgaagtatttttcccctttggtaggtaatgtgagccaaaatgctgtagtattaagcaaccagaccaggatccttcgtaagcaagtgatatttctgcactagagaattggcattgcattccacttttctttgacatgctttatttatatatcaaaagattaaaaaagagccataagagtttatctttctaattttagccttgctatgagattcctcacagtaagattggatagtgttttctcatactttgttttacctgttttcataaatctttttttccccaaatacttcactatccttatgactttattctttttcatgattcactgtagaggttaagagcattgagcttcggagttagacgtaggctttttttttttttttttttttttttaaatggagacagggtctttctctgtcaaccaggctggagtgcagtagcacaatcatggctyactgcagccttgacctcctaggctcaagcagtcttcccgcctcagcctcccaagtaactgggactgcaggcgtgcactatgacatcctaattttttctttgtattttttgtagagacagggttttgccatgttgctcaggctggtcccaagctcttgagctcaagtgatcctcctgccttggcttccaaagtgctgggattacaggtatgagccgccatgccctgctaggctttcccagcccggcttgaatctmaactctgtcacttaccccaatgtgagatgttcagcaaccttaagcccagcttaaaaaaaaaaaatccataaaacgagaataatagtattcatcttaccaagttgtcgtggtgacagttacttaggttaacatatgtaaagcactgaaggcagtgtttggcctgtgataagtgactcaataagtgggtagaaagctgttaatttactactgtcatatttttcttctagcttaaagtatcacaatatgccatatttataaaggtcaaggacactaaagagatgaacttgaaaacacacaaagtactcataacaatttgatgaaatagtacagtagagcctcacatacttgtttgtactgcaattagacttgggaaagttccaaaataatttcatacaggaaaattatgaatagcaaaaagtagagcatgctgtagaaactgctgtagaaaaataccatgcatgggaatctgcaaccccagtggtgggcatttgatacctgcttgttgaactgaattaaattggcaacttttaggttgaggaacttacaacgcctggctcaagtgaatatactgttagagaaatcctttcaaactctatctacaaggaagatcccatctggaaaattcctgatccttaggcattctggacaaagaaaaggacagacatttgatcttattcatatttattgaagttactatatgcaattatgttggtttctttggagctttttttttttttttttttttggagacagggtcttgctctgttgtgcagttggagtgcagtgcagtggtgccatcagggctcactgcagccttaacctcctgggctcaagggatccttctgcctcagatgccctccttgcctccagtagcttggatataggtgtgtgccagcacgcccagctaatttgttttcaagttttagtagaggtgaggtcccactatattgcccagactggtctcaaactcctgagctcaagtgatcttcccacctcagcctcccaaagtgttggggttacagacatgagccaccatgcccagcctggaggatttttaagactactcattaccactctaaaatgaaaaaacgagactaaaagaataaaagtgctaggccgggcatggtggctcacacctgtaatcccagcactttgggaggctgaggcaggyggatcacctcaggttgggagtttgagatcagcctgaccaacatggagaaaccccgtctctactaaaaatacaaaattagccaggcgtggtggtgcatgcctgtaatcccagctactcgggaggctgaggcaggagaatcgcttgaacccagaggtagaggttgcggtgagctgagatcacgccattgcactccagcctgggcaacaagagtgaaactccgtcccaaaaaaaaaaaaaaaaaaaaaaraaaagtgctataagataaataaaaacaatgttctatggagattcacatgagggaaggaatttctaaatttaatattagggaagattttggagagagtggataggatttttcctagacctcaggatcaggagattttccatgcatagagaataaaaggaaggaggatattctaggcagaggagatgagttttcaaaaggaatggagaggggacatttcagagctgtatgtaaaagtgtaaaggatctaatttggatagatcataggatgaataacaaggtattatagcaactggggccaaggagaatagcgtggggtaggggtagcagtagatacaggacagagagagcccccaacagggtcggaacatgcttacagaaaatgcttacagaacagaggtaagatctggaataaaagcgatttgagtgacaaaaatagggaggcctggctgggcgtggtggctcacgcttgtaatcccagcactttgggaagccaaggcaggtggttcacttgaggtcaggagttcaagagcagcctggctgacatggtgaaaccctgtctctactaaaaaaaaaaaaaaatacaaaaaattagcctggcgtggtggtgggcacctgtaatcccagctactcgggaggctgaggcaggagaattgcttgaacctgggaggtggaggttgcagagagccaagattatgccactgcactccatcctaggcaacagagcaagactctgtctcaaaaaaaataaaaataaaaataaaaataaaatagaagggcttttgagagaattcaggaggaaccagaaagggggaatttgtagaacgaaggcaaattcagaatgtgaccatgggtgaaactgggaggtcagtaaatactatgggggtggggagtggtttgagagctgttgtagagcagtgggacattttgtaaagttgatgtcagcgaatgatgaattgatagaactaactctctggtcatgaggaggtttcaagaagacagttgtttggggaaaaagtagtaattggtctgttgagttttaaatgatgaatagaggtggggcagaaatgtagaactgactcattggagaaggtttagctgatcttgaaaatcagtagtgatgatttgattgagaaataagtgacaggggaaaaatggccgaggactccacaaggtaaagctcattactgccagcttcatgataactggactgtggctctcatgttctaatttgtcctccctgtacctggcacattgagtaagtactcagggccgggcgtggtggctcacgcctgtaatcccagcactttgggaggctgaggcgggtggatcacgaggtcatgagatcgagaccatcctggctaacacagtgaaacctcgtctctaccaaaaatacaaaaaattagctgggcatggtggcaggcacctgtaatgccagctactcgggaggctgaggcaggagaatggcgcgaacccgggaggcagagctttcagtgagccgagatcacaccactgcactccagcctgggtgacagtgtgagactccgtcaaaaaaaaaaaaaaaaaaaaaaaaaagtaagtactcagtatttgttggacgaattattttaggatgagtttttaaccctttattgtaaaattttttaggcataaaattagaatagtataaagaactcccatgcagactgttcagggacagtaatagaagccatgccttttgaaattcagatgcatttctctttgaagaaagtgtgggccagtagagaggagtttcctatcagctttgaagtaaaggagtagtgatactggcgctactattgataataattgtaataatcattaaaactttgagaactcactgtgtgccaggcactactgtaggctgcttacatgtgttaactcatttaatcctcacagcaccccgtgaggtacatataaggaaactggcactcctttacaaagattaaatgacttgtccagggtcacattatgaatgatggggcatggatttgaagccaggtaatctaactctagagtctgcccccttatcctctatcttatgctatttgttatgctgtttggctagagctttgatggccatggggagttgcattgaagtcatatcatactaaaggagatgataccatagaaattattaaattgcaactctttttacagcaatgagattctgaagcctagataggtcacacagtttgcagtcctgggattgttctccaggcttttcaattactgcatgtcagctgtctctcacagaagggttgttgtagttgtcagagatagtaggtgggaatttttctagccctcatgactcaagccatacatttggyactgcttttattcctctaagaagaccacaaatctgtaacaccagccacatatacttcatttctttgctgagtgctgtaacttccctgaggaccagaaatttcacatctagggtcagatcgaatggcatccckctgaggaagtacctaaggcagttaaactgccagttttggtcccaccaagtcatctagtgcatcctgtaagatgcagacagatgctttttgagagatcgtagcagatttttgagatgatagctgttgggtccccagctaattcagcatagggtcccaagagatgagatacttgtttgggaaggaggttcagtagttgtgatcccaaattttggctctttatattgtctgtaatagacccttttgggagcaccttcatccacgtgacaattctaatgttcccagtgtggatttcttttctagtaggactttagataatcactctaagtaggatttgtatgaaacttttgacggtcattcctcaaattacctactctctgtgggttccactgggtatattgttatcagaggaactaagcaagcacaatcagatgtaaaaacacaccctgaaaaaaagttgttttggtccctcccagatctgagcctagaaatttttagctgtcttgtctctacgtaatattctagtgctgataaaaggtgttgggtcaagataacattgacagccttagtgtacgctgacttgaaaagaaagagtgcattcatgcattgtaaaatagcatatacagcctgtgctaaggtcagactcagtgataagatatgaacgttagcatacattgcatttttccttggcagtacttttattggttcacatgatcaaatgagtaattaagattgaagtcttattctggaaacaagtttaacaacagtgaaagtcttccctcagactcctaccttgacaggcatgactgaggatgagaagtacagtctccttttgttcctctccttggtctttctgctgagctcatcttccagagggcccattagtttgtctgattggtaacagcataaatgacttcactttcagacccactgcttattattgggrtgacccagagttcattttaattacataatgccaacatgatgataatgatacttgctttaaaaaaaaaaaatctacattttatatagctatttctacttagctgaattactcccaaaaggcaaacataaggggaaagtgactccattaccctctttgcatgtgttaattagcaccactttgcatgagggagggaaactgtcttgggaactatggatctaagaagatgaaagccatgttactgcattttgaaattagcaataaagcaagtggctgtttgtggtattcctagagtggtcagtagattggaagtctttaaggggaatgatgcagtctctttgtttctctgaaatatattatacggcacctgtcaagctagaaagaggataggaatagtaaggctctggactagagagagttgtttggctcacgccatacactcttctttgtcttactctgagatagctatgaggcagagttggagacaaaaactaaacaagttttcttttaacagctgcagctgtgatcctyggctgtctgttggcattgacgggacctgatgttttacgttattggtacgttatggaaagagctctctctattatatttttgtaaaggttgcttgggtcctttttgcctttctgcctattcttttccctttgaaaatggagctgaaaatatttctagtcgtgccagaatgtaccttcacagagttggcattggaattcattcatttgggtttattgagcaattatagtcaatgccagacactgtttactgtggagtctaaagttgaataagacaaaaatmtgccttcaaggagtaggcattcataacataaaggggaacggtcaaggaggagaaaagttataccagatgaatgtgtaggagtttgaaggagcccagaaaagggaactgctaactctggtggggattggagaagacttttgccaagtacacaagggaggggagggctcccaaataatgcattctttaagaaggaaatggtgggaaccaaaggcacatccttttgactgcttctgtggggtgcccagcaagtgcaggaaggtagggagcagggcggacattatatgcagctcatatagagcaagagtttgcaaactttttctataaaaggccagagagtaaatatttttggttccgaaggctcatttcaatgactcaactctgccagtgtagtgcaaaagtagccatagacaatttataaatgatgggtgtggctgtatcccaatggaactttatttaccaaaataggcagtgggtgggctttggcctgaggactgtagttactgacccctggtgtagaagttcctttcttatctacagaggtagtgcccagtgcagtgtttctttggcagtcttacagtctcatcctgacctcctttaatttttgagaaatggctggcctgttgcataatgaaaagctgtaatgtgtaactggcaggcggtttgtgtgttctctcttttgcataggtggaatcacagtgtctgtggttgcattcttcttcacaattaagttcctctttgagcttgccgcacgtgtagtcagcttcctccagaatgaggaccgcgagcgccgaggggaccggactatttatgactacgtgcggggaaattacctggatccccggtcttgcaaagtctcctgggattggaaggacccctatgaggtgggccacagcatggccttccgagtgcatgtaagggaatgtttctgtctccatacccattggggtttctgagtaacttgctttccagagcccaggtgctggcctggaatgttaacattttctcttgtttttcaactccttccaggaactagtgaattgctactatctgaagagtcacaaatttctctgtcattttgatttaataggtccttagctttgaagaagtataaagcttaatgttaccttttcaaaataagaaaaatattacagaaaagagtaagtattatagataggggttagcaaatcaggcccaccttctgtttctttaaatacatttgtcttggaacacagccacacccattcatcatgtattgactatggctgttttcacacctgagtagttatgacagttgagtagttgtgtacggtccacaaagccaaaatatttactctctggcactttacagaaaaaatttcccaactcctgcattgacttctccactgtagcattaagcttggcttgagagtctgaacccctcctacctttgtctggtaacgctttagttcactcattgccagtgctgccggctaacttacctttaaatttgggttagcattgataatataaagggctggtaagaccaaggaggcagcattggtggttcagaagtggcaagttaaaatggacattttcttgatttagtggtaaattctacccttgtcctctgaacaagttaagaatttgctcatgacttaatggttttctttagagtattgaggggatttgtttctctctgtgtttttgtgagcaggactgtgaggaacagggtaggtactgggatttactggtgtggtctctgccagctacttcctctctccccactcactctacacaggaaatgtttttttcctctgcttgctaacaggtgtccttcttctccccatggcagttattctataagaacgggcagcctttccctgcacatcggcctgtgggactaagagttcacatctctcatgtcgagctagcagtggaaattccagtgacccaggaagtccttcaggagcccaattccaacgtagtaaaagtggccttcactgtgcgcaaggctgggcgttatgaaatcacagtgaagcttggtggattaaatgtggcatatagtccctactacaaaatttttcaacctggtaggttcttttttcctttctttttccctttgtctccttccctctctctctttccatcctgtctttcctttttaaaaataatacctttattgagatttaattcccatgccataaaattcatccttttaaagtatacagtttaatggttctttaaatgcagccatcatcacagtcgattttagagcattttcatcacctcaaaaagaaaccccatacatgttagtagtcacttttcccccaaatcccccagacctaggcagccactcatctgctgcctctgtggatttgcctgctgtgtttggctgcttttgtcttgctgtaaagaaatacctgagactgggtaatttataaagaaaagaggtttatttggctcatggttctgcaagttgtacaaaaagcatagcaccagcatctgcttctggtgaggcctcgcgaagcttccactcatggtggaaggcgaagcgggagcaggagtgcctaatggtgagagagggagcaagagagagagagagggaggaggtgctgggcttttctaaacaaacagatcttgcatgaactcagaacaagagcttattcattaccatgaggaggggaccaagccattcatgagggatcctcccctatgaccccatcacctcccaccaggccccacctccaacactgggaatcacatttcaacatgcgatttggagggtacaaatatctaaaccagattcagtcatgctgtagcgtgaatctgtacttcatttctttttattgacaaataatattctattttatgtacatgccgtattttatttatcctttcatcagttggtggtcgaattgtttctacttttgggtactgtaagcaacactactgtgaacatttgtgtacaagtttttgtgttgacatgtttttattactctgggagtaaaattgctgagtcattagtttggttagttcttaagggctaagggctgtggtatccacagaaataataggacctggggtccctgggtaacttttgaagtgaaaccgtactgagtggggccttaagatttgtgtatctttgcttgactagtccttaattttctttctctgatagcagagtaaggctctggacaaagtggctctcaagccgtctctctttccatgtatcctctcctttgcttaagtgcctcactcagatactccttttcatatgaattatcatcacccacctctttgccaccagtggagaacagctcatacccttacatgtaccagcctttttaaaaaaattaaactttttattttttgataattgtatattcatatgcatttgtaagaaataatgcagagatctggtgtacccttttcccagtttcctgcaatggtaacattttccaaaactactagtacagtataacagccaggttattgacattgatacagtcaaggtacagaacatttccatcatcacaaggatcccttatgttgcccttttacagccacacctatcccccccaacctgtttctttctttttttttttttctttttttttttgatggcgtctcgccctgtcgccaggctggagtgtagtggtgccatcttggctcactgcaacctccaactccctggttcagtggattctcctgcctcacgctgagtagctgggattacaggcacgtgccaccacgcccagctaatttttgtatttttagtagagacaagatttcaccatgttggccaggatggtctcgatctcctgacctcatgatccgctcgcctcagcctcccaaagtgctgggattacaggcatgagccaccgtacctgccccccatccccaacctgttcttaacccctggcaacccacgaatctattccccatttctataattttgtcatttgaagaatattatataactagaatcatatagtatataacctgttggggttgacttttcctcactcagcataattttctggagattcatccaggttactgagtgtatcagtagttggttcctttttactgctgagtagtacaggttgagtattcttcatccaaaatgcttgggaccagatgtgtggttttgtggtttttttctctccaaacgtggtataggaatgttttgttgtttttgagacagggccttgctctgtcacctaggctggaatgcagtggcaggatcatggctcactgtagccttgacctgttgggcccaagcaatccttccacctcagcctcccaagtagctgggactacaagtgtgcaccaccacgctcggttaattttttgattttttgttttgtagagacagtctcattatgttaaccaagctggtttctaactcctggcctcaagcaatcctcctgccttggcctcccaaggtgctgggattacaggcatgagccactatgtctgcctagaagtgtcttggattttggatttttgggggttttggaatattggcaatatacttacttaccacttcagcaccctaggccaaaaatctgaaaccctaaatgcttcagtgagcatttcctttgagtatcatgtaggtacccaaaatgttttggattttggagcattttggatttctggtttttggattagggattctctacgtatattctgtggtctgaatgtaccagtttgtttaactattcatctgttaaaggtcatctgggttgtttccatttgggggctatgatgaataaagctgctataaatattcacttacaggtttttatgtgaacataaattttcatttctctagtatgcagttgctgagatgtattggagttgtatgcttagtttcttttaaattgccaaattcttttccagagtggctgtagcattttacattcccaccagcaatgtatgaataatccagtttcttcacatccttgctaacatttaatgctgtcattattttttattttagccattgtgataagtgtgtagtggtatctcattgtgcttttaatttgcatttcttaaatagttaatgctattgaacatcttttcatgtgcctgtctgtcatctatgtatcctttggtgaaatgtctcttcgtgtcttttgtccattttcttttcttttcttttctcttttcttttcttttctttctttctttttttcttttttttttagacatccttgctcttgcccaggctggtgtacagtggtgctaccttgactcactgcaaccaacctcctcttcccaggttctggcaattctcctgtgtcagcctcctgagtagctgggattacaggcaggcaccaccacgcctggctaatttttgtatattttgtagagacagagttttgccatgttggccaggcaggtctcgaaatcctgagctcaagtgatccacccccttggccccaaaaagtgctgggattacaggcgtgagccaccacacctggcccttttgcccattatctaatgggattattattatttatttatttatttattattattttcttttttttgagatggagtctcgttctgacgcccaagctggagtgcaatggcacaatctcagctcactgcgacctccgcctcccatgttcaagcaattctcctgcctcagcctcccaagtagctgggattacaggcatctgctatcatgcctggctagttttttgtgtttttagtagagatggggttttgccctgttagacaggctggtctcaaactcctgacctcgggtgatccatccaccttggcctcccaaagtgctaggattacaggcatgaaccaccgtgcccggcccattttggctttttactgttgacttttgagagttctgtatatattctatatgctagtcctttgttaaacatatggtctgcaaatattttctccccatctgtagcttttctttatttctttttggagacagggtatcactctgtcacccatgatggcgtgcagtagcatagtcatggctcactgcagccttgacctctcccggcttaggtgatctcccatctcagcctcccaagttgctgggactgtggcatgtgccaccacacctggctaatttttatattttttgtagagatggggctttgccatgttgctcaggctgagcttttcttcttattcccttaacagagttattcacagagcacatgttttcaattttgatgaaatccactttctgaggtgggagaatcacttgagcccaggagttcaagaccggcctgggcaacatagtgagacctcatctctacaaaaaatttataaattagctgggtgtggtggcgtgcacctttagtcccagctactggggagtagggtggagaagtgaggtggtaggataacaagcccaggaggttgaggctgcagtgagctgtgatcttgccactacactccagcctgggtgacaaagtgagaccctgtctcaaaaaagaaagaaagaaatccagtgcatccatttttttcttttatggtcaaactgttggtgtctaagaaatctttggtctcagatcctgaagatgttctctttttttcccaaaagtttttacagtttgaaaatgtgtatttagggtcatgatccatttttagttaattttaatagatttgggtcaaggtcctctttttttttttttttttttgcttatacatgtctttactccagcatcatttgttggaaaggtgatctttcattttctattacattgcttttgtacctttatcaaaaagcagttggacatatttgtgggggcttatttcattaatctgtgtacctatccctcctccagtaccacagaatcttgatttctgtagctccctcttcttttcttttttttttttgaggcagggtctcactctgtcacccaggctgagtgcagtggtgcgatcatgattcactgcagccttggcctcctgggttcaagtgatcctcctgcctcaacctcccgagtagctgggactacaggcgtgcaccaccgtgcttagctaattttttatcttttttgtaggaatagggtctcactatgttgcccagggtggtctcgaactcctggactcaagtaatcttcctgctttggccttccaaagtgttgggattacaggcgtgagccaagtcacacagcctgattactgtagctcttataataagtcttgaaattggtaagctgactccactttattcttctttttcaaaattgttttagtattctagttcctttgcctttccatttaaattttagaataatcttaactaaatctataaataatcttgctggaactttgataagaattgtgttaaacctatatatcaatttggggaaaattgacatctgtactatgttggatcttccataaacatgtctccatttgtttagttgtttgttggtttttttgttttatttcttccaagtttttttcattttgcttagggtttgcagtggttaagaatttgtaacaaaaataattccccaaattcatttaaatttctctatttctgttttttcctcttttttttttttttaataaagagacagggttagctgggcaccgtggcttacgcctgtaattccagcactttgggaggccgaggcgggcaaattacaaggtggggagtttgagaccagcctggccaatatggtgaaacgctgtctctactaaaaatacaaaaattagctgggtgtagtggcgggtgcctgtagtcccagctactcagctgaggcaggagaatcgcttgaacccgayaggcagaggttrcagtgagccgagatcgtgccactgcattccagcttgggtgacagagcgtgactctgtctcaaaaaaaaaaaaaaaaaaaaaaaggagagagacagggtctccctttgtcacacaggctagaatgcaatggtgtggtcatagctcactgtagcctttacctcctgggcaaaagtgatcctcttgccttagcttcctgagtagctgggacacaggcatgaaccaccatgcctggctaatttttattttttgtagagatggtcttgctatgttgctcaagctggtcttgaacttcttaagggatccttaagggattctctggccttggcctcccaaagtgctgggattacacgtgtgagccaccgcacctggcctctcttcctcttgatagtgttatttatccctaggaattgggaggaaacctagctttctaggacccactgagcagatctttgtgccctgaagagcacctttaaatgttagattccagccgggcgtggtggctcacgcctgtaatcccagcactttgggaggccaaggcgggcggatcaggaggtcaggagatcgagacyatcctggcyaacacrgtgaaacccmgtctccactaaaaatacaaaaaaaaattctctgggcatggtggcgggcacctatagtcccagctactcgggaggctgaggcaggagaatggcrtgagcccggaaggcagagcttgcagtgagccgagattgcgccactgcactccagcctgggcgaaagagcgagactccatctcaaaaaaaataaaaataaaaaaataaaataaataaatgttagattccattgtctttgttccaggaatggtggttccttctaagaccaaaattgtgtgccacttttctactcttgtattgacctgtgggcagccgcacacccttcaaatagtaccccgagatgagtatgataatcccaccaacaattccatgtccttgagagwtgagcacaattacaccttgtccattcatgaggtaagcagtctcccttctttatctgtgtgctagagagagctggctcctttctctgttattctcacacctaattcacttcgatctctctttccttctccttgacttctgtgctgtctgtatcttcatctgacaatacctgtctcattagtaattttgtgatttagattagatcatagataggaaagctctttgtaaggagtaaagtggcttgtaaatgggaaaatactatatgttaagtgatgctctgttgccttcctatagctcggccctcaagaagaagagagtactggtgtctcatttgagaaatcagtaacatccaacaggcagactttccaggtgttcttgcgactcaccctgcattctcgaggctgcttccatgcttgcatttcataccaaaatcagccaatcaataatggtgaatttgacattattgtcctaagtggtaagttaaaagaaaagtatgatttagtgctgttcttcagccgtttctttgcctgtttgcactcttttgtctgacctcacaaacatttgatatttgggccacatttggcttgtcctgtggactaaaagcctgtgataggtaatttttttcttctctgacttctactttaaaccttattccttattatacttcagaggatgagaagaatatcgtcgaacgcaatgtgtccacttcaggygtgagcatttactttgaggcttatctttataatgctaccaactgtagcagcactccatggcacctgccacccatgcacatgacctcttcccagcgccggccatccactgctgttgacgaggaagatgaagactcgccctctgagtgccacacccctgagaaggtgaagaaaccgaagaaggtgtactgctatgtgtcaccaaaggttggaccttccattctcgacataaaatccccctgcttgaacctgtgtgtaattgktatttggtagcagaaaccacaaagtaacagtctgagaatcagggcaagattgttaactagttgtatagaaagccactttcaactgttaaaaatttcttgctagcataaaaattactgttggcttcttgtgctgtgtcaaaacaatttgatcttttgttctgtgattcatgaaaccacagtaaatggatgtcactattaggctacaggattggagtaaagaaattttggcagaggaaagaaggtgaatttcccaagcccctgagctaagaagcactttgtgttagtttctttttaatatttgtttttccttattcattcagtcctcataaaaatgagactctgtgaaacatcccattgcatctctttaatctcataaccaaaactgagttctaattctgttctacttcagaacactttgctgtgtaccattcttcatttaaaaatctagccttaatttggactaggggtgatggtaatgagggaaatgggtaagtgaataaatgaaacaagattggctatgaattgataattgttgaagcagctgatagtttcattatacttctttgtcttctttagtatgtgtttgaaattttctttaaacttttttttatcaagaaaacaactgacctgcacattcagataaaagggattttttaagattaaaaaatttttgcattgtcttttcctcttttgtatgaacttttttgtgtgaggaccttcccctataccaccaacatattccactccagctcaccccatcttgcctcccttccctggcagatccttggcaccattcaaataggtataaagcagtgtgtatgggttgctggtgtttgctatccagtaacttggaggaagtcattctgagcatcatggggctgagcagaaggagattttgattgtttctaggtgaaatattctgttctcataaagtgaaaacctgatcccagatatttagaaagacttgagtattacaattatgaaatatctctgtgtgaaactgcattgtcagtcatattttttttatttattttattttttgagacagggtctcactttgtcacccatgctggagtgccatggtccaatctcagctcactgcaccctctgcctcccgggttcaagcgattcttgtgcctcagcctcccgagtacttgggattacaggcatgagctaccgcacccagctaatttttttgtatttttagtagagactgagttttgccatgttggccaggctggtcttgaactcctggcctcaagtgatctgcctgcctcggcctcccaaagtgctgagattatagatgtgagccatccacacttggccatcagggtaatatttttaatttgcctttttaaatagagagttaatgtatttatttgactttagtactcactaaattattacttttgtccatggagaggaaaggttatgagaaatgtaaatagggactatgatatttgaattagaatacccaaatagagcctttttatttatcattcacttcatttcctgtctgttggtcctccagcaattctcagtgaaggagttctacctgaagatcatcccctggcgcctttacaccttccgagtgtgtccaggaacaaaagtaagctgaaccttacatctggttcacatcaagcatgcttcatctctggactatctcagccttttattttttctcagaagcacttttagtgtttctgcaagatctcacagtgtacacaggattcgttgccaaataaagcatcattatctcctcactaaatggcatgaagaatatataaattctggaaggacgcatgcctacagaaacaggaattagcagcaactcagaatacttcaacagtgatcctttgccttcaagactaagttaatagagaagatgtttgtaactctggcccaagcttggtctcccagtgtgctgaagctaactccttttagaagcaccactctcatatattaaaatacattgtttgtttgttgttaacttttctgggcttctggaatctaaacttttgcccaaaggctagaatgtgccattttataaaaatagttttcttctgatcagtttggagtagtcatttattgctgtttaatatatccttactattgctatttaatatatcaccgtattgccatttattgctatttaacatatcacccttcttatattttatgttagaaggtctgtagttttgctggtggtcctaactaaaggcagtctctgtgactaaaataattttaaatgttgaaatgtaaatcactgaagggaaaaataatgaaatgtatttctggtaggtcctcatttggagaaaacaagcctaacttattgttgttggttggtacacaggatagagctgtggaggacttttactggccttgagggttttatagattaatttctttstttttctttaccagttttcataccttggtcctgaccctgtccataagctgctcacactggtggtggatgatggcattcaacctcctgtggagctcagctgtaaggagaggaacattctagcagccacttttatccgctccctgcataagaacataggtgaggttacacagggattctatagggaaggtagtgagcccagccacatccatgagggtggagaggcaggactacacagatggcttgtaatgaggctgtaatgatggatcttgctgttccccaggaggctctgagacctttcaggacaaggtgaactttttccagcragagcttcggcaggtacatatgaaaagaccacattccaaagtcaccctgaaggtcagcagacatgccttgttggaatcggtaggtaaaatttcatctctgtcagcagataccaaagttttccaattgaatgtctatattctgcaggttactgtttttgtttttgtttttgtttgggagatagggtctcactctattgcccaggctggggtgcagaggtgcgatcatggctcactgcagcctcgatcttcccgggctgtgatcctcccaactcagcctcccaaatagctgggactataggtatgtgtcaccatgcctggctaatttttgtattttttgtaaagatgggattttgccatattgctccggctggtctcgaactcctggactcaagtgatacacccgcctcagcctcccaaagtgttgggattacaggcatgagctaccatgcctgatctggttatctttttcatgaaacttaaatttctctgtttaagtaaagatatagatatacttataaaagacagatatacttataaaagacagatatactaaatttctgaaacctaaatttctctctttacatatgtctgttcttctatttgattctactaaatttggggcagttttgttggaggtatgttatcgagggaagagcagtttacttactggccttcaaatctactgaatgggtcccttggaactcccatgtagggcaggtgtaaatagtgattacagaagaaacttcttgttattgaatccctggaatagagcgcttgttgaattaaaaggaaatgatttttgttgtcactttggtctgatggaaaaggaacacctgatgtgtgtctgtctccactgcacagacactggcatagttcttacattccccaggaatgagaaggcttggttcctgtccagaaagtgtttgtgatgtttggctctggtaggtgtgactggaaacccgttttctcagccatattctccgtgtggcatggctcgctgtctgaacctagccttgtggataaatatgtctagtggatagatcatactttgctgaaaaccaggattccttggttcttttgcctacagcttactgacttgagtcattttttacttctttatgcaagaatgttttcattgctaaaacaaggattgtttaaaacaaaaggaaaagaaaaaaacaacttcagctttccaacaaagtgatgatgtaaaggcaaatcagattattttttaaaactttaaatttgaagttatgtgcattttaaatgtcaggtggtatcattaaagcttgtttatgagtaacatatctccttcaggcagtcgtagttagtccagcagacaatggcagtgctcttgtgttgtctttaacatccagaggacaccagccagtgttctgacaattcccttcctttcacttcttttcagtctctgaaagccactcggaatttctccatctcagattggagcaagaactttgaggttgttttccaggatgaagaaggtcagttttgaaattttatattcatctttttgaactctcctccccactcgcaccttctccacaaaaaaaaaaaaaaaaaaaaaagcaactcttacctcctactcactccctaaaaaaaaaaacctaggtttttttttccccaaggaaaagggaaccatgagtcaagaaaaaaagggtagtatttactggccaggatggcattgaggagcttgtggtacacagacatacagggacttggagagagagttctaagtgtttgaaccgtggttaccttgagagaaatgtccatttcctgggatctccgacctctggtgtttccatactagggggcttttccttagtgatcagaataccattaatcctacaaaaaggggtgggatttctaaaggaccacagtttagatgagtcgcaacggagaaacaccagagtagtacaatagagggantgtggagagtataaaatgatgactcaataaacaaaagtggtaagaggagggagggcagagtcattttttattttcattatgcttttcagctctggactggggagggcctcgccgggaatggtttgagctaatctgcaaagcactatttgataccaccaatcagctcttcacccggttcagtgacaacaaccaagcattagtgagttggtgacgggtgggtggaaaatgtggattatgttatcatgggtagactaacaaggattcaaaattatgaaactgatctgggaacctgacaacctgtgtcctattcttaattttactgcttaaaatataagctaatcagattgtctttctcctctttgcctttattatttcatctgtaaaataagcaaaaatgcaggcagctgaatatttgactaaaaacattatagtataatgtctactctactaattattataataattaagcctctttctcaaaacatacctgaagcaaatgattcctgtactagatctttgtctagacaaaggtgtcaggagtagagaagtacactttggctgaaagaagttctggtttagggaaaaggcatcacatcatctgctgattaaccacaaacttaatataagattcttaattatgtccacctttgccctttatcttctrgtcactttgaattactcagtggtggctaccaaaaaactaacatttggatgggctctgatcctcacagtgacatcttgttcctttggcatggggttggggaaggaagggtccttccagaactgggcttgaagaaaaatggcccagggcctttcagtctctttcttggacaggtgcatcccaaccctaatcgccccgctcatctgcgcctgaaaatgtatgagtttgcgggacggctcgtgggcaagtgtctctatgagtcctctctaggaggagcctacaagcagttggtccgagctcgcttcacccgctctttcctggcccaaatcataggactgcgtatgcattacaaggtaacatcttgggtgtgcatttcctactaaggcccctggccattaaccctgaaatctctcctcctgggcttgtaaataatttttaaggttgaagggatwagtggttctaagcagttacacctttcagggcaagagtattcatgttctgttctgtgtctttctgcctcctcagtactttgaaacagatgacccagaattctacaaatctaaagtttgttttatcctcaacaatgacatgagtgagatggagctggtctttgcagaagagaaatataataaatcaggtcaattggataaggtgagaaagaggacaaagcctytgggtcctatgttctccagtttcctgtagagcaggmctgtctaagagaactttctgcagtggtggaaatgttccatatttgtgttgtctattaaacacccaaaatgtgggtgacataataagtgaacttctcattttagttaatgtatacttacataactacacttggctagcagctgctgtattggacagcacagctttaggacattgcatcctatgctttatgatctcagcccatttgagtgaagcaaaagacacatatctccatctatcccaccgagtcctgcttccagttgaaaaataactgaatgatggtgaagtgtcactgtacaagcagatttggaagagatggcagtgtctgtgtcaacatttgcagtagtgatgtaggtgattcctattttaacacaatgcctgggtatttttaaactttttggctgggcgcagtggctcatggcctgtaattgcaacactttgggaggctgaggcaggaggatggcttgagaccaggagttcaagaccagcctgggcaactttggcaagaccctgtcttttagattttaaaaatctagctgggtatggtggcgtgtgcctgtggtcctagctactggggtagtgtgggaggaagtgggcgctgaagctggaacatcgcttgagcccaggaggttaaggctgcagtaagctgtgattgcaccactgcactccagcctgggtgacacagcaaaaccctatctcaaaataataaaaccaaaactttttattagaaaatgatggcccagagatatttccgatgcatgtgcttctatttacattgtggtgttaaacagcatcaaatgataatgatgacgctaaagttgcagtaaatttaaagttaaaagcagaataggaatgattgaaaaattgtgaccattggtaccactatactgataatcagatatcctttctggaaattatgggattcccagctgtctgcctttgtacacatgggattagacccaacttcctgagctggcatggtaaggcagctagagtcaataggacactgaattagggtcctcagacccagggtagtgctcattttaattgtgtttaatatgaatactaaatcttaataatttatttctcagtctcctagatagaaatgcttacattaaaaaaaaaatccaggattgtgcataccaacagaaaaaatgttttacatttttagatccattgagaatccctgctgtggagtagcatgctattgctaccatgctgttgtcttaaaatctgatcttgtaacttcattcacctgtggagacaaccttggtcactctacacaaatattcctggatgatggttttaagctgtgcttcagggctccttcaaagttcccttaggagtttattgggggataccaattctgtttgagagtcatacagtttgttcacctttttctttgcagagaggaaagttcaggccaaataatttcccctaaggtctggaggggcaattaaccaaaggtctgtagcaagctagcatcagggctgagattagaatccaggatcttcaagtatcaaactgtggcttgttctgttgactcacattagagataaaagaatgtgtgggaacaattgttcccatcttggaatttctgagacataaaaagacttccttactgcttatctgattttactcttagttgcttagagaagaggtcaatagtggtttcattttggatcatagattaaaacattgctagcgaggagccatagtatcttcctattgcatcactactacttgactgagtcagagaagaccttacccaggcacccatttcagaaataatagctagtatacagcaatagtggtaggaaccctgaagcttaggaactaaattaaaccaagtgtgttgaaaagctgaatgcacagcagaaacttgtgactgacagtgatggaggtcagtaatctgtgtctataaaacatccaggcagatgtcatctcataaatttccatccacagcctctcccttgtctgtcttttgctgcctgttacaggttgtagaactcatgacaggtggagctcaaactccagtcaccaatgcgaataaaatcttctatttaaatttgctggcccaatatcggctggccagtcaagtgaaagaggaggtggaacatttcctaaaaggtgggatcctgtctgttcttggccttgaagttaaaatacctgtatccatggtgtgggtatgactttaacttgcctactttgtttcaggcctgaatgaattggtccctgagaaccttttggctatttttgatgagaatgagcttgaggtaagtgattgcaattcagactcccattcttaacttggcatttttgtakcttacaggaaccagcttggtgtaccttctcttatgagatgcagctggaaagccatttatgcaagaggtggtttcacttttgtcgctcctccattcattgacccttcagcctttaaaaaattagaatgtgaaaattagtagcaaagagtgcagagatattagcttaagggataaataaatgaaagtagcaagtagctcattatttatgaagagtaataattaatactcatttattcatcaagtatcactgaggccgggcatggtggctcacttctgtaatcccagcactttgggaagttgaggtgggtggatcacctgaggtcaggagttcgagaccagcctggccaacatggtgaaaccccgtctctactgaaaatacaaaaattagctgggtgtggtgatgcacgcttgtaatcccagctacttgggaagctgaggcatgagaattacttgaaccccggaggcggaagttgcagtgatccgagatcgcaccactgcattccagcctgggcaacagagtaagactctgtctcaaaaaaaaaaaaaaaaaaatcaatgagtagtaaagaatgttaatatcatgtaccgtctataaaatcctatgacatttaagggagtaatagaatttattttttcaggtatatattgagtgcctcctgaggcactgcagagagagtaacgaataagacaaagttccagccctcatgggctacattctaatgaagtgaaggaaacaaaccaaaagatgagatcatatttcaaaagcattagaccaaaacagtatatagtatatatttttatttatatagtaaattcattcttatttcagatcctgtaacaactaaaaaatggctctaagatggtaaataccattctatgcagaactgaagtccgtatcaggtgtgggcaaagaataacatcaatttgttgtggcctgttgctcacagatgagacatcagtacaaaatggtgcagtgcaagttactagttataaattcccgtagtttctatgaggagtgtctttctgcaaacgtttctttagggaggaaggttttcttttaaaatgggggaaaaagtaattttaggtggtcttgcccaattcttatttctattaactgaagtagatttgagaacaagaatcaaaatcttctgtaattttcatgttttatatcttcagatgtgaaatccaaacaaaatgaactctccacagctcagcctaaagtttctgataaacctgttacctagcactgttattttttgggctgaggaataactactggtaaattttgttacattttgaagcaaagcatttgtaacaatttgtagaagtaagtagaaaggaaggacatggtctcttacagttgttccacatcctgctcttagttcctggtcagcttagcaagttctttttgaaggagccaaggcttctcaggctcagtttgggctcttcttgtctctggttagaatgtattattctttatagctattggatgagtacttgcagtctgctaagtaacatgctggatcctgaaccaaattaggacattaacaagatgtttaaggctctgatgtcattaatgttctcattttttggcatacttttaaatgtatctgatcaagtagaggcagaagctgaagggaaggtagtaaaagttcaatccacaaaagaatgcatcctaagaaaaaggaaaggtcattgacaaattcataaatgggcctggggattttggggaaacagcttgccttttctccttgatattcccaggctaagtttagagcagactgtcaggaaacagtttgtgtgtgtgtgttttgtcctttgtttcatttaaaaataatccatagtagcagttcttagggtgttcatcagaaatacctcgcctgtaatcccagctactcaggaggccgaggcaggagaatcacttgagcatgcaaggtggagaggtggaggttgcagtgagccgagacagtgagactccgtctcaaaaaaaaaaaaaaaaagaaaagaaagaaatacctgagcaattttttttcttcctgtataagctcataacctgttccgagagattcagatttagaggtcccaggtagggccaccaacacttgtataaatatatattttaaaagccatgtgaatcttttttttacccactggttagcaactattgccctgttgtatgtaattgattttcctaaagcagtattctggcattatgacctcaccttctgtctttttcctggtaatgttttcttctacattttgcctgttaacttaggtaattttgaccttatattgggtctttgtctctctgactgtcatagtaacaccttaccatctttttccagctgctgatgtgtgggactggagacatcagtgtgtctgacttcaaagcccatgcagtagttgttggtggctcatggcatttcagagaaaaggtaaatggaccaaacttctttcagttggatttgtgccatgttataaggaaaaagtttcagaagaaaaaagtagaggaggccgggcgcagtggctcatgcctgtaatcccagcactttgggaggctgaggcaggcggatcacaaagtcaggagttttgagaccagcctggccacatggtgaaagcccgactctactaacaatacaaaaaaaaaaaaaaaaaaattagctgggtgtggtggcacatgcctgtagtcccagctactcgagaggctgaggcaggagaatcgcttgaacccaggaggtggagtgagctgagatcacgccactgcactgcagcctgggtgacagagcgagactctttctcaaaaaaaaaaaaaaaaaaaaaagaaaggaaaagaagaaaaaagtaggggagtcaaagcagttgatatgttttctgggaaaaaaaaatgatgcatggggaaagataggtggttgtccaggcagaagggagccctgatccctaagggctgtcatgctgactgccacaggagtagtaaattggagatggcgaagaaagagaaccaacagtcagtgactaccctcctaatcatrtgacagtgtaaattcttgaagtgcttgtcaaactgttcctaccctgtgtcctcatagaacggtaactggggcacagccccactttagtgtatcttgttccttccccagggatctaatcctagcttgtttactgtgtgtgatcccagccttgtgctctccctgccaggtcatgaggtggttttggactgtggtttccagtctgacccaggaggagttggctcggctacttcagttcacaacaggctcctctcagctaccacctggaggctttgccgccctctgtccctcatttcagattattgccgctccgacccatagcacgctgcctactgcacacacatggtaggtatctgcccgcctgatgcatgcccagtgtttttggtggtatgagttaatcacttctcccttgcccttccagttttaaccagctgtgcctccctacatatgactcctatgaagaggtgcacaggatgctgcagctggccatcagcgagggttgcgagggctttggcatgctctgaccactctcctgtcatccagttggctcccatgctctctggagcttctgggcgcaagttacagacatcataaccactgatcctaacacacataaccatcagccagaagatgccgcatgctcccctgtgtctggaggattttgtcacctacaagccttgtctttacctcacctgctccctgcccatatctmccacaggccactttggcatggtatgtaagctgagctcttcattctgtcatgagaagaggaccatgctgctatcatttatttggtcctttgaagatctcagtagctgagggagatggcacacggggctcagccctgttgggaaactggtgtggagacccttaaatccacactgtgctccaaaactccctctgctgatactccttggagacaccctctttggccctcactacttgaccagactggtacttgagtccttctcatgggtggggtgattgcctcttctcatcaggagccaggagagagggggacagataggaggtggcccataggagcagtcccgctgcacaatggtaggcataggccatggcactggactgcctctaaggactgctaaaaagaatatttttttgtggtgtcagaactggaaaaagcactttcccttcgggcatttctggaaatgattattaatccacaaagaagaactctgtaagctttttcttgaattgtagccagtgagaaaagcagatagactgaagaatatgaaggatagctgagctgtagcctccagagtggggcatgcctaggcatatggctggcttggagactactgatgcttttccctgagtttgttattggcactgaagtatggccggcttgggccactgacttccccattatgtagtctgctaaaagctggggatcctttagcattctactgaagaaaattttgtagcaaaagattagaacagtaagaatagtatgccagcaatccctgattctctctctgcttggtgttctctggcagcactaagacaaaggaacagggactaggagtttacgtgcttatcacaggtccttggcgtcaggacactagggatgaacatggaggtgatatgttacacagtaaacacctgccaacccctgtactcccctttgctccatcagttatcaggaaggagaactaaggagggaggaagcttattaggttcactgttgaatgatgattgaagagtacctgctgctgtatcttggaagatgacaacatcctttttcattactgtttgattgaaaataatttcaagattcaaaatctcattgacttcccaaatttgtgtttttaagaaggctttgctgcaagctaccattcccaatggggcagtcaactctgagaatattacaagccatctttattgccaaaaccagcaagtacacagagtcctgaaacaaggcaggactttggcaatgscttggcctcctggaagcatgtctgagccctcctgttcgcagggatcatgaggaacaagccctcctgagctgctacagttcctgcctgacctcagtctttcgcagtcatcatttgtcctttcttggcacatgggtgctgacctcactcatccttggggtccgggatccagcaycakggtctctataccccaggatcctccatgccacatggtcactgctctcctcagggaccaggacaaggtgctgctgcttgcccaaatgttttcccatgggatatgtaccggaaggtttatcaccaccctgggaaacataatgctgccccttgggcccagaaaggggtttccagctgggggcacgtggactggttctgctgtttttggcagtcgcttttctgaattctcccctccggcagccttccagagactgatcctggagattgagttgattgtcttggctagacctgtcattttaagctctagtcatagcactttttcagagcatcttaggcaccattgcaacccaaccagggaagctgcatccctgtggtggtccttaggcaccagtytttgtkaaacaaaaccctttggcactattgtggttttctattctctgtctgaactctattcaaaagtatctttgctctcttgggccttttcttttactgttttgttttktttttttctaatcctgctttcatactagccagtgtggggaaaaggtacaatatgtcaaagagatgagagagtgttatttcttgggcaattttctattagtgtttcttattttggccagttcttttatttatgtccttgtgacccaggtacttggggggccagctacccttytggccttttagcgtctttgaaggagaccagacatgagtgaatacctaggagagtgtcagcatgtttytggaaaattggcagagaccaagccctgctgcagattcgtcaggccaggtgaaagggccaggcagttgcagctgatgatgtaaatattttgtacagtagataaataaatgtttaaaagaactaaggagtgagtggctgctttaaatggagattcatggcttgactggaaggtggggaaggaaaagatttggaaatgattttgcatttccccaggaattcctcctgaagtggtcggctcggggtagagtgtacacctggagtcctggcctgtcccactcttgccctttcacccttccctgattgctgtccatggtgccaggcagggccactgtctcagccatggggagacgaggacaagtgtttatgctcagtttctgaagaaggaaccggttaatcagtctttaaacaataattcattgttgttttactacctagaaattcaatatagaaaatttggaaataagaaaaagaacaagggaaataggtaagttgctatccagaggtaatcaccgttaacactttgataaatagccttttgattttcatatttaagcacacatttgtctcccaacatctccctcacccacaaggggtttgggagtggcaaacaaaaatactgctcctaagaagtttgttggcggcaagtcttaccgattcttttcagcttacaaaggtaagcttggaagagaagaaaaaaaacagacctctgatttgggcctagaaggagtagtattaaggaccctgactttcttgggaaagtaattatgatgtcttgtatattggttcccaatctggaaaatgttaaaaaaattcccttttgaatttaaaaacaaaacaaaacagatccttgcccccaccccaaacagtgcattctcctcttacctcatcaagctcctgagtgatatgagatatcttaaagggccaggcacagtgactcatatgtataatcccagtactttggaacactgcaaggcaggagggtcacttgaacccaggagttcgaggctgcagtgagctatgcctgtgtcactgtgctctagcctgggtgacagagcgagacactgtctctctttctctttttttttgwaaaggtggggttttggcatgtttcccaggctgatcttgaactcctgggctcaagtgatccacccacctctaaaagtgctgggattagcatgagccaccgtgcctggctaagacactgtctcttaaaaacaaaaaaggtcttaaaattctgtccttctaactgtacattttaaggttatttgtatcttatacacttgctgttgtggctttgaataggtcactatgaacattgatccaatgagtgattttagcctatcaagtcattcttatgactccataaatactagcttcagcttcttgtatactattgcctctgagctattgtagatagagctttgaaacctctctccagccccagttttcgctgtcaggaccacagcgaggttctccagcaagtggcttgaaccctaagggctccttccctctrctctggcttcacatagaccttcaagcataataaaccagttccagataatgtggaatagtaaaagtattacaggatactaaaattccttttttcttttattttgagacacagtatgtataaaaaaggtattaacatgtgtaacttatgagtaataggaaatgcacaaatagccaccatccaggtcaagaaataaaacattgcagcactgcagagcacactctcgtcccatcccactaaaggtaactactgtcctgacttatgatcattatttcaccaggccccttttcaaacagcctgtcctcacgttaatagtggggaggggcggctgggtgcggtggctcacgcctgtaatcccagcactttgggaggccgaggcgggcggatgatgaggtcaggagatcaagaccatcctgggtaacacggtgaaaccccatctgtactaaaaatacaaaaaattaaatgggcgtggtggcgggcatctgtagtcccagctactcgggaggctgaggcaggagaatggcgtgaacccaggaggtggagctttcagtgagccgagatcgcgccactgcactctagcttggacgacagagcaagactgtgtctcaaaaaaaaaaaaaaaaaaaaagtggagaggggcaaaaagagcccacgtgtgtcatgataagaagctaaccaaggtcagtttctccatagtaatttctagacctcataattggtttgaaaagtcttctgaggccataattgccctgtgagaatctagtctggattcctgatgctgaatctgattaattattctaagactataaagtatcttatttctgtaaagatttttcctccagatactccaaattggatctcctttgtttttataccctaaaccctaagcagtttttgtaggctggtcagcaggaaattcttgagtatcatgtatgtgtagtagtattaaaaatgactcagcactaaaatgtctcaaaaattgtggaataggctagtatttctaactcagaatactgagtctgcacaccrcctaacagctatcccaaagttattggtgagcttagttttttttgtttttgttttttagcttttatttggagtacaggagggtggatttagagatctgcaggtcatgttgaccttggtttgtatccaatagagtggtgctgcctagagttcagatataccttgttataaatatcccttttttcccctcccggatttagtttgctttaattttgctcatataaggacattttatgatagccacagcagggacctggttctctggagtgaattcaggtgtggtctctataagatgggcagttaattcctggaaggagatgtggagaacacagtctctttccagaagtcaaggaatgatacctgtaggtttttcaatatggtatcagaggtggctttagcacagttgttcaggctgtcgatatagccctgacttgtcaatactagccagcagcagcttcttaaccatgggatagtggcaatgttggtacctctagggatagggatcagacacaccagcacagaatcatagcatccagtcaccttgcaagaacagagtgggactccccatctagttccccttgtagcctcccttcagggagatgatggatagtttatccagatgaggcctgtgttgctatttccctggaatacccaataataagcaggccaccatggcttttgtagtctgtgatggctgtgaatgcctgagaccaggttcacctggcaaaccaggcaaatttccaagtgaggttttaggagttcatcttttaggtatgactctaggaagaagtcagtcttggaggtaggagaggaggcttctttataaacctcattatgtcctctaccagatggtccatcctgttgacaggaatttacttgtatcctatgtttctgactctaggggccctgggcctccagcactccttgcaggataggcatctcgtgtcactgggtgttttctcgaagaaggtaccgttggacacgtttgcatcaagtttgcaaaatgggaccctcaaaggatagaaaaccatgaattgatgggcttgaattttttttgtttttttgttttgttgtttgttttttttgagacagagtctcacttggtcacccaggctcgagtgcagtgggatgatctcagagctcaccgtaaccttcacctcccaggttcaagctattctcctgcctcagcctcccgaataacaggtgtgtgccaccatgtctggctaatttttgtgtttttagtagagacggggtttcaccatgttggccagactggtcttgaactcctgacctcaggtattccgcctgcctcggcctcccaaagtgctgggatcacaagcatgagccatggggcccagccaaatgttcatatttttatttttaactcccgtggttcaactttgggcaagacaaccttctttcagtatcagtttcctgacctgcaaaatgatgctattaaccaattaagaaaatcgactaataacttaagagttcttgggaaaaaagttttcctatatatagtatgtgtgttaccatgctgactgtgacttagggccctggtagtttctgtagcaggaggctgtatgggtctgggggcagttgagaatgctagagtcgatgactggtgtggaaattcccagggggtggtgactctgtttttcaccttgccgtgtccaggcaggccagagagaatgagtactcaagacacctggcccaaacattcatgaagaagacaccaagtcagaagagacttcctcctttgcatgatcctgtaaggacggaagaggtatttgagggagctgtatctcaatcctatgtcatgtggtaggaaccttgacttcctttaattcacctgattactgaatcatgataatagctaccatttttttttttttttttagctcttcccatatgctaggagctttagtatttattgtctcattcacaacaaccctgcaaggtatgtcttgttttctccattttacacaaaacacagttgaggcacacagaggataagtaactgccaaggtttcttagctggcaagtggtagagctgtatttgaacatgggtctgtttcgtgtcgaagcccaaactccacatttctggtttgtctctagcagattagtttagactaagaaacagcccaggcactggrccactgtgctckctgactctgccttgttcacttggtgatgctgtgtgtgacagattaacactttataccttggcttacctatcagtcacttggggatttgggatttatgggaaaaggccctactcatgcagggtagagagattttaagagatacagctattagtaatggctttagaatcttttgcatgtagaaagttccttagactaccaactaatgagcaaagtgacttccaagtttaagtgaattctatataaagaatacaagacacccttgaggatataactgaggaaaaaggccctgaaattttagtatccttgctttggtggaaactcaataggtatcaaatgaaataatgaggtcagatatgttacataataccctgatgtttatctctggtaattaagtctgcagaaaaagacttattggaataaatcttttgtctctaaactctgctcatatgaaatagcaccatttggcaaaggccaaattcctggtggatatctcactgaggaagcaaacattttcaagaatgccagagttaaagggagacaacacacaccctaaacaagactgtgaagatactatgaaactattctgttgaaaccataagcatagtatcttttccagggtgagggggtttctgtaactctcttgagtgaagtcgctctttctgcaaccccccacttcacctgcattatggatttgcacataaaggagtttttctgaatcttcccttcttctacagaccaacaatgtttcctctctcctcagaactcccacttgagggagttgccaagacattcctctgtttgcccattagcagagtcagggatatcagagtatttgcaagccagctagagagcctttgatggcttttatgttatgttgaaaacaaaatgttgtgttattgtgcaagaggaagattatgtgtgtgtcatcattttgtgcttggtctcctacgtccaatcctgctctaagttgtcatttcatttcctaacctcctcccctcccagtcaggtatttctgttccatccctgggtttgtagcctccctttttttttcttgagttctgtgcagctctgcatttcagcagacgtttcctatgtatcaagcactgtgcggggagctagggacacacaaggtagaatgtgatcctggcctctgagaagcttacaatcttgggagacagatataaacaatctattttccttagagtttccttctcctgaagcttgggcacccaaacccatcaccactgtcccccccttcaatagtttctcctgtttacttggtggggagcatttctttatgtatttggagactttctatattatagagttgctgttgctacaagtgaaattagtctagcttcctacagagagggaagttactctctccctgttgattttcagagaagaaagaacccttgtaaagatagattccaaaccaagagacccaaggagcaagcgcattattgtgccataaataggccatcacttgggcaggtcctgggacagcctgggaaaggggactcggtaatcttagggcccactctccctttaatctgctctcccagacaaagcagaccggaagtgttgactttggcaatagggaactggccaatagcctgcagctcagtgaatgaaattagaatcttgagtggatggggagagggaggtatctccaacactaatagcaatcaaagggtttgtgctatggttataatcagtgtggcagaggaaagtcaaaggaataccatttccaataaactcagaggcgtgaaaaggcaaatcaattttatgaacacccatgaaattggttggttgtgaccactatgggtggaaacactgagcttcagtggaatttcccttaatattaaaccaggaaactagagtccctggttatctctctgtcgtatacagcagctgacatctattcctcctggggattgggcagatcttaaagttgatgtcctaagcttctgactgggatcacagctctggataggggttgggtcaggccatcgcctttagaaaaccagttatttagcctctctttccaatgggatttctctgaaaccttgttcatgatgatgccaacttgtgtctccttgaaaaatcaaaacaatggaattaaacttgggtgttctcctatagatctagcattttatgtcacagtcagggtagacaaatgtgctgttggctcctggcaggctcatgtgcagctctggagatgttctaaagtgggtgcagtcaacagccacccatctgcatactccgcagtggtctggtttaacaattctgacctatcatccctctaaaccttgaaaactctgtggtcttggcgtccaagccatgtcttccagtagactctcacacccagaatcagcaaaacctcttttgtcagaccatatcttgagtttaggcttcaaaaaaatggcatcgtgggttagctttgtggggcggggtgagtaaaactccagtcctgacttttaggggtatggctggtcttgggggcttggcatggtgggaagaaggggccaagatagtggttggcatgaggatatggagaactttggaagcagagccagagactctgaggattgaggcccaggaaagtttggcacgagtaacagctgggtatttaaccaggaacagtcactctatttttctgagccttggcggtatgtcagagcaacaagcagctctagcagggtctacgtccttcctattgtctccaccccaacctcactcatcrtcccaaacatctgcttccaattcgggcccttgccttcttgtctgattcctgtacaaaccgcgggtggcacgggtgaggggcaggtctgcaggtgtggactggggaagaagaggaaggctctggaagaagctgcttacaggtttagtttcaggtcctgatgaaggagtaaggatttgatctattaaaaaattttatatttgtgtgtgtgtgtgtatacaaaatgtaaacagtaagttgtttcacttcctgggtaaaagtaacaatctgagggagggaattgggaccagctggagaagtctctgcgccatcacatggcctgcttttcaaaggcagcacagagtcactccagaggcagcaaactgaagtgattagtgcccacaaggagcagccgaaggtgctaatgaggtattaacaccgcttctccagctagcagctgtggatactccgaacagaccagtgaggcagagcagcaaaagcagcctggaactggaggcggccaggagaggagcagcaagccggtgcccacagtcagccacggcaccctcagcaggcccattaggaggaattgagaagcttctccagtgtttgccctaaaatctcaatccattttaagtgacagaaagtgacaaaaaacaccccagaggaaaatactggggcctaagggagtaatctcagaactcttgtaataataataataatagcagccaacatctaatacatgcttactctgtgccaggccctattctaagcactttgtctgtgttaattcatttaatattcacatcattctataagctgaagacaatcattattcccattttacagatgaggaaactgaagtacagagaagtaagttgcgcaggattacatgtccagtggatggatgtaggtgtcaaattggctctgacacgttttctcacacaagcccaaaggaggtggagttaggggcaggacagacaagtctggagaacactggtaagagagttgctagtgttctgttcatcctctaacccagggagacattgtgtaggtctgtgacttctgggaccccagggagccagtctggccggcacttctttgtccagtcctgctgcctggtgcctcctgaggtttctgtttcscaatcagggtacgggttccattctccacctccctctccagggcaggaggcaccctccatccctcaatccaaataagctgggagagatgcctcagggagttggccaggctccaggcccctgatgggaagtggaagaagacacttactaaagggcaagatctggccaagacctgtgggctaccaggatccccattaaacttcaaagctgagcgctgaggccgagcccatcatttgactggcaactcaggagctggttggacagaccagctcaccgtggcgggcctctgtcttgcagagaagcaaccgtgtggatagtgacaggccacaggcctcttccagctgttgcttccagggctgagccagaggccactttccatgggcacagcccatttttactaagatgaaaggttctaggaggcttacctgaccaggccagaggcccaaggacggcggctgtgaagcaccaccagctctcagtgaacgtggtctgaaccatctcagctcgttcctgcctttgttcctttacttgttctgtgcactctgcaaggaatgaggcccatcccgtccttcctccctgctacctccccatccttcaaacctggctcgtgccagaggatatgaggattaaataagagaactcatgaaaagtgccggtactgtgtctgacactaagtgtaaaaaaaaaaattagtagttagcaatagtaaaccactatccacagttgtctttggttatgttgtggatttgaatttggaagatctgggttcaaatttctgacttgccactgcctaggtgtatactctgcataaattgcttagtcgctcttaactttaactgggaaatagtgattctaacaacgtacaagtgtacccgacagagggcacgtaaagcttaaatgagacaatggatgtgaatagtgttttgtaaatcacaaaacatcctcttaattccaacattgcctctcccacgtccactggtactgaccttggcctgacctgggtatagctaaattcctttgctcttccattcagcaaagacaaaccaagaattttttcagaagaaactttggtttaaaaaattaaaggactaaactaaaggaaaatgcaaaagaagaggagtgattgggcttttggaatactgatgtctcctgctactaagtccaacctcaggggccaaactcactgtcagttatggccatagttaccatttgctctccctcctcagtcttgccagggtcttcctgacatggattcagagttgaagggcactgaggaaatgaagagcccagaacaattctgagccaccctcctcccttacacacacacccaggatgtggctaaaacttacagaccttaaaatattatgtgcccaagcctcacagcaagtccagctaccagaggccagtttcctgagaagctaatgaggcttacattgagggccgctcacctacaggagttccttccaaggtcatattttttttcaaagtcatagtatttgctaaggtaaaaacaacaaacaaacaaaaaaaaccaaaaaactatagctaggtgtggtggtatgcacctgtagtctcagcacttgggaggctgaggcaggtggatcaattgagcccaggagtttgagagagtagtgcactatgatcacacctgtgaatagccaccacactccagcctgggcaacatagcaagaccctgtctcctcccaaaaaaatttaactgtagtcagtctccaccctg

SEQ ID NO: 95048 - DNA, 34065 bp, Homo sapiens
tcctctgggaggtccttgtcttgggctctgtggccaggtggggccaaccactctagaagacggagcagcccactcttcaccagccctgggcagacagagccatggtcaggaagtgcttctggtttccctgcttcctctccaggcaggccgggtgcccgtggctgggtgaggggaggctctggccccttcttagcacaaggcactgtctgacagacccagtcttgctgcagccgctgactctggggacagtgggggctgcttagcgcagccaaccggcatggggggcttatgaatatgcaaattgaggccagctggttggctgcccccatgccatttctcaacgccaccccaactcaggtgcccagaaaagccagctcagagagggccttcctgaaatgccatctcttctgtctttgcctatggaccacagagccctttgaaaacttggggactgaatcacccagcttctctcattgctctggcctccagcgggaagctcctgacttctgctttcaaattccccagagaggcagctccaatatgaacatcctctccctgtccctcaagcatcctgagaagactggaatcagcccaacagcaaaccatggcatctcagatctgcaggaaggagaggctgcgtggtccctccctcccacagaggcctgaacactgctgaggaagctgctgctgggccaaaagcacccatccctgacagatctgggagaactcactggccaaacccacctactcccgaatgtaacccaaattttgccttcccctcctccttcagcttgagaagtggaggggatgttgtgaaatacagcaatgaaaattagtaaaccacagctcaactcatcaacgtggacaaatcctcaaaatacaatgttgactgaaagaagtaagtcacagaggctgggctcagtggctcacgcctgtcattccagcaccttgggaggctgaggcgggcagatcacttgagcccaggagttcaagaccaacctgggcaacatagagagatcgcatctgtaccaaaaataccaaaaaaaaaaaaaaaaagaaagaaaaaaaaatgtgcttttggtcctagctacttgggaggctgaggtgggaggatgaggattgcttgagtccaggaggcagaggttgcagtgagccgagattgcaccactgtactccagcctgggcgatagagtgagaccccattacaaaaaaaaaaaaaaaagggtgggcgcagtggctcacgcctgtaatcccagcactttgggaggccgaggtgggtggatcacaaggtcaggagattgagacctcctggctaacacggtgaaaccccgtctctactaaaaaacacaaaaaattagccgggcatggtggcaggtgcctgtagtcccagctacttgggaggctgaggcaggacactggcatgaacctgggaggcagagcttgcagtgagccgagatcacaccactgcactccagcctgggcaacagagcaagactccgtctcaaaaaaaaaaaaaaaaaaagaagtaagttacagaatgatacaggcactgtgattccatttctactaagttaaaaaatagaccaaaaaaaaatacccacacaaaaacatgtctagattttcattgtgtattcatcagtccattattttgaattacaactgaatgaagagatagacagatagatggaatctaggtatcataggtaacactgagtgaatatagggcatagtccctattttaaggagcccaaagatggaagcataggctatagccccatctactagctggccgataatattcataaactcataggcaaggatgtgaatgtatggttcagaacacacataagaaaaccgggggatttgaggtaaatgagctacttaatcctttctaaaaacacaccttttttcttatttaatttgaaagtaaatacatctttcattttcattttttatttttttctatatcagaccactgctggagacatctttttcttaatttaaaaacacaggcaaaaatgtgtatagaacataagcatattgaagctataatgaaaacaaggggatggttaatatataattcagtatagtagtggctaactgggtgtgatgatggaggagaccacagggaacttttccattccttcagctgggcagcaagtatgggaattccttttattatttttcttttaaactggacacatagatttttatatcctttttaatacgtattttacaatgaaaatgtttttaaaaattatcttttgggccgggtacagtggatcacgcctgtaagcccaacactttgggaggccaaggtggaggggtcactacgtcaagagatcgagaccatcctggccgacatggtgaaaccctgtctctattaaaaatacagaaattagccgggcatggtggtgggcgcctgtagtcccagctactcatgaggctgaggcaggagaatcgcttgaacccaggaggcagaggttgcagtgagccaagatcatgccactgcactccagcctggcaacagagtgagattccactcaaaaaaaaaaaaaaaattctcttttgagccctgccacaatttatattcataaactcttgccccagtagatggtgctgtgtcttgggaagctctaaatgaaggagtgccctagcttattgggttgcagcttggagtccatggaagctcgtatgtgaatctcgaggaaatcaatttcaacttttaccctctcaatgggattttgtatgaaaccatgctcgagtgtgtgtgtgtgtgtgtgtgtgtgtgtgtgtgtggtgtctttagactgtaatatctaagattaacttgggtgatcactaaaactccagaagtgctttgccacattataaccaggcttgaagtcttgaagcctctacatctttttttttttgagacggagtctagctctgtcacccaggctggagtgcagtgacatgatctcagctcactgcaagctctacctcccgggttcacgccattctcctgcctcagcctccctagtagctgggactacaggcacccgccaccaggcccggctaattttttgtatttttagtagagacggggtttcaccgtgttaaccaggatggtcttgatctcttgacctcgtgatccgcctgcctcagcctcctaaaatgctgggattacaggcgtgagccaccgtgcccagcctgaagcctctacaccttctataagaatctcaaaaattgttaaagactgtgaaagcctgtaatcccagcactttgggaggccaaggcaggcggatcatgaggtcaagattttgagaccatcctggccaacaccctgtctctactaaaaatacagtgacaccctgtctgacaccccgtctctactaaaaatacagaaattagctgggcatggtggcacgcacctgcagtcccagctactcgggaggctggggcaggagaatcacttgaacccgagtggcagaggttgcagtgagccaagatgagatcatgccactgcactccagcctgggcagctgagcaagactctatctcaaaaaaaaaaaaaaaaaaaaaaaaaaaaaaagaccgtgaaaggactgggtagctatctaagaaaaatattaacagcaacactggcaagaaattgccatagcccctgactaccgttcttggattcttcagctgtgtccaccaatgttgtaaacatggaagtatttagtcattccacaaatatttattgagtacctacagagtcccaggaactctgatgtcccaggtgttgtgtttggaaaattcaggaaaatagagagtggtctctttccacctgctgctctatgcagcatgggagacagacaggtaaacaggacattacaataaaatgcaatgtagaaacccagacacagtgctttggaagcatagaaaatgtatctgttaactctgccagaggggttaggaagggattaagaaggagatttaaaggatgactaggagttcctaggcaaataggaggaggaaacagcccatgcaaatagctcagcaaggctatggccagtagtgtggtttgactaaagctcacaatctgtgagaatgtggggagagaatcagaacataatcagaggcctgattatcaggtgcctggccaagttgaggagtttgtactttatcctacaagggagataaactttatctcccttgctttatccgaccaggagaagcaatgaaagactttaatcagaggagtgacaggattaggtttgcatttcagaaggatttcttttttttctttactttctttttttttttttttttgagacgaagtctcactctgttgctcaggctggagtgcagtggtgcaatcttggctcactgcaacctccatctcctgggttcaagcaattctcttgcctcagcctcccgagtagctgggattacaggcattcactaccacacccagctaatttctgtatttttagtagagatggggtttcaccatgttggccaggctggtcttgaactcctgatctcaagtgatccacccacctcatcctcccaaagtgatgggattacaggcgtgagctaccacaccaggctcagaaggatctttgacacagatataaaggatgatgggctagagaaagcgagagcggaggcttagaactgcttagggagcttttcaaataattcaggtgaaagctactgaggagttaattgtgggtagcagcagggcagagctgttttctctatttctagttaggactttggcccatccttccagaatttcagtggcagtgctttcagggttcaggtgagtgaaggcactgtaaaggtcctgatggaatttgaggccagcctgggcaacatagtgagaccccgtctcaatttatattaaaacataaattaattagaaaaataaaaaataaaggtcctgagggccaggcaaaatgcctcagataaagaaatcatcatgaacggcaccaagtggttcattcattcattcatacatttatgtgttactaattcagccagaggtttaaagcacatctttttcattaggaaggtgagccttaaaggtgaatactcaaggggcctgaatacttaaggaggggaaggggatgctatatgctttcacttcaagtcagcgggaagaatggcacactcaaagtggggaggtcagcctggcatggtggcacctgtagtcccagctactccagaggctgaggcagagggatcgcttgagcccagagtgtcgaggctccagtgaactatgaccttgtttcttaaaaaaacagctgggagtttatattctagggatagggtgacaaacgaacaacttccaaaatgcacaagatgtatggggaacaattagtttggctggaatttgcgttggggggagatcagaagctgttgagaaataaggctatagttggtgaagatatccgactcgtaaaaaggcaatgggatttagaaattcctgggattctgtttctttgactcggggttaggaagacagggaagtaacaagtgcctttttttttttttttaatagttaagggacctgagactgggggtggggggcaatgtcatctgccccaggccacacaagtgtaagatcaggcatgcatgtctgccaaggtttcagttcaatgtccgtgcccctcttttgctctcttcccaaggtacagaggcggaacggcgcggtgccctcgggtcccaagagagaagggcgccaagctcagagccagttctgtggaagggtaggggaaggcctgaccccgggggcaatgtggtggcgggacagtcgtatacaccttcaggagaaccacctcaggctgacaggcagtgcggagggccccaagagcgccttagggttgcctgctccagagagcgggactcctgcgctgcagccgggatactggrcgccgccgtgcgcccaccccctgccagtggttcgctccgaacacccctcgtcgggcggcgggtactgcggcccgccccacttccggttgttgtccggccctatatccggtgtccgcccgccctcggctcctccgccgtgatgctgtcccgatcccgctgtgtgtctcgggcgttcagccgctcgctctccgccttccagaaggtacggtctggccgagccggggccccgacgggtgaggagtctgttggcgggcagagaggcggcctggaaggcaggggcgcggcgcgccggccgggccgggcaccaagggcactgggacgcggaggccgcgcgggctgggcggcccggggccgtggttgccctcgggaccgttttgcggagcccagcggccccctgccttctccaggcagcctgcggggaacgtttcctgctgtaccccaccctccgcgcgggagctggggagccgcgcccgtccagatacttgactcagagttagggaggaggcgcggcggagtcctccggcgggattcggcgcccgtctcgtcttgctctgttaaaatcagtgggtattaatgagtcccgttgggaagttgagatagtttggcaggcccagcgtgttgattgggtctgccagcacggtgtgttgcatttaccttcggagttacgagattcacctgtcaccaccactgggacagctttgagcgtgtacttaaaagaaaaagctgggtttttttttcatcttgggtgacgtcgataatgtcttctttctcaacaggggaactgccctctagggagacgttccctgcctggtaagttctgcccttaccgtcacctaaaatgctctcctcctgggcagagcagtatgtgaggaactcgggggtgcctgtgtttctcataatatttaaagacagttyggttcagagagtagtgagacgcaatgctacataatcacgagctatcgcttattcatttagctcgtagttgagtttctactgtgttaggcactgtgctagacgctagggatacaggagtggatacagaagtgtacagttcttgccctcgtggagctcctaggctagttggatagtgtcagttgctaaacaagccaacaaaggcaaatttttgtaactgctgagaaggaaacgagggtggacagaagagccctttttgaggaggtgacttaaaagttatggccatggccgggcgcggtggctgacgcctgtaatcccagcactctgggaggctgaggcgggcggatcacgaggtcaggagatcgagaccatcctggttaacacggtgaaaccccatctctactaaaaaatacaaaaaattagccgggcgtggtggcaggcgcctgtagtcccagctcctcgggaggctgaggcacgagaatggcgtgaagccgggaggcggagcttgcagtgagccgagttcgcgccactgcactccagcctgggcgacagagcgagactccatctcaaaaaaaaaaaaaaaaaaaagttatggctagcagaatgtgacggagctaacccagtgaagcccaggagaaagagaatggcattcacaaagaccctgaggaagaaaagaggttggcagaacttaagagctggaaaaaaggtgatttggccggagtattttggttaagggagagagtggcaagagatagaagatggtatagagactgaaggagtttagattttatcctagcagttaaaaagaaaaaagtgtcatccatagctttttttctgttatatgcctagcctaagtatttgttgaatgagttgaccttgttgtgggctttctttgtgccaagcatttatatgagtgctttctgtgaattttttagttaatcatctcaaaacagtaaaaagtattttctctattttacaaatgcataacccaagacaagagagcttaaaagccttggccatggtcacccacccagctgttgataagccaggtctacctgacccatcctgaactcttaacccaccatgttctcatttactcatggactcaacagatcatttattgagtgcttactatatgccagccactgttctaggtaacaggggtatagatagactctagcctcgagattttatgggctagctggagagagagagcaaatatacatttatgctccgacaagggcataaattttggttactacgagagaggaattaaagggtgtgatgagagggtgggatgatgtagaccagcttgggaaggttgggaatgtcagtaaaggcttccctgaagaagtgacatttaactgagacctgaatataaaagagccaagaaaatgtattccaggcaaagggaattgcttgtgcaaaggttttcagacaggaaaggacttgaccagtgatagacatgggaagaagcctgtctggcaggaaagatagagtgggctggacggtacaggatcgcgtaaagtgtggactttatcctgagagttaygagaacataaagcccctagcacaatgtcggcttgtagtggactctcaataacaaacatgtttttcaagtgggaaccctgaacaatgtcagtaaacattttctccacttcataggtgggcaggacaatggaaagagccttgcacttggggatttgcatttgggctcagggattcaccttgggctagtcgcttaacctccaaaagtcctacttatatgaaatgggaataatggcagatggtcgttccacttcagagagttgtgagactgtaaaatcaaaatgaggtcattatgggaaagctttttataaaccctaaagcactgtacaaatgaaatttgctgtaggatgaactctgaattggactccaggttcccaaaatcagtgtgagccgccatctattctagttcaaaaacatactatgcttagaatttgcactgcatagtcattggctgctggacataaaggtgactggcttacctatcttgggatgcttgtgaggaggtgggcrtaagagagggctagctctcatttggtgtgtcctgagcccatggttcagaaagagttgttaatctgaaagaaaaaagacataagaaagaattcagaagaggcagctstagttactagtcatcagttggggaaatgcasttaactatgataaggacagctggtgggcagaaagggtctctcaccttgttgagagtgaccagggtggaagacttcagaaaggcatgggaagtcaataaactgaaagatggggacatgattttctcagctctaggacamactggagaccccgagcctaaagtagccaagtctttgctactaggattcaggtgataagatttccaacccaatcttttcaaacccagaccaaacatcctccttgcttctcaaattgggttatgtatagtcacaggataagccatcccatgtctttctcaagcttcagttgtatttgaagacttggcgagtagagacattttattatgaaaacatacaggaataatgaaaagttctggctttttaaggtagatgagattatataatcactttgggctgtgccatcaaattttttctctttcctccccagccaaacacatacccactcgatctcacatacccatttgctctctgccactaaggctactttggaaaagtttgagaagcaggactctatgataaagattatatccgttgccgttgatcctgctctgtctcagggttgggggtgagcagaccttttccattcccagcatgtatcctttgtgagataagagttgttggttaagagttattttgtttcttgcaggggtctccttatgccagggaccaggttaccctaacagcaggaaggttgtgtaagtatcactggggagtacagatatgtggccacgggttatttatttaaagacataaagttctaaatttgaccatctgatttcttcactggcctccagacctagaaattgaggtgattatgttgagtccctagactaacctcaatgttcacttttcccatgtgatgttccttgagcatcagctccgtgtcaggttttggactgggagtgtgcccacyctccacaggtgtttggattataatgaaagttaagttggaatcctctttttatgggatatagaagggtgctcctagatattctgtttggatgtaagtgcagctgaaaggctcgaggttacatttattgtggagattgagagcatcctctcagtagcatagttactcatttttaaaaacagtaaaagcataaaactggttgagtcctgggactgactgactagtttggagggaatgctgttattgcataatgcagagtttggagaaaggctacccatgtgtgtttcagattaacttctgcgtatgaatgttgcttaaatgctgctttgcattccaagtgtttttgtggtggtgctaagagaatgctctctagtaacctgttcagcagctgtcaggctgcttactctacagggagaatcctcaaagtgaagaggtcagcggatgagcttcttacttactctacatcacaatgagggtttttgttgttgttgttttgagacaggatcttgctctgccactttggctggagtgcggtagcctgatcttggctcactgcatcctcagcctcctgggctcaagagatcctttcacctcagcctcctgagtagctgagactacaggcacatgccaccatgcccggttgttttttgtattttttgtagagatggggttgttttgccatgatacctgggctggtgtcaaactcctgggctcaagcaatccatccacttgccttagcctcccaaartggaggatacaggcgtgagctatggtgcctggctgattttttaaaatttgagtaaatgttgcactcagtactagaaatatgaatmccggtgttattttggagggcagtttgatagtcataagtctttgaagtgtgtgtaccttttctttttttctttttttcaagatggagtcttgctctgtcacccaggctggagtgcagtggcgcgatctcggctcactgcagcctctgcctctcgggttccagcaattctcctgcctcagcctcctgggtagctgggattacaggcgcacgctaccacacctggctgatttttgtattagtagagacggggtttcatcttgttggccaggctggtctctgaaactcctgacatcaggtgatccgcccgactcagcctcccaaagtgctgggattacaagcatgagccactgcccggcctgtgtgttccttttcatctagcaattccatctctaggaatctatactgaagaactcctggtatatttatctcagatttaatatctgataatataaatattatcagatttatctyaaaatggcaaagagcaagggattggctaaactatagcatgttcacatgttcacactatgaaaagtgggaaaaagcaggttacaaaataatttcattttctactgtgtggtatgatcccattgtaagtattctttttgctatttctaatattctgtagtgaacatctagttatttagagattcaaaatgtattactcatctgcaatcaaatgaaaattggggcaatcatgactctctacaataaatacactaaatatttgaaagtaaataatgaagaaaaagtaaactttgtgtgggatcaccccaatcatgtcaccctaatccagtatctttgtgtgtgttgtgccttttttgtgaataaggtacccactttatttaataaatcttttattgtaaaacaatttttggttttatgtttttactaatagtattatatttacatgattaaaaattcaaaaagtaaaaagggtgtccatgagaagacttttttatccttgtcctctagccccccgaatgcctcttgggtagtggtggccaccactccgggttcctggatgacttgcagagcagcctctgcacttgcatgttacctgttagttcttgcctataggcatgtactttacaaggttacaaactatatgtrraacaatttgtattcttgtagtttttaaatatcttcattttttcttggttatacatagaccttatagttattttgacattataaaagtaaaaatacctaaagacaacttaaatctcttttacttttctattataaaaatgcttgttgtggaatattcagacaatcctgaagtgtaaaaagtgaaagtccccatccaaatcattctcccaaattgtgtaagtgtgcaacacataaccagagataccatatatgtctacatctctcacccctcagaggtaaccactgttaatggctttgtgcatacagggtgagctgattctccagtttatattatttactgtaaaggccatatcagtaaacgccttggtctttgaggttcgttttgaatgaatccagaatgtgttgatgtgctgttttctagcaagagaaccgagtaggagataccatatggggtttgtgtgtggtttttttgtttttgggttttttttttttttttttggcataacaccttgttttacttccgagttaaccttgttaatcttgctgccttatctgatctaaatctgttatcttgagggcagaaattccattataccttgcacaatggcttgtaccctgggcaggccgtaaatctatctcggatttagttaaggaagagacctggctggacatggtgactcactcctgtaatcccagcactttgggtaggatctttgagacccgtctgggcaatgaaatccatagtctacaaaaagtaatttaaaaaaattatctgggtggcatgtgcctgtagtcccagctacccgggaggcagaggtgggaggatcccttaaatccaggagtttgaggttacagtgaactattatcatgctactgcactctagcctgggtgacagagcaagactcttatctcttaaaaaacaaaaaaccaaatcaagaagctaagtcatttcggtctgcaaaggaccaaggtgcttatttttttattgaaagagccaaatgtaagtctgttttgtgagagttggcattgcattgcagcacaggggcctgagcatacttggggagctcaccatttaaggtacctgggtcgttaggctctactccagacctgctgagtcagaatccctgggggagaggcctagacaagtgaactttgaaaaagttcctccccaagtgacactgatggacacccctggtcaagagtcactgtttaaggggaaggtgacccatggggccttaactagactaaaatgtgagtggttcgcctgttaaaaggagttaacgtgtgtttcttttgtagcattaacaacagtgtcttcagtgttcgctttttcagaactacagctgtatgcagtaagtacctgctttcttgggaatggaattttatgggaagagcaacaattgattgagtttaattaaagaaaaatattaaaaaggaaaaatgaactacttatgattttcttttttgcatttttcctagaggatgacttggttacagtcaaaaccccagcgtttgcagaatctgtcacagagggagatgtcaggtgggagaaaggtaagatttagtttcctattttttttttttttttttttgagacagagtctygctctgttcccagcctggagtgcagtggtatgatctcggctcactgcagcctctgcctcccaggttcaagtgattctcctgcctcagcctcccgaatagctgggattacaggtgcccaccaccatgcctggctaagttttttgtatttttagtagagacagggtttcaccatgttggtcaggctggtctcaaactcctgacctcaggtgatctgcccacctcagcctgccacaaagtgttgggattacaggcctgagccactgcgtgagccactgcgcctggctcctstcacttcttaagtttaagtgctatctaaaattctcccctcccctcaggatagttgtagaatttatagctctgccgttttctttacatatgtactttctgctggccctgtaggaaagggttcttataacatacctgccaaaatgggttttgtggctactggaggctccccgctaacaggtagccttgtagcctttgattgtcttttcagctgttggagacacagttgcagaagatgaagtggtttgtgagattgaaactgacaaggtaggcttatcttatattcgtaccagcttttcatgggcttcccttagttaacctaatgaaagaaacagggacttaaccattgtttagagataatttttaactagctctaacttcagttgtaaaattattggatttgttcaatttaaaaaaaaaacaactttttacatttaactttttttttttttttttttttttgagacagacttgctctgttgcccaggctggagtgcaatggcctgatctcagctcactgcaacctccacctcctgggttcaagcgattctcctgcctcagcctccctagtatctgggcttacaggcgcatgccacaacgccgggctaatttttgtattttttgtagagacaggtgttgccaggctggtctcaaactcttgacctcaggtgatctgcccgccttggcctcccaaagtgttgggattagaggcatgagccaccgcacctgacctgcatttaactttaaattgtttgctgtgtgtgtactatgtacttcatttagtagctttagtcttgtagtgtgtggtgagggggtggggagggtaaataagctgtttccactttttcctgtatcacttggaaacatattaactgaatattgcctgaatgtttctgagaaaggacagaaagtgaatcttcacagtagcgatgacttgttatcacccttgctctgaaattatggccttagatgtttgtgtgcaaggccttatatattgtgttgcaactcttgttactcactggagatacgctgttgttgttgttgttttgagacgtttcgctctatcacccaggctggagtgcagtgkcacgatatcggctccacctgccrggttcaagcgattctcgtgcctcagcctcccaagtagctgggattacatttttgtagtttttagtagagatggggtwtcaccatgttggccaggctggtcttgaactcctgacctcaagtgatccgcctgccttggcatcccaatatgctgggactacaggcatgagccactgtgcctggcttcattggagattctatacagctaattttctaatgctggataaacatttggacttcctccatctgtcttcctcttccagacatctgtgcaggttccatcaccagcaaatggcgtgattgaagctcttttggtacctgatgggggaaaagtcgaaggaggcactccacttttcacactcaggaaaactggtggtaaagaagttctcctggtggtcaaggtctccagtgttccctcttgggattgggactgagcataatgtgctaattcccygataygtcaaagactcttgtcattccagctgcccttagttgagggaataaggggtaaatttatatatagtgtgaacttcaaatgtcaaattctaaaagaaaagtgtattttttaaaaaataaaccttatactctgttctttccatgggtgtttcttagcaggagctgagaaactggaccttttcttatagatatacagattgagcatacctaatctgaaaattcaaaatctgaaatgctccaaaactgaaaatccaaaatctgaaatgcttcaaaactttttgagcactgacagaatgctcaaaggaaatgctcattgtcttttatggggaattcagtgttgtttcttttcacatctgttctctcatatctctaggaagggttggtatttcttttgggaagaaatgagaaacgaatttgtactggacctgataggattagagattaataactttatctgactcttagttaaattttataaccactaaaaagtctatttctttttcctaagcgagaatcgtacccgtagaccaacgagtcacagaagtctatttctttttcactgttacactaataaggcagatagaccgcatgattgaggttagtcaggcaagaccagaagctcagagtagaaaacatgtatggtagaaggctgggaaataaggtagtcctcctgttgcagaagtttgtcttagcactaaccctggatataatgtccagatgggtgaaaaacagaaacaaacatttcatttaaagttgtgagattattacttggccacttcagtgatttatgagtcatcctggatgaagtgctttcttaagcctaagtcaaccctcgatgactattttattttttgagatggagtttcactctgtcgccaggctggagtgcagtggcctgatcttgattcactacaacctccgcctccggagttcaagtgattctcctgcctcagcctgccgagtagctgggactatgggcacatgccaccacgcccagctaatttttgtatttttggtagggacgggctttcaccatgttggccaggatggttttgatctgttgaccttgtgatccgcctgccttggcctcccaaggggagtaatcccttggcctgtaatcctgggattacaggcgtgagcaactgcacccagcctattttttaatagtattcttgcatatataatgttaaaatagaggatgaagagtatcagtaattagaaatatgtttatgtatgcatttcaatattttaawttgcctaggtgtttttttttttccytggaagtttacattttcttgggcttgataggtgctttgaaagtacttgctgaatttattcagtggaaacctgtgaaattgggaagggagctaagttgagccagttatctgatggacatttagggaccctgaggactagagaatagtgccttatgtcattgtgtgtgtgtctcatagtgctttgcatattgctgatacccagtagacattcgytacttgattggagctagagtttttgccactaaattttgcttggttgcttctcatttcagacagtgccagtggcatatacttttcttgtttttcagctgctcctgctaaggccaagccggctgaagctcctgctgctgcagccccaaaagcagaacctacagcagcggsagttcctccccctgcagcacccatacccactcagatgccaccggtgccctcgccctcacarcctccttctggcaaacctggtaggcttccaactcccacatgtcatgtgggagaacatctygtctaatatgttccttcaaagggtaaactctagactgatgatggttctgaacaggccaggttggctgctttgtagaaagaattctagactttgtatccaaaggcctgctttgcatctcagctttctgttactagctgtgtgtctttaggctagtcacttaatttatctgaacagattgttcatctgtgaagttggagtgatactaatatacctcagaatatcttgaagattaagtaacagtacatatgaaagcactggcacaaactcagcagatgtttctttccttgtctgatgcagctttatcctcttttcattttcagtgtctgcagtaaaacccactgttgccccaccactagctgasscaggagctggcaaaggtctgcgttcagaacatcgggtaagcctctgaggaccactttcaggaaagaggcagggggcagtgttgagattagtggagtatgggtgtggtgatgcctacctttgaatgcctggcagctcattccctcaaccttgataaagggagtttaggatataacttcttcatagtcacataaccatcaaatgataggactagaacctgaggtcttctgaacacttgttcagtggttttcctactatattatgctaccagtgaaagccttgggtaagttaaatatttgtaggggtggtagcttagtaactcacccccktcctcccacgatgtcacacgcttcagagaggtggtttagtgagctctattcctatacttctgggatacttagctgtagctaagggataatactcagtagcaatagctgtcaggtgcagacataaagcctcaaggaagtatggtcaggattgtggttcctctgcctgagaatacttcctaaaaatatgatagcctcgaaagtttgttgctcatgaggttctgttccacaaatagctattcttatgcaaatctttatcaacagaaagtgccctttttcttatgattcttatgttggctagactacactacactacattcttttataaatgggttttggtttttaaatcactgtttctgagccttcattcttggtcaagctttaggcacatctgagtgagtagttttggcctgtgtttgcatgtttttgcttggaggagaaagggccaccacaggaaagggaagcctggagctcgtgtacttagatactrtagtccttggccatctactcgtggcaagccgtgttctttctgactacacggggaatgcttgacccagagagatcagattgtcaatgcttgttccactcttactttcaggagaaaatgaacaggatgcggcarcgcattgctcagcgtctgaaggaggcccagaatacatgtgcaatgctgacaacttwtaatgagattgacatgaggtagtgtctctagtccctcttatcccctaggcccctttttcttagagaacacgaacttgccccastccttatctagtgctrattctaaaactaacttgtcagggaagaggtatttgtttattgttttttgtttgtttgtttttgtttttgttttttgagatggagtctcgctgtctcccaggctggagtgcagtggcatgatctcggctcactgcaagctccgcctcccgggttcacgccattctcctgcctcagcctccagagtagctgggaatacaggcgccccccaccacgcctggctaattttttgtatttttttagtggagacggggtttcaccgtgttagccaggatggtctcgatctcctgacctcgtgatctgcccttctcggcctcccaaagtgctgggattacaggcgtgagccaccgcgcctggcctgtttattgttaactttcacagagtgagccgctggcttcttctctaattggctttcctaatactatgcctgcctcctccatgaccttaaccttagccttggctaggtgtagtggctcacacctgtaatcctggcactttgggaggccgaggcaggcggattgcttgagtccaggagttcaagaccagctgggtaacaaggcgaaaccccacctctacaaaaaatacaaaaattagccaggtgtggtggtgcacatctgtagccccagctacttggggggctgagatgggaggattgtttgaccccgtcacttacatattttcctaagtgattcagaatcgagtggatgaaaaggcaaagataggctgggcttgtctttcattttacccagctctgacagtgaaatggaaaacaagttgtgtttttaaataaccttagaatgttaaccaaaggtactaattcactaggtatgcccatttctgtagtgagctaattgttgacttacctgttttcttcaagatttcaatgtgttcaagtatcagcactgtcaggaagagaaatttgacaaacgtgttttgagtgcgtactgtatacagagtactgtactgtggaattcagtggggatagacgctgggcaccatggctcgtgcctataatcccagagctttgggagggtgaggaaggaggatcgcttgagcttaggagttggaaaccagcctgggcaacatagcaagactgtctctacataaaatttaaaaattagccaagtgagggctgggtgcggtggcttgcgcttgtaatcgcaacactttgggaggctgaggtgggtggatcacatgaggccaggagttcgagaccagcctggccaacgtggtgaaactctgcctctactaaaaatacaaaaattacccaggcatggtggygtatgcctgtaatcccagctactcggaaggctgaggcacaagaattgcttgaacccaggaggaggttgcagtggctgatatcgcgccactgcactccagcctgggcaacagagcgagattgtgtctcaaaaaaaaaattatgtatggtggcatggacctatagtctcagctacttgggaggctcaagtgatcttcctgcctcagcctcccaaatggctgggaccactacaggcatgtgccaccaggcttggccaatttttttagtttttgtagagacaaggtctcgctgtgttgcctaggctggtctcctgaacgtctagggtcaagccatcctcctgctttggtctcccactgggattacaggcatgagccaccattcctggccaaaaaagaatttttaaacaggtcttcaagagtgactagcattttgtcagccttgtggagaaaggtcattccagatgatgttaacagtgtagaccatgagatgggaaagtagaagacacatttgagaaattgtcaaaaatcatttctgttgtgaggattttgtatagcaaagaatggtaaagaaggttggatccttatttcagaatgttttgaatgccagggtaggagtttatatttaattcaggaagcaagtcaagtctcaggtcatctctttctttctttttgtcctgagggtttagtctgcgaatctacttttcattaagagaaatttgcttttctttgggaaagggtttgaaaaatagggagaagggagtgttttcttgatagtgcgctgtggcattgttcagagtagggctctgtgacctgttttactagatgcatccattctgttgggaaactttccgaagagactggatgacattcaagccaaagatttctctcttgttcataggatgtaggggaaggaccttgactaatgaatcacaaaggctgcagcttatgtttcagtgcattagggccaaattgtacacaaattgaattggactttgaaattctacccagtttcttaagacaaaacagtaaatatttgtggccctgaaagatgcagttggcccaacagctttgattggaaaggaagcgtaatagctggtctcctttcagcagctaatcaaggtgtcacttaacaatggcctgcggtcttgctgcagcctaatttggtttagatcgagtgccctttgggtcttgtgctgatcagctaacccataagggacctttctgagaccttctcccttcctctattgtcccagcctttgcctccaagggcagagctctgaaatagaagctacttaatgaccagacaataacatttgggcaggtttgagagcagagatgtttatcacatctctttccctcttctgcagctcttstgtcttgggaaccagtaatgtctttagggtggtaatcctagcactaaataaggttagaatcaggaaaacaagcattttaaacccaatcagtcccccttggaaaaacttcctttttcaaaaacaaaagatctgaagggggctgttaaaattgtaccacatcttacctttcatgctaatgtcgaattaggccattagagggagaaagggagaactgagcatttggscctgagataaagttaaattcaattttcatcgtagaactgcattactgcattccgataaatactgaggtttatgcagcaaagtgatgggaaagccatttctcactaactctgcaatgtgtcattgaaaaaaaaccagtcccaaaagaataaaggctgctcatgttgtaaaggcttttcagaaggcttgctgcttaatctgaagggaaccagcctaaaccacaagtggccacttttctaaataccaaggaaatcacagccattaaactaatsttagggcaagaactatgtcttaattagctttgtatcttggtacctggccctgaccctcacatgtastaaggtgttagtacctgtttggaagaataagtggatggaactgccaaccctggaaagatgaagaacggatatgactttccgtgggcctgaaagaacactgggttatacccttccctgcagagtcatgactgctttttcccgcatggagcctcatgtacccatgagctgtttattttagtctccactaatcaagagataggaggaatatcacacgggagttatactcagatttggtggggttttttttttttttttgtattctaacaagaaataaaaagaatattgcttattttgtagattttgtttatactttaaaaaattttttttcaggatggatagctcagttattcagggcwwggatgttggtgtgctgtgtgatctcttgttcatatgatgtgtcactgaaatctgtgacttctagaccatgaaggagccctgtaaagagatcaacccaccttaaagacagattgggcctgattcctgtagatttctttgtaaaagaacagagttactgtgttaacctcaggtagactatttcaaaacttgaactaaggtaatggtccagagtgagggaaaagctctcacctaattgtgtatatggattgagaaacctgtgtgaaagtcaaaatgcaggctttgtggtcagtttgttttgtaatrttttcacagtaacatccaggaratgagggctcggcacaaagaggcttttttgaagaaacataacctcaaactaggcttcatgtcggcatttgtgaaggcctcagcctttgccttgcaggaacagcctgttgtaaatgcaggtgagttgcttgtggctggaattggagaggtcctgggaggtaggtgtatgagcacagacctgctcccacatgcagaggatcaacagaccaaggctttttatttgctacctatagaaatatcagtatcttccccagggatttcttggttcaccttcctgaagcagcatcatgattactttctacccgccagctgggcagaacagtttctcttcccagtgtacagctcggcagctgctcaggcagcaggcagttctgggatagcccagctctccaggctgtctcctgtcaaggtggaagcacgtgttctggcttcctcccctcccccagctccacaggccctgttaccttggggcctgacttccacagttggtgtaggctcctggctgacctttgatcttaggtcgatgggcctcactgggagcttcggcttggcctctcatggacctggtgcttattttctttccyttttacttacctacgtcattgtagtgttgacctaacaagcactttgttttcctgttgacacrcttctctgttccttgggagattggagaggggtcagtgctacttttgccatcctcagcagtgtcaggggccctaaaggtctagaagtagaagccctagtccctcctgttgagtggtgctctagggwggtagaaggccatctttgttttgcccaaatgtatacctcttctttttcccattcttctcatgcctccctgactggctctcatctttttcagtggcccccttctgcttgcccacacatgtaggcggctctcaaaagttctcgtggcctctttttcacattacatgcttcctctggatgtcttatctaacaatacaacatggactttctgcggaaatgattcccaagcctttattttcccattagttgctaggtgtacattttcagatgctggtttgccatctcttgaggtagcatatttcaaagccagatcaccccgcttactcttggatctcccctcttcctcttgttgagagttggaagcagagaatgggtagtatctctatatcccttttcctttgctaatttgcccttttttggaacatttgttaaccctagtcattctctgctaaaggagggcttgactagagctacttaacgagagtttagtgcatacctatcctatggaagccagtgtgttgagcccttcttagggctgccaaagaaatggatgctcctatgcccaggctcagtcagggacttgggagatactatayttgggatgggagtawgtggaatgccagctgccatgcataatgcagtggtgttcatggtggttggtcagcccacactgtatcaagctctgcagatttttactctgttaatgcacatattacctcattagtcttggccttcctggggagttgtatgtaacatgtattttctctctcatagtgattgacgacacaaccaaagaggtggtgtatasggattatattgacatcagtgttgcagtggccaccccacgggtatgttggggcaggaggtggggaatgttggtcttagaccctcaccttatctgtgtgaaggagatcacacaagagaaatcatttctttaattctgtatttttagaagggagttagtaaaagtaaccttttttttcttttaaaccatgccgcattcttttaacactttctgttaatcacactgagtaatgaaggtattctagggagggcataccatgggttgaatcaagggagttgttaactataaaaggtactattaatttgcaactgaaaacagcttttcacccccttcagggtctggtggttccagtcatcaggaatgtggaagctatgaattttgcagatattgaacggaccatcactgaactgggagagaaggtaaagtagaaagatgtatacaagctgctaagcaggcgagggaagagagccttcagaaggctgggctcactagcaagcagtgctcatggaaagtcaagtgcatagcccctgagaaaagcagttgcccatgagagctaagtattttatatatctggtggagtttaccatgctctggtaactgaaatctcatcagatgagacctgctagaaaagatcatctttgaagtcktcaactgtatgaaattgtgccttttctctggtggagcactggtcayagacaccttagccgaacaactgtcacacggaagctagcgcttgtgccatcgatctcgatacaagctttctggacttcctttgcttttttgtttttagaggcagggtctcgctgtgttgcccaggctggagtagagtggtagagtcatagcttactgcagccttgcactcctgggctcaagcgattctcctgcctcagcctcccaagtagctgggactacaggtgtgcaccaccatgcctggctaattcttaagttttttatacagatgggggtctcactatgttgcccaggttggccttgaactcctggcctcaagcagtcctcctgcctcggcctcccaaagcgctgggattatggactgactttaggtgaaggaaactgggktggcttratatttcaattatgaaatctgtttttaggcccgaaagaatgaacttgccattgaagatatggatggyggtaccttcaccattagcaatggaggcgtttttggctcgctctttggaacacccattatcaacccccctcagtctgccatcctggggatgcatggcatctttgacaggccagtggctataggaggcaaggtaggaaccgtcacttctaaggtcctagtggctaggtctcgatgaaagggaaatccaactaaatgctaattgtaaaacattaactataatttcaggcctaagttccatttcttagtttctaatagctaaggcactgattatcaaattgtggtctggatcagcatcatctgggaccttattagaaatgcatattcttagaccccatcccagacttaaagaagaagtgcagatgatcctgatgcatattcaagtttgagaaccactgagctgaggaggcttgtttgcttctatggagtgggggatatagttggaaacgtggtcccttgcccctgggaaacagatgacaattatgcatgtcagtctgtgagctgccaagttgtatgataaagcttgtaaatttcccgggagttcagagaattaagtattaaaaggggcttgagctggcccttagaagatacgttggtatcaaaaaagctttctgggaactcctgtgtttagaatccttttgggttactgactcctgtgtgaaaccacagtctgtagatcttcctggaaaatgcccatacacccarctacacatacaattccagaatttgtagaccctggcttaattttttttttttttttaaattctaaccccagagagaagcaagtasaggcagccagaactgaagggaaaactttccttgtaggcagcagatgcgttagagggcagagtatgtttttaaaaaataaaaggcagttgtgagaagayagttttcttggcaaactttgtttctgagtggggaasstttgcactgagggtaagtcctggtctttgaaatactgtaaatatgcagaggcaacatcaataggaaaggctctggaattaggaactttcttatgggctgtgctaaatctccttcagcgaggctggctgtggcttgctggagacaaacctatttacctttcctctctgtaggtagaggtgcggcccatgatgtacgtggcactgacctatgatcaccggctgattgatggcagagaggctgtgactttcctccgcaaaatcaaggcagcggtagaggatcccagagtcctcctcytkgatctttaggaggaacccacacaccctacaarttgatcatscaggaactgaaaaccagtcttctccctgtcccctcatgggtcccrggttagcctggtgacaggcagacacatgctgttggcctcaagcaaggaagcagagcactrtgtaaccagcagtcacagstyttttcttggcgttsstgccwggctctccctctctgcacctgtckcatascctcgaatatcttaattccttaggcttaagagagagagccttaatggatgctcattcatattcctgcctttcttccatcagctctctgcaaagatgattttgcttytccctagtgctggtatactatagagaaaccccyggggaycatgtgattaagttcctatcttttgaaagtttgttctgcagagacttctaggaggatgctgtgcctcccaagctcakagcagcctctgtcctggctgtgcacattctcccttgattccacttgtgtggagggattgarcacaggcamagaggtgctgctttgcttcttcaatggcaccttcattctccgttgtcattgacttcaagatgcctcttctacctcttccaggaagcacaggccaggggatctgggtgtgtgagtgggaggagagggcagaggtcccctgaggtcatgcattgtaatcatcatagaaggagagcccaggcctgccctcacgctctccatcataggctgacaccaagaagactcgtcttggcacaatctcacacagctggggctgtagcaaccctttccaacccctttgctggttgctgggcctcattctagcaccttgttcttagagcagattctagcacatcatggcagtgggaccaagcgtggtcccgaggaagggccagagcctggtagagaytagggaagggaggtctcctctaractgactcacattgccttgagcttttcagttaagttgctgtaagcacctgggctgaggaggcagtttttgttccttcctgcgttatagcggggccttgtctcttcctctgcaggacacagatctggaggacgtggactgsggtaggaaaccaccctgagggtgttagtacctagtggtgaaayggatgaggtcatttctaaggtgtgttgcccgtggatctgggcacaatcattggaattccttggagccactgggattcatggctttgtatccaactgcatccaggcctgaggctgctgacgtttgacaccagggccagtagagagtgcccttttgtatcttaagccaagaagtgaggcctgggggtgggggaggggggaaggggtgggagccaatactgagtgcctgcagcatctactactctgtcttcactattcagaacttgtaactaaagtatttaaagaaactgattttaaatgcaaattaaagggcagatattctcaaacagggttcctgtatctgttccttttggctactgaggtggtacaagtccccagcactgttgcactgaaattattgaaagccactcaaggtcctgttgcttattttgtgaaatcagaaatcccttatgtggaacttaacactcataatttgacagaaggtagaaccctgactgccagccgggaaagtgttgccaaaaagagtcaacctctgtaaaaatatttgaagagatttattctgagccaagtgtgagtgactgatggcctgtgatacaactcttaggagatcctgagaacatgtgtccagggtcgtctggctacaacttagttttatacatttaatacattttagggagacataagataccagtcagtacatgtaagatgtacagtggtttggtctggagaggcaggacagctcaagacctggggatgttgtcataggcagaatcaaagattttctgattggcaattggttgaaagagttattatctaaagacctggaatcaatagaaaggaatgtctgggttacagtaaggggttgtggagaccaaggttttatgcagatgaagcctccagccagcaggcttcagagaaaatagattgtaaatgcttctcatcagacttaaggagcctgttttaacagtaattccaaaagggaggggagtataatgaggaatggctggctccctcttcccaccatggcccgaactagcgtttcaggttaactttggaatacccttgactgagacgaggggtccatacagatggttggggggcttaggatgttttttgttttgtttccataaagcatcatagtctcttagtgccccaccttccttgagcctgtcaagccatactctagaatagagaatttggggtcaccatctttgtgaagccctttcaaaacaccagtagacttgcattttttgtgtgggcttacattatttcagtgatggatttgggaggagtgggggcatctcatttcatttggatttgatagccttgtggaccaagatgctcaaggtcaatacacatgaacaggtgagggttgatgacctaggagcagtggtcagtgagcgtgagtgtacagggtgggtagctaacctagactgcaggtggcaggtgtgatggagtccaggcttaaacacagccttgtcttttccagagtccctgtctgctgagctcttgcagtgaggccatccctctgtgaaggtctgtcacaggagggaagtgggtcccagagagtagaactagagctctagtagatagaaaaacaaattaggttgaatgaaaggaagaacaggatttggtgttagaagctttaatttatctatctggtaaacctgcaaaataggcattatttaccccattttatcgaaaggaggtcgactgtaagagctgggacccacagtattctaaactcagggcccaacaaagtgtcagatgtgtagctttgggtggatgaagcacagaagttccagaagggacttgtgcttcatgaagcggtggttggaagtggtccagcctgacttagggagagtagcagaaggaacactaacttgcaactctggctaggttgtgtccttaacctttttgagcttcagttttctcaggagctaccgtctgttgcaaggggtcactgtgaggatgaaactggtattcccccaggcaccatgagcctcttccaaggcttcttcatcctcttccccacagaacctggtcctccccgaccccaccccttcccctgaggcccacatggcatgctgctcaccaccagccctgcgtcctacttcctggcagccccaagctcgctcttgacttcactctggagcttctacaggggagccttccaacctgccccaatgagccgtggtcattgcatggaagaagcgagaacaccgtaggccagagcaggctttattggggccgtgtaaaccccagggagaggcaggacgtggaccacagagagtcatgtacaggctgcgctttcacttgtcttctctgtctcagtctcctgaagagcccgaggaagtcaagtctccccaccatgagtgaggggtctggtctgacagttgggccttcagagccaggcacgtggaccgtgtcagaagcgccacctggtggtgactgggatgctggcagggaggagctgagggcaaaactctagtggaaatttcccaggtcggtcccacgccccggtgacagggtgaaccctgagaggagcccccaaactggaggcaattgtctttgaggtaaccactcaccccagcttttcagagaccagaggcaagacatttctggctaagagccatggatagttgttccatgcgttttgtggtttcttatcccaaaagggcatgaagtcacagtaggcagtgacatggtaaacagccagggcctgagagggagtcctgatgggcacaccttgtctaaactgctttggcctggaagctgaattgctgtcctcttgcacccctggggcaggctgcccctcttcccccacacaggcccactggggaggaggactcttgattctggtttcagacttgctctaaggggcagacccatgcattccttcctccccccattactcttattttcttcccctcccttttgctctcccaagtctgaaatcacaagatagggggcatggtcaggaatcgggggtgggggggtgggggtgggggtcatcctgtcccctacctcatccctccctgcacaacagatggcatccctgcttctgggcctccccagctgcacgaacagcttctggtggaagaggcctactcgctgtgtgactaagaggactagccaggacagtctggtttgggtccactgagccagtggatcagtgtcctgagatgagtctccagagatgtcctgagtggggcacaacatggcagtgagtgagtcacagaacctcacagtagggtgcagcaggtggtcaacagctcagcgccagtgccacagaaggcaacctttaacatggtgagtccacatgctcaacgggtctgttgactgatgggtagatggttcaagctgcttagcagggcaagccttgactgcccccacctccagcttttccaggagctggcccttcctgggtggtggccataattctgaggccccagtgggagcccagcaggacagacagtgccctccattcctcgcccaaagcccgctgatagagggccagccctgggttgggtgtcaggcaaggaggagaggcgatccagaccaggccagctgcttccgtcacccgctctgccctcttaccccaccagcttgctccattggatggtactgaaaaagggatgggacttgagtttgctgacaccaccttctcccatgcccaggcgccgggtaggctcgaactgcagcagctgcagagagaggcccagtcagctgggccactccagctgtggaggcatggggtgacctccagggactccaaccactatggcctctagggggcctgctccctggcagcctggcccacagaacccccattttaccctgggaacattggtggtggttggccaccaacatatagaaatgtgttgcccctactgccctctgcacccacatcagacactgagcacgaagcacacgtggttcagacacagttctgtgcccctcccagcaccttcctcaggctaggcagctgcttcctctggccgggctacacctcacctcagtcagcagagaggccgctgggcgactgagccactcgggcagctggagctgggtgtgggcctggattcctgaagggtggctctgggacagtgcctgggaggacacagggaagggcctctgaggaggcaaccccaggaccgtctacactccagtggcagccaggattttttttccccatgtcacagcccatgaggaggatgacaataatgatagttgctacagccagacacagtgcctgatggctaagcagtgcctttatgttatccacgaaaggcaagaaacaggcccagagaggtaaagggacttgtgctgagttcagggtttgaacctaggtctcttggctccaagcttgctagaagcaactatcttgggttgcaatcagggcaggcactcttgggaatagtgatggaacttgtctccttattttaaaaatccacacgggctgttcatttggcagcaggccatggcatgctaccatcggggccaaggcagcggcgtggcaataaaagaaaataggacctctccacaccccagaaaggcacagctttgaggagcagagggtctgtctggagggaagtatgagcttccaggaacccccaggaggaaggccaagagctctgggctggagaggtgggaggagacaggaaaagagagagccactctgggggaaattgcagccaggactttcgggaccccgtgccatgggacgaaagcaggagggagcctggatggactggtcagctctggacttcagttcacgctgcatccatttcggctatttcctgctcaaatgcaatttggcctcccccttgctgcctacataactggcctcagttgcagtgttcagctcatgaggggaggacagaaggcagagccatcaactgttcccaagagtgcctgctctgattgcaacctgcaaacacaggttcccggagtgtttgcagggggatcttttgagctcttggctgacccaggctggacagggcagctgcttgcctgggtgaaagagcccctctctcccatcctccagctaaggtctgggggtgacagccaacgaggtcatgggtgggaggagtgaacagcgggctcaggatgattgaacagccttccagggaagaagggctgtgtcacattccgcgcttcctccaaatctgacaccacctgggcccaggctctctggcagaaaccttccctgaccatcccactctactcgtattcatagaagttgacagtctccttagctatagccaactaatgtgttgggagtgctaagtgtgtccctggcttcgggggcagttgtgctggtaggacagccaggcagtctctgcccagactggctggatggactaagcctggcccatcccacactcagtggcacccaccagggcactacacccagcccagccactcaccattcccgtcagcagttcatacagtagagacccaaagctccaccagtcacaggcttccgtcagctcrgaaatcccacccacctctgtgggaacaagaacacaggtgtcccagcctcacctaagagggcctcttccattctcctcagcctacccagacaccacccacccgctctgtcattctcagactctgggcacaacccacacaaaggcacccaggtgctaaggcccaccctggcctccccccttcttgcctggggcgctgtagagattgtccacggcctccccgcagcactggggctccacctctgaccactggccaaaatatgtgagccggatgtgacctccagtgtgtgggaggaaaaaggaggggacagattgaggacagctgatacaggggagggggttgcagggcttcccccaacagtcatgcggtaggagccaatggccttgctgggcagaaactcggcaggggcacagcaccctccacagaggcacagcactctgaggcccacagagcccacagggtactcccaggagcctcggccaacagactccagcctaggccccctgaaaggctggctggggccagggaggagcagacaaccttggaggtcccctcgactttggggatctctcgtcctctgcctggacgctttgggggccaccccactgaggggtgaggagggcacctacctgcctggtccaggagcaggttcccggggtggaggtcccggcacagcaccccctgctcgtgcagcgcctccagcgctaccagcatctctgccgcccactgcttcacctgctcctctctcacactccaggtggccctgccacagccccggccggccccatctgctgacaggcagctctgatccatgcctcggccacagccccctagcaccgggccggccccctcaggaacccaagtgagcccccgagggggcccagcgtctgagttctggccagccctcctagcttgaaggtgcaggtggccacctggggcctttggaaggtccgaggagccagaggtgctggtcctggctgtgggttcaccttcagcctccctctggggtctggtggatggggcctccccagctaggagaaggttcggagaagtcctag

SEQ ID NO: 95049 - DNA, 30421 bp, Homo sapiens
  misc_feature (1)...(30421): n = A,T,C or G
caaggcaaatgaaaaaaaacagtggatcaagatcttcaaagtactgaaagaaaaaactatcaatctagaactctatatccggtgaaaatatctttcaaacaaacatttttccacacatacaaaagctgagagaatttttcagtagccaatcctaaccacaagaaacatttttaaaaaggaactacattagacagaagaaaaatcatactatattagaaatacagatctataaaaagaaattaaaagactgaaaatagtaaccatattgatgaatatttaagatattttctcactaaatctcttttaaaaataattgactaagcaaaaataacgatgatgttgtatggggctcataacatgtaaaagtaaagtggtcaggaaaggagaaatggaagtaaattattggcaggtttttatacatgaaatggtataatatcacttgaaaatacactatgataaaggatgtatgctataaaccctacaacagtcactaaaataaagttactgtcaataagccaataaaggagataaaatggaattgtaaaaaatttcaattcatcaaaaagaaggaagaaaagaagagagaacagagaacaaatgggacaaattgaagacaaatagcaagacgtcatttaaatttaaccttgaaattttgaaaacctggcagagcacggtggctcatgcctgtaatccaagcactttgggaggccaggcgggcggatcaggaagtcaagagatcgagatcatctgaccaacatggtgaaaacccatctccaataaaaatacaaaaattagctgggtgtggtggcacgtgcctgtagtcccagctactcaggaggctgaggcagaagaattgcttgaacccaggaagtggagcttgcagtgagccaagattgcgccactgcactccagcctggcgacagagcaagactccgtttcaaaaaaaaaaaaagaaagaaattttgaaaaatgtaaatagttattttagggtactagtgtcatgagtgactgtattctctctcaaatttgttgttcaataataaaagataaagttctaagtcaccatgtttcatataaaataggatacatatgagtggtcagtgcctgtagtcccagctacctgggagcctgaggcaggaggatcattcaagcccaggcgttctagaccagcctcagcaacctagcgagaccacatctcaaagaagaataagaaaaaaaaagagtggccagagatatatgtatgtcttaaactaaaacaaaaaataaaaccaggctatgtgcagtggttcatgcctataataccagcgctttgggtggccaaggcaggaggatcacttgagcccaggaaatcgcggctacagtgatatgatcataccactgcactccagcctgggaaacagagtgagatggcctcaaaataaataaatgaatgaataaatacccacatactaacacagcttaaaaagaagtagatcactaatattttgaagaccccagtaccccgtctcctactctcctccccaagcaaccactatcctgaattctgattaatcattcctctgctcttatttatggttttaccagatgggtttgaaatcgtgaacaacagtatttgttgcaaatttttaatttttataaaaattaaatcataatgtatatattattatatggtttgcttttttcaattaacattgtatttttgatgctcatccatgttggtgtgtagctatattcattttcaatgaatccaatgaaaatgaattcattttcaatcaatccaatggatttcaatgaatccatgttggtgtgtagctatgttctattcattttcaatatatttttacattttcctattgatggccatatgggtaatttctagagctgtgctcttagaaacagtgcttatgaacatcttgtacatctcttgatttaaatgggtatgtaaaggaatggaattgctacattacgtttccagatataatgatcactctgtgttattagcctcattttattaataaatgaagatttatagagaccaggaaacttgttcaaggtcacacagctaggtagtaaagttaagaccaataaattctgctcctttcacttgaaaaaaactcaaggttaggtagctcatacttctggaaacatgtaattatcaaacagaatcctgatgaataatgttttatcttgtttaactaaagttaaaagaggaggtcctagcaaattattccactcaattctaccacttgaccactcaaagcaacttgactacataatgatcatgattaaaacttttatcctattaaaatatcctgtatttcaccattcctgaaaattccagtcaaatgttatagtttaaaatgtgtacaaattgtgtatgtataaaattgtaagacatagtaataaagtggttctcattgagactacagttttaaattaaattacaagcacttttatttttgccataactaaatttggaattactacgtttaagattcactaaagtgaatgtaataattatttttaaaatactacatattcattttaagaaattacttgagaatactttcaaaaatgtcctgcatgtcacttaagccaacaaataatttccaagatacctagcattacacttaaattttaaaaagggtaaaaagccaaagttttttttttcagctaaggtcaactatttagctctgcaatctttcctttaaaaaatatttgtaataatttggtctctgatttatttcacaagtcttaaccttgctttataaataatcctattttcaatcacactccattatctaacatggctgtttactaaatacatgatcctatggtaaagtacatatttctaaaaatgtagctacttagacagacagcaatgtaaaggcatctttacattatagtactctctaaatattacattgttactttcaacaaaaaggaaccagattataacaaaattgttataaaatagcttaaaagtgtaatagaacttcattaaagaaaacattaagatgaatgagttttaactagatctataacaattttatatatgctagagataaaattaatatgaggttaaataattttcttttttttttttttttttgagacaggatctccctttgtcgcccaggctggggtgcagtgatgccagtgcaacttctgcttactgggctcaagcaaccctcccacctcagcctcttgaggagctgggactacaggtgcacaacaccacactcagctaattttttaaaaattttttgtagagacaaggtctcagtatattgcccaggctggtctcaaactcttcgactcaagcagtcctccggccttagcctctcaaagtgctgagattacaagtgtgagccaccacgcctagctgtggttaaataattgtatactataaaaaagcataagatcttgtgagttccaaagtgccttgggtatcaagagccaacattctatttcagagatktgaaacttaatgatcctttaatatctttgctggatgttgttagaatggtatttcaaacattttctacaatttgaattaaatattaccttactaaataacgcgaggctgggcaaaaaaaatgttaagcataactccaaatatagcataacagtttaatgctctgtttgttgccttaacaaaaaatgaatgtctgcaacacattcacaaaccacctggagattcaaactcacagtgaaagtgcaatgacatattgtgctacttgacattagctattaccaaagacggttcaaaaggaagagaacacagacaatcttattagtataattggaaatgtgctgatatacccaccttaccaaacatcttctcttgcagtgtattatattacctgagaaaagtaacttacaatcagtgctaatatgctccttaacctgatttacaagggcaactagcaataaacagaacaaggcccgtgaactaccacacaggtgacttcaattctgtatatctggactggatgggaatacgggggcttacatgtttgtggccttcttggagtatgggaatgtcctgtcctgctataggactgcagtgagaattctggttataaaaagtctcccttgtaaaattcactgtaaatcgaggacaaaaatcatgagattgttttgttatactttaagttctagggtacatgtgcacaacgtgcaagtttgttacatatgtacgtatacatgccatgttggtgtactgcacccattaactcgtcatttacattaggtaaaatcatgatatttttaaggacaacaacatggaaaaatctttctgttagcagctagtagaagaattcatttaggaggataatggaagaaatttttcgtaactgctcagagtaaaaagtaaaactcagagaacctaggtttgagaataatgcacacctactaattcaggactagacacataaatttgagagtttttgacattaaaagtagcatttgaagtgatgcaacttatgaattagctcactgagggatttagtatagacagagaatacaggcaccccaatgttaagagatcacaactaaaaaaaatttagaaactccgcagaactgagaaccagtaacaaaagaggaaaaccaggaaagtatgttgtctgagagccaaatgaataaagagatacaaggagagtcattcaggtatgatattaataaatgctaaaagtaaagcattacatttctttccaaaaatagcaaatcctccaaactgaaatagagaaaaattgaaagatattacttggcattcatttatcagtgacagagaaaaaacggaagttctaacaatgttatctaatagagatgttttattcattttcattacgtatatgctgtgtatgctactcccgagcatcatatcttccttttaacatccacaagaaacaagctttcaaaaagcacagcaattctcttggcagcattaattttaaagagaacctcttaagttgttttaccagctgagactgactgactaaacaaccagtgtctccccttcagtcgccagtctttccttagaaatgcctgtttggcataactttaagactcaagatggtttaaggcgcatcctgtttcttccaaaagggaatggacaaaactcaacattcacggagggcttagagcaaattagaaccgtatactgtgacctcctggaagggagaggctcacctcctacaaagtaaatgctcaataaatatttttgatataactctggaagagctccatttggggtcgggggtgcacctactccagggcaccaccccctccaaaatagctgcattcccacagccctcatactccgctcagaaaagggaccggcgagcttgcaggcatccgcacagcggataaaagcaaagcgggacggcgcaccaaccgcattccggatcctaaggttaaaagaaaaccccttgccctcgggccagggctcacctgtctcgggagtggggaagaagcgcgactcccggccgctttggagtaggcgtcccagcaaaactctcgcctcatcaccagacactaccccgggcagaaggttcctaggctaggtcctcggacccgagagggagcgacacgctcgcttggtctcttgggtctccaggacgccgccgccgccgccacagtttcctcaggtgctacaaagcagccagggtgtgcgtgcgctcccgcctcgtcgcttagcaacctgagaagctgtccggtcgtcccaacttatcaattcccccgcccctccagagtgtcaatcgttttttaaaagattttgtttccgggtcgatccagctttacgcagcggaaggtctctttacctcccacgtttaccctcatgggaggatgcagtctcagtcacgcgcgtgggggtgatgtcgctaaggggtgattctcccctccctagagttacacacgctmtctctcccgccaattgccgggctccatcaggcaggtcctttcctcctgagcccaaaccatccgtttgttgtcgtcctccaatcacaggggctcatcctcagggactactttgcaatcggcgcagagcgcagtgagaagagcttgaaaaaaacctctggtatcgggaagtgtagttcaacacttgaaggaaatgctttggagattgcgccacaaccagggcagcgtaaactacagttcccagagagcgccgcgtcgggagcggagccttttctcgctaacaccgctcgccctctccgagtcagttccgcggtagaggtgacctgactctctgaggctcattttgcagttgttgaaattgtccccgcagttttcaatcatggtgagtgtgggccccgggttcctgcccacctctggccctcgcgcccttgagtggggtttcttgcactttagggacttttgggaggcagctgtgcaaggcactgtccttcgcgccctttggcaagctcggactcatcttctggggattgccgcagtgacccagtaatgggaagggattgatttccaccttgcggggtatggggcgctcttaggaggactctggagaagtagttgtcctgggagaggagcgatcttaatcctgctgcatgacgggaggacaaaatgcgacgctgcagctattttccaaaggacgttacggtgtttgataaggacgataaggtttgcgatgggagggaaaggttgggtcctaacccctttttctcctcatttgcccacagtgtttataacggcttttgtcacagggaccttgaaagcaaaaagctggaaaggtagtatttaccaggtgctccagattacgatctgcgtttgcaggagacgtgtttccgccatatctaatttctcaaaatgttatttggaacccgttcattgaccttttttgtaatgccaggatatattgaagtgacagcatcactaaccaaataactactgcaaatattctttattgaactgtatattgtgaattccagaagcacctctcttaaatgtaacagagtaaccattttgtcatggaagacctgggtaacctgcatctccatcgcttgtctctgctgaaagagagggggagggggagagttggtgaaggaactctggcgtaggaataatctgcgtactgcttgaaggtgacatttgtcatcaaactcagagaaatcgcttcatactatcaatacaatggcttgtatttatagttgcgactgtttttcctactttatctgcaaaatactaaaacggctggagaatgtggagaaatgtttgaatgaattggaaatttcccagaacctgaaaagacacgttttcaaggcaagggcattactctctctgcctgtctaacggggccagtggagacagctactaatttccagtaggtgttaaacctaggtttcctaaatgttttgtcacataattagtcatttaaattatggtttcggtagtttctgtcctaataaccttagctagaaagcagaggtacttattatctgataaccttggactttttgcttttagaactgaatgggatcttttaaaggtcatcttgacgaatctccccacttcagatcttaaaattgagtttatcgagacccagagagaatgtgatttgctccaagagtctcacactcttgccatttttctatattgtgtcttacacttaccaagtctttctgaatttttatttttatagggaccaccgcagtgaggtctcgcagcgggggagagacagtgtactcaactccctgaaaacttatttttactagctgagattccggatgaagttaccagttcatactgcatatacaaactcaaatatgttatcagcatgtagattacttgatagctttattccttgccattcaaaatactggaattgtagaattaaaagggaatttggagattatattatctactcttataatgtagtctggtgaggtcagataattttcccaaggtcacagagattttgggccccagattcttagctagtttccctagcaaggccccaccgttggaaggtcactggggtgccagataacacagagacagaacatgaggaagaatttgtctggcagtttgctggaactgacagcaaactcacacatgactcaatttccctgccccctcaggagggtgtgtgaatggacagagttagaaaagagccttcttctgtaagctcattcaaagcggaggattctttgcttgttgtctgtagggagtgacagcaaaataaactgtatgaaggaatctaaatggtactgcttagttttttgtgttatagaaatacatgtaatttagaaatatatataaatttgaaagtgaaaaagaaatatgtggctctgtctgtggaataacagacacttaaattcaatctttatagctgagaagttagcacagagcctgcatctgcaggaaagtcattggtgccctgctaagagcaaagacgttccttttttggaccttggcasactgcccagatatctgagcaaagaatagtaacctatgttcacactataacattgtgaaagtcagcaggactctcccaccctcctgcttttcaactgcaatgttgcagaagagcagaaagaaccatacatggacttttctttctctgtttcatcttcagacattcaaacactaagcctcatactaccattaataagatggaattacctacctgggaaagtaatttccccaaagacacagaagaaaactgctgaggtggaattaactgttcattaggtggccacaaccccttcactaaggactgtgatactgtgaacatgtttttaagtagctactaaaattgactgcattattctaaccatataggtgaccttatgggaagttaaacttaatagatagtgatcttcactctcttcagccccccttttcttatcctagtttgctgttcattgaagtagtatctgttcatactttataccctaaccttccttcattcaacaaatactttttgtggaaatgcaaatccatatcaaagacagactgttctcaagagcgcttcatggcctaatacagagcaacagaaatgtaaatagaaaaccacaggctattaaagtctttagaggaaaattctgtgatgatatttataaatactcactacgtactgttcttagtgctttgtgtgttaactcttttaatccttaaaactactctgtttgttaggtaattgctattattatctccattttactatggggaaataatacagaaaggttaagtaacttgtcctagagcatgcagttaatgagttgtggagccaggacttgaacacagaaagtctggctccagagtccatctctttaattactactctctactgcttctctagccccctgttttagaaaattggtgtatcctttttgtttccttcacgtgattcaccaatggattccctggcctaaaatagtaccaagtacatgataggaacttaatgatgttttgtttaatgaatgaattaaatgagaaaacagttcatcartggatttataaggtaatatcattagtactaatgacaattttgttagctatagttggaactattgtggtcactaagtttccagttttctcaatacataatatatatgaataaaataccttttgttttcatagtatatatgaaaaagtttttgtttgagacaggatctcactctgtcaccaaggctgaagtgcactcacacagtaatggctcactgtagccttaacttccaaggctcaagtgattctcctacctcagcctcctgagtggctggaactacagcatctgccaccacacccagctaaattgtttttttaagagacagggtttcactatgtagcccaggctggtctcgaactcctgggctcaagtgatccacccgccttgtccccccgcgcaatgcgctgggattgtaggtgtgagccactgcactcagcctgaaatagcttaaataaataaaatatcttaaaaaattttttaaagcacgttacatatgttttcaaacagttcttatacatttccatctttttgatagttttacaggacccagctattccttcaagcaaataccagagttccaactacaggacaggtgttgttctaggcaattgagatacagcagtaaataaaatagacaaagttcctgtccttaaggatctcgtattctaaagggaaagggagtaataatttcttcctgtattcccttttcctcacctactctacttcaaggaaagaagggaaaatgacagaatgaaaaacgtgtaggccattaaagatttttctataaatagtaataaattagaaaaaaaaaattgtgtagtatgtagttggctatgatcaaattcatttctctacaccagttgacactttttgttttttttgtttgttgttttttgttttttttttgagaaggagtttcgctcttgttgcccaggctggaatacaatggcacgatctccactcactcaacctctgcctcccgggttcaagtgattcacctgcctcagccttccaaatagctgggagatgcctgccaccacacccagctaattttgtatttttagtagagacggggtttctccatattggtcaggctggtctcaaactcccaacctcaggtgatccgcctgcctcagcctcccaaagtgctgagattacaggcatgagccaccatccctggcctgacacttcttttttgaaatttttttttttctttgacttctatgagtgagtaccaaattgctgagtgctgctaactttcagagcttagtgtcagaagcttgaaagaagccttcgaggctatccatccttgtttcgtctcagagacgtgactctcatctggaagaaggaactttaagtaaaaagaaaccaaacacttctgggcttagtcacatcagtggaccatttctccatgcaggtaggggtaaaggtgacagtggaagtacatttacccagcattatcggggaaaggaatggttcaccttaactgaatttttctgtctaactaaacctacccattacgtttctaaacattattgttttgttctttttaatagatatatttctatcttttaaaattctgtcagcttagtctttttttactcagagtcatcactttgaatatcagttatctttgtttctatgtctgtattttgttcaggaactgttgaaatctctgtttgtatgtcttccctccttgcttttaaaaataattttcccttggaatcaggttgtcagctgtctgtcactacatgttgctgttgtttctcccgaaataaaaaatcttgtttttcctcctccagacaaagttgaagcacgattaattgtcttatttaaatgttttggctcaatgtaaatggaaagttttagcctctttcactcttcttcttggtatgaagattctattgagcagatgggagtgggggctttgcataataaggatttgtgtggctctagtggctgccagggtttggatcaccacatactgaacacatcaacattgttgagcctattttagtggtaaaatatcccaaaaaaggtggataagattatgtaagtaaatccaggataacacttttagctccctacatggtgagagttaaataacaccacgtaaatatgcagcacattcattttctactgagccagatgcaaaaggactttaaaattttacattcacttttaaagtatgtggatttcttactatagattaaaatcctggatatttttaaggtacagtagtacttaaagatgttaatgggtctttttcattacagtctgaaccaatcagagtccttgtgactggagcagctggtcarattgcatattcactgctgtacagtattggaaatggatctgtctttggtaaagatcaggtaggaacaggtgtctataaatcttaagttattagagtaagaatatggttaataaaaatctgtatttagttgtacacaaattgttaaacagtgaaggaatatgtaatcccagtaaatgtaataggcacattgctataaatggaagctactaasgtatttatatgtacgcctccaggcactgaaaacactttgcaaatgagaactcttccatatattgtactcagttgacttggtgcaaccagcaggtgtcagtcaatgggagatatcactaatgacagtaacttacagtcatgtgggagagagttactcagtaagcactcccttgttcataaatggcctttggaaccaaaagagtaaggaaatctgcttccccgctgaagcaggcactccgacttccagcaagcctgattaatatacactaaaatccttttctaaggtattcatttattcagtttcttgacccatggatactgaattattctttcatgtcagatactgtacttagctttccatgaactgaaatcaaatatacagctattaacaataagagcaagctatagcatgtcactcagtttaatgtttttttcatatactgttaaaattgagtagtggtgattcctctcactgtgtctgttagcaaaccaatgctggttttatagcatccttctttctgaaagtggcatagtgctagatacctgacctcctaaaataatcatcatgactaattaatgggaattacatgcatgtacataccaaataaaaactatgtgaaaagactttcttgtgtctaaatgaaatagcctacactaacagatgctgtccttgctatttggtagcctataattcttgtgctgttggatatcacccccatgatgggtgtcctggacggtgtcctaatggaactgcaagactgtgcccttcccctcctgaaaggtgggttggggagtagagaagggattttatggtatttgatttcttacaaaatacaggttttaggtttttgttaaaggctctcaattagaaattatttcataagaggatttttttattttgaactaccactgyttattaactacttatgtataccaaggataaataagggtaagaaatgagcaacaatcaatgtcaggtaaaggactatccttttttccccaatgtgtgtgtgtatataatttattataccagttaagtgtaatattgcacaagggttatacacctgaaattgtctacacacacacacattatagacaacgtaggaattgtctacattgtgttgttatggagtctgcttaactggtaatagtagcatcctgtaatggaaaactttctcagttttgaaggatgtccttcatagctatacattgctctggaagttggttggttcctcttacacggtccccatcccatctaccaatcatcaggttgagacatagtgtaaattgtccttaccatatgctctatagtttgaaaaaacccagaagagctcagctaagggcctttgcaaatcattgaactataacacagatataataaggaagccttaaatttgatcgaaaagtttattaaaatattctaaattaatttaaatatttttcttcagctatttcttcatcatagtctttcttttggtaaggattaattaatgatactctcctagaagtttgcacaaagcaaaataatacataccttccaagaaaaactttccttaaaattcttcatctgttgaataaacatttgctagaagggatactctgccatctaagtcttttggttgcaaagttctgtggaagaatacatgactgcccacactattctgttggttcccttttctcacccacagctctttccaaatcagctttgctgctttttcccatttgtattcctttctctgctgagttccctgtgctttttctctaaagggcccagattgctgttggtttgtcctctgccagatatgaatatgacagggaagggaaagttcagcaaataaggacatgtgactgggaaagaggaagataatttttttttctccaactggtgttcctgtctatgcccattttcagacttatggcagccttgactatgatgcaactagccaattttccagtgaaaatgctgaatgttggtcatagcttttttaatacaatcaacaaagaagtgcgatgacttatgttctttagtcaaaaagcaagtgatgtttgcttattgtactagcactggagcatagtggttgaactctggaccaacctaggctggaattacagctccattatcttttgatggtggcgagttaatctctttaaacctcagtgtctccatctataaaatgtgaagattaaatttgatagtaatataaatctcttagcattatcctggcacaaaactcctcaataaacatttattatttttaaatttgtgattggtgtcttagaccttaaagtaattgtaatttaaaggttaggtgaattagttgctcttttgtgttgtgtggtaattagtgtgaataacaagtgtcacttcaaaagtcatcattataccttgcatcatatatgattataaaagataaaagctatggagttttgacakttaagtaattattgaaacaggaaaagcaaaataaatctattgacatttctaatgttatgattgttaaattaatatattatctttctcaggctcctgaaatgtatatcagtgtgatatgtaaacacttgcaacaagtgaaagaattaatgggtagattcaatatgaaaaagaaaacttcaaactttgatgtttaagtagctctgcgtatttattgccatgtccacagatgtcatcgcaacagataaagaagacgttgccttcaaagacctggatgtggccattcttgtgggctccatgccaagaagggaaggcatggagagaaaagatttactgaaagcaaatgtgaaaatcttcaaatcccagggtgcagccttagataaatacgccaagaagtcagttaaggtgaccaatgctgtattttatgggatttttcattattagcatttgaaacttatgcttttagcatttaagcaaaaccaaaattatttgcccttttttctagttctgtacaatcatcagtaaatacggctctagagttttgcttgataagctctccctttctgggttttttcttacagtatagaaatctatattcagagtgctcaaaaatatttttcctattagtataacgtgaaaatttagtattagttcttaaacatatagagaaggcacaggatcttctggtgcatttttgctgcgtgggaatatttatttagacatttaaatttgtgtgtgattgtgaaaggagatagctagctgtaaggtaagtttattctcaggaatagaagatagtggtttctgaatgctcagattttcttaatgcagaggaattttaatatgcttgtctcttgaagaattgagtcagtatgacttatagttctctctttgtgttcaaactatttactttagattctaatatgtcttaatattacagtaagccttttttattttttattaatttttttaatttttttgagacggagtcttgctctgtcacccaggctggagtgcagtggtgcaatcttggctcactgcaacctctgcctcccgggttcaagcgattctcctgtctcagcctcgtgagtagatgggactacagttgcacgccaccacacccagctaatttttgtatttttagtagagacgggatttcaccatgttggccaggctggtctcgaactcctgacctcaggtgatccacctgtcttggcctcccaaagtgctgggattacaggtgtgagccaccacgcccagccaaaccttcttttattagtgaactatcaattaactagaacttaattgtcacccagcaaataggcttgccggttaaaggtttaactgatttccatatactttcctatctttcaaaaaaaggtgaaagaaaattttttaagattttttaagttgcccattataatgttctatcaataacatttcatagatatctgcattttttgctttctgtgcacttcattttaaatagttaacttattttctgtcatcacagaaaatagtataaatgagtttaatagaaatccacaggtgccagtaaaagattagaagattgttcagactgctaaattgcaggctatttggaggtaaagtactccttgcacagtaattccacytcttcaaagcgtccttgttcgtgagaaatatttgccagcactgcactacttagagacaatgaagtatcttgtctacagcttgtcaaaagaggtaccaaaaaaaaaaaaaaaaaagatatatgggagtcagtcyctgtaatatggttgtaacttttctataaatctgatattatttcaaaattttttattaccattttataaaagatttttataacttaaaatgcattttsctatgctatattgtatttggtgtttcccaagcctcccctgtacaaaggctacctgttagacattttcagtcaaattttaacatagattagttagtaactatatagtctgtaactcttcagtgccttccattcctcctaggttattgttgtgggtaatccagccaataccaactgcctgactgcttccaagtcagctccatccatccccaaggagaacttcagttgcttgactcgtttggatcacaaccgagctaaagctcaagtaagaaaaatatattttaaatcttgtggttgttcaactttaaaacatttttctctcacttttaaaataactgaatctgagtttgtgcttttttcttgtttktgtttartaggaacctattacttttattaaattaaaagtaaattattattcatttgttagggagtctttaaatgtattctcttaaaggaccagaggctggacttcctacttgatttcgtctttaactatatttcaattgctaactataatgaaatgcagttactaatgttctcttgttacagtggttaaaaattagttatacatgatggtacataatttagtttaattttttcagatacatataatctcatataaacaaagacttgagctttgtgtgattgtgtggttctgcttctattttagctgcagctaagccatcaaattcagattttaatttttaattttatatttaattttcattttatgtctttttaatattctatgtgtatctgtaaaatttcctmctttcactacttaggagctaaagtctgttgctaattttctttactcttagagccatagataagtatgccaaggagccagtgaccagggaattaacaatagcttttcaaaaaattagaagccaggcaactgatctgagctagtttcctaggctttttcagatctaactggtcctggtgcccgttcttggacagaacctctttcctttgccctaatgcttttctggccatcccttcttgtctgtaggtcatcactgctagataggtctatgagttcagtgctttttcttctagagaagataactttagtttcaaaaaaaaattgttgttaaccagaagatgctgtgaggtctaagctgaagcactactgccctaacctgagaattaataatccttcagctctggaatgcctagtgaaagagaaaagaatatacatttgttaagcatctactgtaaattgaatgctatacatgtaattttccatttaatttttatagtaaccatatgggtatctcatattatccctgcattaggtaagaaaactgaggcccagggaagtcagagaacctgctcagagtcatacagctcataaattacggagccaccttgatttgcctgactccaaacccttatgtatgttcttacctaatggtatcaactaaccttagtccacttactagctctgtgattttgagaaagtatattcaatgtttaaaatgtaataattgtatctacctcagagagttcttatgaggattaaataagatctgttttaagcccttagcatggtgcctgcacatagtaaatacaagaaaggttggctgctattattagttgatttcttctttctaagaagcatacagcctaaacattcctaatttagagggttgttggataacaacccttaaatttttagcttaaagtgcaaatattccctgagaggctataggctgtgagctgggtctggtggtagctgagaacgaataggagtttgtttgaatggcaggcagtttgagttctgtgggacagttgtaaaggaagagatattatacatgttacagttgcaaactctggattgccagaaagtgacttatttagttcctacaacaagaaagttcctacaacaatgacactaacaaccactttttgttgtttcacctgaggctttggtggagacaggcattggaaaattctgcttccaaaggtacttcaaagagatactttgtcctggtgcctgaaacagttctcactgcagggctcaagtctgaatgagcaaagaggaaagaaagtgctatctcctcagactttaaccttcacttggggacatgttctttgttactcctgggaccttggctaggcattgtttcagcatgtcaatctggcatagtgagagcttttagggagtcattgaagaagcactttcttcctctaraagaagttgtttatccagtgagaaaaataacaaacccaaagataagtttttcttacaggactggttgctagatatttttgtcttggaattcagaggccttagcgacttagggactgtttaacacctgcagaacttgcctgtgtatttgcaaaccagtgctgtatttatgtctgctgataaggtaatttgacattgataccagataaggtaatttgacaatgataccagttagcttgtaagaaaattactagggctggagaattaatcaaaaacttttaacagacctatgtgacagacatgagtgtctaagggagcaaagagctgttatcctgggtatgtattaatttagactaattgtgacatgaatcatattaagaaactatatctgctggatgcaaagtacctggcctttgctgtccagacagaactggattagctcaagagatagaaggagcaagaggaggagggcaacaagaacaaaggaaggcatgggagccaaggaggactgagggtggagaggcctagaggcattttgtcttcactgtacttgggagcattgaagcagacattcagggaagttataggctctaacttcctggtaatatatatcttgagttaattgttcaaggtataaatttatctttttctatataccataccagctaaatttaagtataaatataagagcagtttcttccccagttctttctggtcatggcagacgtaaaaaatggtactcattgaacagcgtgccactctaccctatcccacaggctaagcagatcaatagctgggtaccccagaaacccaactgtgaactaatttgtggagactaatgcaaatattgtagataatagtcctaatacttgcaagacttgcagggattagatcggtcaaaagtgatttacaatatcacaaacataaatttttaagtaaacttttaactattttaggatttaagaaagcagtctcaactagtttaagagtgggagtgaaagtaaagacagtttacttcttacttaactgaataaattagtatgaagaccagtcgagtcattgcagacattttaggtaatggccttttttttcatctttatccttttcggttggttggttggggtttttttttttttttttttgctttttattttgaaataattttagactcaaaagtcgcaaaaaaatagtacagagaaggcccatgtacccatcacccattgatggtaccttacataactacagagtattatcaaaaccaggaagttgatgaactacacaatactattaactagacttactgaagtttcaccagttttatattcacttatttttttctgtgtctttatgaatgattctatgacatttaattacaagtgtagattcctgtaactgcccccatagtcaaggtacagaatttcttcatcactcacaaaagaactccttcatactctcccttatggtcacaccaccctctgtccctgacatcatttttctgcactccacctctataattttgtcattttgagaatttacaaaagtggaatcatgcagtaaggaaccttttgagactggctctttttcactcagtttaatgcctttaagatccatccaggttgttgtttgtttctttttgttgtttttccacttaccccttttatttattccattgcctatgtaagacataatacagtttatttaaccgttcttttttttttttgagacagagtctcgccctgtcgcctaggctggagtgcaatggcacgatctcggctcactgcaacctccgcctcccaggttcaagagattctcctgcctcagcctcctgagtagctgggattacaggcacacgctgccacacccagctaatttttgtatttttagtagagacggggcttcaccgtgttggccatgatggtctccatctcgacctcctgatcctcccacctcggcctcccaaagtgctgggattataggtgtgagccaccgcgcctggcatatttaaccattcttgaacgacatttgagttgtttcagtttggagctgttattacccttattttaaaattttccttaaaatatcaaagtgtattccttttcttacatggtaaatactcaaatgctttatttatgtgtgctaaagctacagactctggcacaactagtttyttctcccattctttttgggacacagaggaaggaagaattgcccacaatgtcaccaaaacagatcagcttcttaaaatatttttccacattcccttctggttcatcataaattctgttgtctagttaggaacaaattatacatatacctgatcataatttattttctgcacataaacttatcagacaaataacaagcaggctgattttatttaaatctaccaagacatttcttttttttttttttttttttttgagacagtctcgctgcatcgcccatgctggagtgcagtggtgcgatcttggctcaccrcaacctccgcctcccaggttcaagcgattctcctgcctcagcctcccaagtagctgggattacagacatgtgccaccaagcccggctaactttgtatttttagtagagacagggtttctccatgttggtcaggctggtctcgaactgtcaacctcaggtgatctgcccgccttggcctcccaaagtgctgggattacaggcgtaagccaccatgcccagcccaagacataactttctaaccttttttgtggctactgtactacatgtgattgcaaggcattgcaggaccctaaagtgctttctggagttatagctagagattgttacatatgttataattttagagtgtatatatgtgtgtacacacacacacatacacatatataaaacctctttccttcagtttcctgatatataaaatgaggacagtcatatcttggtaatttgagtcctatscaactctaaaatttcatatttagggttatttgaaaattaatttctatatggtatataataaaaattttacctaaatataaagtgcctaaatacctgattactcagaagcactgagaagacatctccaagtaaacattaacagtgaaacaaaagatcacatttacatattcaagaaatagtaaattgataaataatagtaacgattaatgttttatgtttgatacacctactgtactaataagttaaccacaaactatgggatgcttcatacccttaaacattctactccataaggtttcaagtccacagttgttaccactgttaagctgttgtaggaaattgccaagcaataaatttacattttttacaagtcaatataactcttgtgttctcttgaaatttcagaagytttttatctttatttaagggcatttgtcaaaacaggtcccaattggaaataaaaaccatttgtctcagtaatgtatttgttttcaatttaactagattgctcttaaacttggtgtgactgctaatgatgtaaagaatgtcattatctggggaaaccattcctcgactcagtatccagatgtcaaccatgccaaggtgaaattgcaaggaaaggaagttggtgtttatgaagctctgaaagatgacagctggctcaagggagaatttgtcacggtaagaaaaatctgtgagccttcttaacactgagcgtaaagaactcttgagagactcttaggacagaaaaccttaaagagggcaggtctttcacagttgctctgatgactgcatactttcgggatcatagtaagccagtcatgatctagtgtgatctgatgtgacagcagttgagatttataccaagatccatgtctttgtctgacctatgataaactttgtatggagatacatagtttcctttttccagaaggattggtaaggctgacattgggttgttgcatgattttggaggggaaacattaagctctggtcatagcttttcaccccaaggtcgacttggaattaatgaaaactttgctatcatgaccaagtaatactgctgccttcacctgcccccttcccagactgtgcagcagcgtggcgctgctgtcatcaaggctcgaaaactatccagtgccatgtctgctgcaaaagccatctgtgaccacgtcagggacatctggtttggaaccccagaggtaaggatttagtgatttgcacaggtcactctattttatttttgttgcctgatgatataatataaaaagaatatagccttagcagtcagtcaggttaggttcatttctcagctcagctgcctattaacaagtaaacttcggggtttgttagccttgacctttctgagctgttttgtcatcttttacatgacattactattatacacagggttgtgagggttaaaggagattgcacatggaaaacacctrgcacaatgcctgatacatagtaggggtgaatttttttcttctatgccacagcttcctcatctgtaaaatgaggattaggtttccctggcctacttcacatatgatatggaagcgtggaatgaaataatatccatgaaagttaccttgtcaccagtacctggtgctgatgatagttccttacacagtamtgatgttatgaacatagtaagaaagggtcacctggtttaattttattagttcatgtgtcagttgtgtaaactaatcatcatgagtatgtgaaacattgttattttcagggagagtttgtgtccatgggtgttatctctgatggcaactcctatggtgttcctgatgatctgctctactcattccctgttgtaatcaaggtaaggtattttggagctatttcccttctttgaggaagtagttatatgtttctcttaagaatggtattattggccaggcacagtggctcacgcctataatcccaacactttggaagggcaaggtggcaagattgcttgagcccaggagttcaagaccagccggggcaacatagtgagaccccctctctgcaaaaataaaataattagccgggcatggtggcacacatctgtggtcctaggttcttgagaggctgaggtaggaggatcacttgagcttaggagatcaaggctgcagtgaaccatgacagtacccctccaccaggcaacagaacgggaccctgtcccccaaaaaagaaaacagaatgttatcacttaatctagaaaattgttcctttactaaaatagacatttttctcagctttaaaactatatgtatttcagcttcaggtcattnaaagtttttatgattgaaattaatctggaaaggaagattcagctcttcccactagacactatgttattatgcctctagtattagagacctacaaatagtatatttctaaatgaagcaatggttttcagtgttgttgttctttattataactgtgctaaagtcagtcatttttgaagttttttttttttagattcaangggtttaaaattcaagtgttgagtttttattagaattatctattaattaaaatctggatttttatttactttagaatcagactttaaaacgatatacctctaaatatargttcaaacaaggttgttgcttactgaaagatcagttccagtttaaatctcttatttgcattattttcaaacagaataagacctggaagtttgttgaaggtctccctattaatgatttctcacgtgagaagatggatcttactgcaaaggaactgacagaagaaaaagaaagtgcttttgaatttcyttcctctgcctgactagacaatgatgttactaaatgcttcaaagctgaagaatctaaatgtygtctttgactcaagtaccaaataataataatgctatacttaaattacttgtgaaaaacaacacattttaaagattacgtgcttcttggtacaggtttgtgaatgacagtttatcgtcatgctgttastgtgcattctaaataaatatatattcaaatgaaagtgactcagactctgtttctagctaatatttagtgtctattcaggaagcaaacttgcggacaggcgcagtgactgacacctgtaatcccagcactttgggaagcttgagatgggtggatcacctgaggtccggagtttgagaccagcctgggcaaatagtgacaccccatctctactaaaaatacaaaaattagccaggcgtggtggcacaggtctgaaatcccagctacttgggaggatgaggtaggagaataggttgtcccggggggcggaagttgcagtgagccgagattgcgccactgcactccagcctgggctacgagggaaactccgtctcaaaaaaaagaagaggactgggcgcggtggctcccgcctgtaatcccagcactttgggaggcagaggcgggcggatcactacgtcaggagatcgagaccatcctggctgacgcggtgaaaccccatctctactaaaaatgcaaaaaattagccaggcgtggtggcgggcacctgtagtcccagctactcgggaggctgaggcaggagaatggcgtgaacccgggaggcggagcttgctgtgagcagatggcgccactgcactccagcctgggcacagagcgagactccgtctcaaaaaaaaaaaaaaaagaagaaaagaaaacaaactcgaatgtttcccaggttgcctaaataattttgagatagatatatatacatttttttaaccaggggaaggcagtaaggctagaaagataaagcataaatctcgtatttaaatagaatatagaaacccaccttgtgataatgaatcagtctatttcagcatatatttgtaaacattacctacgttgaacaaataccatatttttaaaatcttaaaggtttacgctttgtagataatttgattttaaggctagctactaatattaaataagttgcagataatattgttaacagtgttatgccattggatgaaattagaatattttcattatattaaaaaaatggtaataggttttcactggaggtattactttttagcagataaggaatcatttatatttcaaaaccactaaataccacagaagtttatgctagtgttaggagtaacactagcatagtgttatgatgttagaagtaagtaataaactaagcttattactagaaaaatagtggagtttttttaatagtcttgttttttccccaaacctatgatggcagaaggcattttctatcttttcatcctcatgcttaacacactgtccacatgtaataggcaatattgtattaataaatatctccaggcctaacatagtactcttcatggatgctcaaatatttgttggttggacttatttaaaattactactttgggaggccagggcaggaggattgattgaagccaggagttcaaggctagcctgggcaacaaaacaagaccccatctctacaaaaaaatttaaaaattagctgagtgcagtggtggattcctgtaatcccagctactccggaaagtaaggcaagaggatcacctaggcaaaggaattcaaggctgcagtgagctaggatcacgccactgcactccagcctaggcaacagagcgagaccatctcctttttaaaaaattaaaaattacctagatcattttatgatgtagaaaagaaaaagcaagttgagtaaaactacctttaggactactattaatcggaagcataaaaacaaaatttcatatagaatgaacaaaattttgtataaagtaagtatgaattgtaccagttgttattttctttcagttccaaacactcccttctatattctcgtgacattaggactggaatttggcaagccacatttctttaccagctgctccttgttaaaaatgtgctaatgggccaggcgcggtggctcatgcttgtaatcccagtactttgggaggccaaggcgggcagatcatttgaggtcaggagttcaagactagcctggccaacatggtgaaaccctgtcactactaaaaatacaaaaattagtcgggcatggtggcgcatgcctgtaatcccagctactcaggaggctgaggcaggagaatcacctgaacctgggaggttgcagtgagccgagatcatgccactgcactccagcctgggtgacagcaagactccatttcaaaacaaaacaacaacaacaaaatatatatatatacacacactaataaagggtactagagggggactggatggcagaagagaaagaaaacatgctcttactccttcctgttggtttcctctatcattaccttctatccactttatataagccagaaaagaaaaaaacaaatgaatcaaacatatctttagaagagcaattagttggaagcatgaaaactaatttcatgtagaattaaaaagaaaatcttggctgggtgcagtgactcatgcgtgtaatcccaacactttgggaagctaaggtgggaggattgcagaccagcctgagcaatgtagtgagaccccatctctactaaaaataaaaaattagccaggcatggtggtgcacacctgtagtcccaactactcgggagtccgaggtgggagggtcgcttgaacccgggaggtcaaggttgcagtgagccatgatcatgccactgcactttagtctgggtgacagagcaagattgtctttttaaaaaacaaaagaaaatgttatatgaagaaagtatgtatatatgaaagttattggagagatctagattacttgtagaaacaagtaatttttcaccaactttgcctttgaagcatgggtttcggtttgaatattcacactgtgaaactgattatctctttatgccatttttttaatgctcttcacttccatcacctttaccaagagaacaaagcattttgttgctccttctcttaatggagtccaggcccaggaagttgtgtcttcaagcagcatgataatatgtgaaaagcctatgcctttcctaagcatttttactagtacttgaggaaatgatacatggatgcattacagggcaaaagacattacattttaagccaataaagttagattaagaagctttccaaaagaggtacaatctgtataaacctaaaccttaagggaatattgacctctgcagatcatgaccctggtaatgtttcctgaacaacaagtggatagccagtgcagctttatttaattctaataaaacataaagaaggagtgggggaaaaaccctataattccactgccagttaaatcataatttaaataaaagttatatatacattagaaaatcaatgaaatggtgttaaatgaaaaccaagtttttgtttatccttacagggaaaaaaatacacatatttattttgagaattaaaaaaaaaaaaggaatacatagtgaaaagaagtgttctttgctcacctgactcccacccatttaagccttgtttttgtcccatggcctatagctcagaaacattcaatgcataaccaaagtatgtatgtaaatatatgtgtgtgcatgtaaccatccccttttgtacataaattataacacactgttctgcactctgtgtttttcctttagtaatacatcttaaagctatatagatacttagcgtcaggcacagtggctcatgcctgtaatctcagcactttgggggacccaggcaggcagatcgctttgagctcaggagttcgagaccaacctgggcaacatggcaagaccccgtcttacaaaaataaaataaaacaattagcccagtttgctggctcacacctgtggttccagctacttgggaggctgaggtgggaggattacttgagccccagaagcagaggttgcaaagaactgagatcatgccacagcactccagcttaggtgacagtgcaagaccctgtctcaaaaaaaaccataaaagctatatagatacctgcagagccaccccattcatttttaaagttatgtagtactctgttgaatggatataccaaactttatttagccagtctcctattgatggacttttagattcttttcaatcttttactactataaagatgctggactatttttgtaagttggttatttcatacatgtacaagtgtatctgcaggataaattcctaaaacacagcagattttttttaatactgttgaatctagtttgttatgaaagcagcagccttctggatttgatattatatgtacatttaataccattttaactgtcctttctaaccccccacttttttttaacaataccttgattaaaccagccacaatatttctcaagaaatgttgaccaggggaaaaatatattagaaagtacctttttggtatgtaagcttaagaatttgactatgaaaaacaaaaagcaacaaaaataagttcctagttgtccttgtgaaattggtatgagaactcatcatctttatgatcttgatggctttaaacaaacctcaaaacaagaaacatatctgttttgatttctgaatattggtgggttcttagacaaactaaaatggttactgactcagtagaaatatatacgctttcattccagtagtgtcacctaattggtatcatccagcacaatatagtgacagttcaatacacattgttgaataaatgggttcttgtcaatttgccctctaactctgctgggaatagactcgtattctaaatcaaactcatagcctgacctgggtagcacaattgagtaaagcacttttaagcagaatagacatctttaaaaccatccagttttctcatgtccttaccaccatcaccctggtccaagccatcattatttcttcataaaagacttctgcaataacaatggaaatgggagctcagtttggagtctatgcctcccctctctccctagtccaatccagacttgctctagagttactgattaacaacgacattttacttcacgttttttgaagaatagaccaactcatgggcttggaagtcagacaagcttggattccagctctgactctttttaggtgtccttaaacaacctttctacgttttgactccctcagatacaaaatggggatattaatagtacaacctttaaaatgtttttgtgaggattatttaaatggaaagcacatggtaagggctcaatttacttattgggtttgtaggggatcgaaatacgccaccccaaaatatgccactttagcataagaagtattttgagctaaagtcatttcagattcaacagatacagaagcagccttcccagcgcctcccttgtctgactaaaagcagaaacttctgaaaataaggactgccataaatcctctctcctagggaagtttcatgaccatgaagaagacagaaagttggcactgacatggacatatgaaaacaaaccttattccttttgtttcccccatacacttacctttccacagtttaccacccttgaaagcttaaaaccttttcctttgtcttgtcacatctaaatgggctggttttttgtgaagatgctatataaactcaaattctaaccatcgttttcagttactcatcactgagtttctcccacatgtatgtgtactacatgtgttagtaaattctgtttttcttttgttaatctgtcttttgtcagttagatttccagggcccgagatggaggctaggacctaggcaggtaggggaaaaatgttatttttttctccccataggttttttccttttcttttcctttctttctttctttttttttttttacttcttagcatcacttcaaagtctattataatgtggcctcaagtgacaccttccagccccgtctttgactattattccctgtaccttccataccttccatgctggccatgttaaagtacttggacagttagtcacgtgcatggctccatgcctttgtttggctgttctctttgcttagaatgctcttctctgcttctctagactgccttacacataggtagtcaacatgtgcatattgattaaggggggaa

SEQ ID NO: 95050 - DNA, 62888 bp, Homo sapiens
  misc_feature (1)...(62888): n = A,T,C or G
atccaaagtagttttggtctgactgatccaacaatgcatgcatgttttataaattaaagcttcatcattattttaaagtactttctagaaaaaagtactgctattcattattggcattttggtactatctggattttttttttaagctgtgtattcttactgaaatttaaaaaaaaaattgaagtgcaatttaaaatggcaccagaagccaggcgtcatggctcaaacttgtaatcccagcactttgggaggccgaggtgggcggatcacttgaggtcaggagtttgagaccagcctggccaacatggtgaaaccctgtctctaccaaaaaaaatacaaaaattagccaggtgaggtggcaggcccctgtaatcccagctacttgggagactgaggcaggagaattgcttgaacctgggaggcagaggttgcagtgagcagagactgcannnnnnnnnnnnnnnnnnnnacttcagtcattaagagattacttgtcccggataaaggcctgaccatttgcactcctttctgttttgatggagaggggtagcaaatcaacctccagaaaccgaagggagaaaattttcctccctgtgggtttttggagtcagatagcttcagttcagatcctggttctgtcacatagtagctatgtgatctaaaaaaaaaaattaaataaaaaaaataataaaatggcaccagaacttaacattagtatttcatattttttcctgtagttttttctctaaatatgacatacctcctctttttcattagagagaaaaagtagttaccttttattctctaatcatattatccatctaatgacatagaattattcaattatttaatcttcacccaaaaagcagtcctgagaatcttctctttattttatttttattttttgagacaaagtcttgttctgtagcccaggctggagtgcagtggcgtgacctcagctcactgcaaactccgcctcccatgttcaagtgagttttgtgccttagcctcccaagtagctaggattacaggcgcctgccaccaagcccagctaatttttgtattttagtagagaaggggrtttaatcacgttggccaggctgctctcaaactcctgacctcagatgatccaccagctttggcctcccaaagtgctggaattacagctgtgagccattgcacccagctgagaatcttctctttaatatttcgttaggttggtgggtgtgaaatgcttaaaatacattccctgagactaagttaggaaacagaagttctttatcctttcctttccagtggtggcactagcaggaaatttaataaactagaccagaggcagagatgtttagaaaaccatcaaaagtcatttgatggaatgcacaacagggaatctttcatatagttgaaagaggcagaaaaaatagaattaaactgaatgcttttctctttcacaactcttctctgtgaggatttgaaagtcaataagtaacctgaacttctatacatatatcactacagtaaatcaaaataatatttattctatgagtttggtaaaagatggtttcttattagtttttttatcttttcaaattataatcacataacaatctacgcttgttaaaaaccctgagagaatatagggagtttatttatgttttttcctgggccattcactaaagggaatggctctattgcctctatcatcaaaggggcggacacaatttggagatacagttttgcacatgagagaaatacaacaacctcatgggtgtcaccatttctcaccaacactctcctctggggaacatgcagaacagactaaacagaaaacaaaatagtaaggacctgcttccttcaactttcaaaggagaatctagaggggaattattgataaacatgaacaagataatgtatgttttgattaaacatgcttgggagcctaatgacttttaaaaccacttagaagattggtttatgaacctttaattaactatccataatgtgaactaacttcattttttaaagcatctcagttatttgaaataattgctactgctctgatgtaaaagttatataactctcaaatataacttaaaaatcatactgtgaacaaatggaaggatatgtcataatttaaattcacaacttgtttcagcaaacttcctggttcattaacagggtgttggcaacaggaaagaatgaagtctttctcttcctcaagtatttggaaacccattcatttttagacaactcattcattagtagtccatctcatagatataatttgatatctttttccagttaagcccgtttggttacctttttactcaagtgaaatgccctattgttagatgtagtcagttactggcaactgctgactgagtaacagtagcccctttttcctctctcatgtgggtggcctaggatttagatgggtacagatgggagccaatattgagtatgggcaacagtccagtggataactgttgcctggtctcttggctaaacactttgggcatgacacagaaatttttatgtctagtacatgttcgctcaaactacactgctttattttcttgaatgtagaggataggcaagaaaaaataaaggaccacacacattgatgatctgtatacttatttcatacctttaacaattcctacaccactccttattagataatgctcatgggtagttaacacagcttattgtaaagtcatcagggcatttgctgctattattcttataatttggcccaggttcatctcctaggtggaaataactgaaacttaaaaaacgttatctctaaatataaactttttatgttttatatggctctcaaagagcagagagtaggggcgggcctgtggcttacgcctgtaattccagcacttgaggagtctgaggcaggaggattacctgaggtcaggagtttgagacaagcctggccaacacgccgaaaccctgtctctactaaaaatacaaaaactagccaggtggggacctgtaatcctggctactcaggaggctgaggcaggagaatccagctactcaggaggtggaggttgcattgagccgagatcgcaccactgcactccagcctgggtgacagagcgaaactctatctcaaagaaaaaaaaaaagagtggagagtaggatacaacactgtgagttaaaatgatttagtggcactaaactggtcattcaatatatacttatggaatgttcgctatgtaccagacactgtgccaagcattaaatctaaaaaggcaccaaaaaagatgcttagaaataggaccacagacatggtttccttgctgttgatagagagctcctgtctaaagcaaaggaaaaagatatggtgaggttgttatacatcctaggatatgggactgggtaaaccaaactgagtttcctcaagtttctatgggaaagtagaaagaaggaagaaattataggcagaatttgtatcatccgtggatggtcgcatatggaaccagacaaaaactggcttccaggctttctttctaattcacaatccatttcactccagctccttaaccctgtacacactcttatcagcccccatcttcattctttggatccccccaccccaggtttctgcaaaggtaaaatctataaatctaccgatgttacagatttctaatgatacagattatcaacatcatgcaccttgaagggatattccagagtagtatcttatgaaaaaaaggattaaagatacacatacttgcccagagaaagcaatttttcaatgactgaaatatataaagggaaataggtaactgctttctaagcatgtctttgctccatggccattaagaactccacctctttctttcctatctccacaggatttgtcaagtgaggttgttcttagtggctctgagagagtgggaagctcgcttacaaagtgtttgtgggttcaaaatttaaatttataccgatgtataaagaaatttcattttataagtactgtttggaaatatttggaaactaagcttctagagtgctacttctctaagaactagtgactgagtagttacagatgtagcccctgaagatgggtagttagttactttttnnnnnnnnnnnnnnnnnnnnnnnnnnnnnnnnnnnnnnnnnnnnnactatatctcaatattcaatcactcataaatcaagatgccattcttagatattaacaaatgctcttgctgcaattaaaacccatttcctttttaatcttccatgaaggcagaaaatacagtaactgatcatcgtttcttataataaaccttgtataattaaaaactcgccaggcgcggtggctcacgcctgtaatcccagcactttgggaggctgaggcaggcggatcacaaggtcaggggtttgagaccagcctggccaacatggcgaaaccccgcctctactaaaaatacaaacattagccaggtgcggtggcacgagcctgcggccccagctactcgagaggctaaggcaggagaatcgcttgaacccgggaggcggaggttgcagtgagcctagactgtgccattgcactccagcctgggcgacagagcaagactccgtctcaaaacaaaaacaaaaacaaaacaacaacaacaaataaatctcttcattgtccttcatcttttgcaggctaagtaaccctacgtggcccaaatctttcggtagtattttattttggtactaatgctcattggtaaagactgctttttcagtgctggaacaatttttgtactgtatacaaaggatgtagagattttgttaagatcttcagtctccaaatgctgttattaaactgtagacatctggattttagacacttgttttgtctggggaaaattcgttttacggccgagaggtttttgagtgtaatctttttggatttcatgtaagaaacacagtaccaatggttgtcattctctagtataacaatttttcactagccttttctgtgttgtttgttctaataacatttccatataaagacgtagaaccaaaaaatcaaagttcctttgtttagacaatgagtcattaaaaaattctcactttaccttggttgattagtgctgcccaaagcctcaaactcttctgtaattaccgtacttgtttattgaaggcacttaagagaaggcgctggcaaatcatctgccctggtgcgggctatttgagtcttaaagtggaaatgcaaagtctgaaatgcactcgctgccaggcacactgagtcttagatgcaggtggggttgacggtaccaggtgtgatttgacaagccgtgggctggccctgtaacagtccccaggctagtgtcaagttccgtgtaacatcctctttccttgaggacttcaagaatctaccaaaagaaaagcatctcttgaggagtaacttaggccagttccacgttgaagagaaaagtaaacgcctatcacagcagctctacaggattaggaaccggggcaatggggatggtggtggttccggtgagggagccttcacttgtcactttcttcaatgcctaaaccctccttttgttagctggcccacacaggccaatgcctactccctaacgcatcctcaccctcccccagccagatgtgatgaggggagcaagcgtcccctgagaagcgtctgggctccctcggggcagctgcggtggggagctccggctctatccgcagggctttctttagtccctagtcagcgggaatatttttactgattggaaaaataaccagtcgtgctcaggtgctctccctcactgagatatactggcgaggcttccctggccgcaacgccgccgtaagtgctgctcccacgcgcggtatccccgcgtactgctcagtgcccaactccgacgggctctcaagtgccgcaacgccccgccccttgccacctccacacgtctcattggccagagcctgcgtccgcctcggctcctgactggcggytgcgcctgtcggtccgtgcggcagggacatttccgcattgaaggggctgctccgaatggagggggaggggaggtgtttaggagaaagtaggggctgtgggtgtcgggagccggctgacgggtggacaagggggggttagcagctgggctgcgaccgttagggaggggctcaaggtgtgcatgtgtgagggaagagagagagagagaagggcgcctcagaggtgactttcagcctgcgagccttcttcccggggcgccataaacgcccccaatttcccagctgctaaaggaagaggaaggtgggtctcgctggcggcttgaggaggggcggggttgggcttccggcgaccccctggatgagtgtgtttcccgctctcgctggcccgctgtgtggtctcggaggcggaatttgggcttctgaggagcgcagggcaggcggggcgagaatatgtacgggaagggtcggtgccctcccttgggactcccgcgccggtgcacgggtctgcctctagccggtgaccccttagtgtccgctgcgggggaggggcagcgtagccttcggcccctaccgagaaaaagctgcggccgggtttcactgctcgaggcgggaaggcggggagctgaggccccgaccggtcggccagccagagcgtggaattggtagcgcctcctagtcccaggatgtttatggctggtgaaaatggttgcactgcccccgctkgccggcctcgcccgcctccccgacccctgcttgggcgggagccgctgttaaccggggttttcgggggaggcgtttggggcctggacggcggcgcggggagggggcagctaggggcgcggcctgccagtgcctcctgcagtacagccctggagggcgtggggacttgggggcggtgaaatagccgctgtaggtccgcctctttcattgaagaaatttaagttcgtgtggttttaycttttccgggagtctccagctggccctcatttgtgtccggagctcaggagttcccaaaccgactcagtcgcaccaagtttccgtcttttggaattggggaaggagtttctttctttcttttcttttttcttgagccagttttaatcgctttgaataaatactcccttaagtagttaaatataggaggagaaagaatacatcggttgttaaagcaggagaggaagagagacctgccctgtagcgtgactcctctagaaaaaaaaaaaaaaagccggagtattttactaascccctaaaatgtcgagatttgtacaaggtaagaaatgctgctgcttatatcccgagttgcttcaggcaaatttgggtactgacagtggagaggttggtgggtggtttggaagtggaaatgttcatttgagataacatttgcgaaacccttttcgttgaattgtcatctgagctgccttgagctgctgggttgacgttccagacgcgtataatttatgctcctgtaccctgctgggtttagttttgcctccctgaaatcaggttagtagtaccgtcgctttcctggatagtggctgtaagtgataaaacaggatttttggctgctaattaatccttgttctcttttcctggtctgtgtcaaggtacctgtgcgtgcacgcagacgggaagggctggggaagcgggaggactgagaaaagccrggtgggttttgccgggactgttggggaagctttagtgttctccgcttctacttcgtttgtgtgtacgtggtttgcgtctcagattcacttattgcgaaactgggagtagcccgaagaagctggaggtcatttcagctggagaaatgactttgctgcattgctgtgtttattttttccttttttgaactatgaaaagatgattaaggttcctttgaagtttgaaaactgctctctaaattccacatgtgtatttaaaaagggttagggaatgcctcaactgagattatcagtaacgtgtatatgaatgcatgtgtgtacggtgtactcactgaaattggtgctggcataaacctttgacaccagtttgtagcatgagatttgccttctggtatgcaagtaaactctttccttgtagactccagtgtgtgaaagcttcagccatcttgatgaacacacagctagtaaagttcacaaacacttattatgcttcctgataaatgtaggtgtacttttggaaaaaaaaagttgtgtcagtaatggccatcatttgaccctgggaataaaaatgccctactgagttctacatcgctttattaactcttctttaaattttgtgtagtagattaaagtaagagaattcgactgcctgtgttattatcgaaacagatcgaacgctatgcttgcctttagcgctaagctcagaaatgtcacttgttattagactttcaaattcatgttataccttatatgtggtaagagatgcttatgttctgattgagtaaatgtcttattcaagaatagaaaggcagaactgttagaaacgtactggttttgtaataacaatattcagttaccataaaggcggtattttgcaagaatatgctaggtaaaagtggacaagttacttctctttaaaagttagaaatattaataaacccaaggtgttccatgtagagttatgctttagaataggttgcagaattggcaagcattgactgatttcacagcctttgctgtaatgccaacttgtcctcagaagattcaaaatcaagtggtaagagttgctgtgtatgtttgtcattactttgtcatccactttttttaaaaaaactttttatattttggaatacttcaggatttatagaaaagttgcacatttgtcaaaactaagaaattaacataggtacattactgttaactaaaggctttgttcagattacagttcccatgattcactctaagataccagattgcacttagttgccagccactttttttcttttttctttttctttcttctttttttgtcaaggtcttactgtgttgtccacgctggagtacagtgggtattcacaggaacaatcatagtgcactacagcctcaagcccctgggctcaagctgtcctcctgcgttagcctcctgagtagatgggacttaggcatatgccatagcctatagttgtcatacatttttactttaaatggtagttttccttttamgatgggcagttttgcacaagaatatgacacctcctcaaaattttttgacatgaatgtgctcctgtttatcattgtttaaattttgtacagtgtgagccctctatatgtttaactctgctgctgttgtaaatgataaacctaattggcaaatgacacagctgtctccacaaaagagctttcaagtgtaagggttggaaattttggttttgattatttttttaagcaaatcaaattctttgatctttgctgcagaaaatattgatatttccaatcactggcacttagtagttcatgctccttcataggggaaagagttaacaaatgttaggtttctaactttttttttcatgggttttctcaagctttrtaagagtcctgagatgtagattttttatcctgcccttacaggtgaggaaarttaagtatcttgtccaaagttcacagcttgtataaagcactgattgattgatagattgattttgaggcagggtctcactttgttgccaggctggagtgcagtggtgcgatcacagctcactgcagccttgatctccttggcttaagcaattttcccacctcagccccctgagtagctgggactacaggtgcacaccaccatgcctggctacttttctccttttttaaagagacaggctttccctatgtttctcaggctggtctcaaactcctggtcttaagcgatcttctagcctcagcctcccagagtactgggattacaggtgtgagctgctagtgcacagcactgaaattcttacatgagtgtgtctaaaaccctagtccttcccgacatcttttgttgcttctaacattaacaactgtggaaatggcctgtttctccagctagactgtcagttcccattgggcaaagataatattatatccttgggagaaatacagtgttttgtaagtggacgatactctaaatgaatttgtcatggatgacaaatgagaagcccacagcttagcattttccatctactatttagtagcttatcttacatttttggttgtagtttttataacacctcttagattatataaatgttgagaaagatggaaaggtacagacttagatttgaataccgttactagcaggtgatcttaggcacatacctttcaaacctcagtttcttcttagataaaaattgggcagtaatgcttatgcctcagggttattgagaggctgaaatgagatgaactatgtggatgtgctaggcacatattaggtagccagtcaattttacttttctttcctgaaatgatggtggcctttcagatagcattgccacccaaaatataaccacatgtcatcaacagaactaaaagaaaaaaggcaggtatgaaagttctttattttcctattccaggtttcatgttcaggcctaggtgttattatgttaaaaaaaaaaaaaaaaagtgccggggtggggcaaggtaacgtttggacaatatgaatttggttgtagtttttataacctctcaacttgagtacmagttggtgacggttttcttctgaatacagtgaacaaaattttttttgagctcttactatgtatgatgtactgtattaggatttctggcatatcccttatggtaggcactgaagttcagcagatctgggcattacacctaagtgttgtgtacacctgttttgaatgtagtaggatggttgctatacttggcttgtatctccttctccaaatcctaggcattgtgccttagaggaaagctgggtatctccatcctcaagcatattgaccgtaaactattaggtggaaatgttcaattaataaaaatattgaggtaggcaggagagttcttagtatatatttcttggtcaaaaaaaaaggttcacgtttctttggtcacatccccaagtctctgtccctcaggcacttaacattccttctcttaggaagacctttctttactggatctgcagcataattcctagctattctgctgttgggtcaccttctgcctacttgtgacattccttctgctcttccttgctccagggattgttccagggcccccagttattctaaatggatgtgagtaccatctcttccctagctgagtgagaaagggggctccctgtcatagtttaaggtaccaggggcgggggtcatcagcagctgtgggtttttgtcaggtttgtcagtgggtgccatttggaattttgcttttaaaaagttctgagagttatggggtaatcactctaaatgttttgaaacttaataaatagtgaagagagtaatgttgtctagccagctaaggctataatggatgctaatgctctaatattagaggcattgtttttttaaaaaaaaatgattctaaatgtgccattatctatctaaattatgtaaaaatgtccctgatgttcttaaattgaggtacatacttacatttcagggaaagtcatttaagtacctctgtcacttaaaaaatgcttgaggcctatcagctttcccatttgttaaaattcttttcataacttttttggtgactcctatttgatagatggcagctagccagggaagattactgagctaattataactggaggggtctccgaggaatacagagatgagaagcattctggggcctggttcttctcaaatcctaaarccaaatttagcctgttgctgattatttagatgatgaggacacttttagcacagggatagtggcatggatttgagtgaggacaagagccatgaaaataatgactagggcatacccctcattttttaaagatctgatttaagatttattatattatttgaagagaagggtttagttaaattcagtcacagttataaatgtaaaaaaaaattctaaagaaatttaaaatgaagagttgagctgatgaaaagtgctgttttccaacatggaccttgtaatctctgtggttaaattgtccgtgttcttgctaactcagcctttcttctaataagatggatgattttcatttgtgaaagtctactgaggaaaaaaaattgataagggacattagagaaattagaaatattaactggtactctttttgggagtgccattttaatattctgaataaattgaaaaatgaccttaaaaggaaattcaggtgttattttagtccataggtattttcttgtaatatgtttcacagagacccttccctttgttggtatgtattatttttcccttcatagatgaattatagcaagtttaattaaaataatgggatacttagattgtgtgaggaacatcagttggcctaataatgaaagtgtttcaaataaaagaaatatactgtagtttcctagttcccaccaagctttttgcagaagtataggctttcatgctcgtccgtgtgaagagaccaccaaataggctttgtgtgagcaacatggctatttcacctgggtgcaggtgggctgagtccgaaaagagagtcagtgaagggagataagggtggggccattttataggatttgggtaggtaaaggaaaattacagtcaaagggggtttgttctctggcgggcaggagtgggggtcacaaggtgctcagttggggtggttttgagccaggatgagccaggaaaaggactttcacaaggtaatgtcatcagttaaggcaaggaccggccatttacacttcttttgtggtggaatgtcatcagttaaggtggggcagggcatattcacttcttttgtgattcttcagttgctttaggccatctgggcgtatacgtgcaagtcacaggggatgcaatggcttggcttgggctcagaggcctgacataggcattatgagttctcagaaagttagcmatattaattactgaaaagttaacataaacagatatttgaaagtcaacctggattatctgtgaaaatgaagaagagtgtgttaactttctgtaatgccattcatcctgatatccagcatttatactgttggagaaaattccagcaatatgaataaattagtagggcaagttctctggcttggggtttaatggatgagaaaatatgattcagttactacctttttggttggatagaatctctttagaagacagagtttttctaaagactgttgccgttttgacatagcctacaatttcttttctaaatatcatattttgaacttggagtaatagtgtttgaaattgtggccatcttggtcttggtaattgaatggattgtcccaggcacaatgactattaactgaaaccatacttcttagatatttatttatttattcattgagacggagtcttgctctgttgcccaggctggaatgcagtggygcgatcttggytcaccacaacctccgcctcccaggttcaagtgattctcctacctcagcctcctgagtagctggaattataggtgcacgccaccatgcccagctaatttttgtatttttagtagagacagggtttcaccatgttggccaggctggtcttgaactcctgaccatgtgatccgcctgtcttggcctcccaaagtgctgggattacaggtgtgagccactgcgcccagccaattcttagatatttaaaattccactgccaggcacgtgtccttctattaataacaagttctttgaaagttggctttatgaagctatcaaagaaaattaaactttgtgtgttttttgattgggtgacttatgtgtgagaaaaaagataatactctgtttgaaagctgtttcccagttttcttgattggtgatgcaggcatctcctttaatttgttgcacagtaattgtctaagactcaaatactgcctctgccaacagttccgttgtttatttttctcagtcattaacaaatgaaatcgattgtgcccccaatccattttacaattaaggattgtttttgagaaacatggagaaattggctatgttgtctcgttaatatacataaacaataaaatgtttcatttccgtaaacatttttagatatttctgttagttttttctgtgtaaatcaagagaattgtttctttgtgatttcgcttgtgtcctaaaaaacaaacaaaaagccattaattgtcttcatggaccagaaattagttgtattatgcttagtctcctttttacttgctagtcaacatattgtaaaaatactattttaggggatcctttctttgacagtagctcttcttgctccttggccacaatgaaaatgtgattggagtttgtattttcttctatttgctgctctggcagaagctgatgtaatatttcatttgtgttatatgcctgcctagaattttaaaacttccaaagagcacaagaaaacagaacaacatagttatatccactgttttgggttcatttgtgctaatggtaaaatgctttgccttggtaataaaatatttatggaatgcataaaagcattcttcgatttttttcattgcttagacaacacagtgtataaggaagagttgaagagcatgagatgcagtaagaaagtattattctaattgtagttttaacctcacatagcagacatagttgagctgccggttttcattcagatttagtggcaaacacctggaggtggtaaaccatgtaaatacactgtaactgagaaaggagagaccttgctccagaagaatgagaaacagggcgccaggcaacagggtttgagttccagcttggcattgtgtccttaggcaagtcagcatctctgggcccctgtttctttatctccaaaataaggaattggactcactgaccttaaagccgttctaagcataaaagtttctctaaatgcacacatagcaagttacacggcaggactaccggatcattttttggcttttcatcgtgattttatgttatacctctttctcttcttctcaacaaaggagtgtgaggccttttgtgatgactttcttctcatccattaaacataaaacaaagtggtattatttaacaaatctcttctgaatgttctgttttccataagtagtgttttctttttcctttgagattttaagagctactctattgtataagagtagggttaattttaattgttaatsagaagactggtttatatataaattgtagcagtttttttttaagtaaagcaatgcatgattagcaaaaatcttttttagcgagctgctctgcatatttgttgctgcaacagttcttgaaagcctgatatccttttatttttgttatcaaaaagcatttattaaccattcatatgaatgtaaagctgagtcatctaaaaatatatctcagtgtagtcatagttgacagtctaataactttagtatgaaaagatcatataaaattatgtaagatgcaacttaattgaatttacttttcttaatttatcattgaatgacatggaatattttttctatatttttccctaaattaaactaaatgtaaacatataaattgcccaattttgtttaatctctaaagttagtgaaaacattacattggcatttatattggttaataaaattgaaaagaaatttagtagtcatttgtctagactacctatctgtgtgaaacttctttgaccatatccctgatacttgactaataaatcagcctctgcttgagaagccttagggactggggcttcagatacttatgacagtctatacttatcttaactctgcctttctgtgaccagacatcatggctcttgtacagtttcactttgggcttactaggcactacctacactagactagactttgccttctgtatacccagagcatagctggatcataataggctcttactcatttaataaatgttacatgagtatctactatatctcaggctctgtgtttggcagtgggaatacagctgtgaacattacagacatatactttcacagaatttacagtctgttggataagataaacattgaataaatttttaaaattatgatgttataaaggagaggtacaaggatctagcatatgagcatgtaataggtaacttagtttagaaagatttctaggaggataatctcaggtaatatttaaactgaactctgacaaatgaataggagctattcaaactactattatatgagaatttaagtcctgatctacagtttagttacataccattattaggcacctgtactgtgcaaggtgctaaggtaggttttgggaaaacaaagttgcatgacataatgtagttttttccccctcaagagaatatgttctaggattgcagacatttaactaaagaattggggttttgaggggtgtttgatataatacagagacaggagtgattaaaactcccaaatcagttgtggtagaaagaaaggcctcttggaatgttcagaagccactgcttagaacactaggaataccaccatcaaaatgacagaagcaaatcaagtaaaacagtttgagtctttggggattgagagatcagggcggtttcccagagattgggatgattctcattattctggaactcatactgggccattcttatttttctactttttttctcatttctgcctccccttttctgaaagtgttgagtggtatttgaagtgcatggtttcgaacaatcttatagttaggatgcttttaacttcatggagtagaaaaataccaattcatttggctttcaaaaatgagggtctttttatcccataaatcctgaagtaggatatgcagggttggttaattcagtacaaaagcttatcagaccttccttctgctgtgctatctttgacatatctgcctcattcttgggtcagcttctttcaagggcactaatcatggcagaagaaacgtggggtgattggtggacacatactcattatgtgagtagaaaaaatactatcttttctcatgtatgtcttttttcagtgaggaacacctttctccaaagtgctgtgacagattatacccttatggcttactggccagaatcatattacattttatgcttaaaccaatcactaggaaggctttggaccaatctgggcctggtgccatctctgaaacacagggcattggggcagggagttggtgacagaatagcattggagtagcaagaaggatgaagaatatggctgttacaaatatgttaagataaatggagtataatctaccagagctactcaaagccatactggcaatgtttggttattagatatgcatatctttcccaccccaaacctactgaatcagaatctctctgggagcttacccaggaatctgtgttttaaccagcctccaagtgatttgtatgtacattaaagttttagaagaactattctagatgtcccaaatggaataggaaattgcagcctttaggcagtctgctttcatactttcattagctttggctactccaaaagatacttcagcttggcttttgagacatgcctggataaggaatttgtatttatttccataggcaatgagaatttcatcaaacaaggaagagaagtgatatgatgggggttgcagcttaaggagatcaatccatcctccttggcactattagattagagtgatgggcagactagttagaaagctgttgtcatgactaggagagtaaaaatgctaggggaactaaggtagcagtaatggaaatggaaaacagtgaatggaattacagcaatcatttaagaagttttgatattgcattgtccaatgtgaggggaaaggtgggaagagccaactgtgactgtgaggtataaaccttagtttctacggaaatgttaatgccgtggagaacagggtgggcaaaagagtaatttagtttggatgatcagtcatattttggacatgttgagtttgaggtacccagctgggtatccaggtgtcagaagtctttaaggaagtaaagaatgtgatcctggagctcaggaaaaaagtttaggatgagaggcacatgtttgagtgatcagtaaggagagtggcatgagaattgaggagaaaaaatggtctggggacagaattttaggaatctcaggagaggaaaggaggagccagttagggaaactgaggtgtggtcagagaggtaagaaaagatataggatacacttgagtaatggaaccccataaagagcttttctaggaggaatattcacaaataactgggtttaaaggactgtagtgagcccagaagaagctggttagcttgaattggttgtaaatctagccggcatagttcatatttccttgaaataatcaagatagctttatcttgattatttcttgattatgtcttgaaataatcaagatagctttatcttgattatttccagttgccattaaattcttggagttctatggttatttggatcacaagtcatttcccgatttaagattaagtgcgctctccaattctctgactttgagtatctctcattgtgggttttccaggaaggttgggactgatcagacagaggtggcctagggatggctcttcaacttctctgttgctcttggtgccttccctgtggtttttccatggcctgtgcattatgaaactagcttgtgtacttattttgtttgcgccagtgtcagggtgtcagggaagggtattatgtatccctcttacttgctgaaatacatgaaatgagatccatgaattaagaaacaaaaatattcacttgtcagattgactgtagccctctctcttttttggctccagctggataaaaaagcccatgatgttgaaattttagttcctatgaacaggaagaattaggaaactgggggaaaggaggaacttgtgaaaaaaagttattgcctgttctatctgaaattgacttaaagtgtctagtaagtccagttttatgtggtggggaattatcttgtctgttgattgaacataagaagaggttctgatataaatgcttttggaggagagtgtggtatttagggatttttgcgtcaaggttaaagagagccaggccaggaaaaaaacattagcaaggtatttctgcctcactgtggtggaatgggactaaaaaaacatggctttgcttctgggctccaccattggcctgctctgtgaccttggataagtcattcaactattttcaacctgtttcctcgtctgtaaaatgatgagagtaggttaaatgctccctcccatctataaaaatgtttgactaaggtaatgaaatgtttgactcccaatccactctatgtctaaaggcgtggggaatcaattttatattgctaggmaatagggacaaaacacttcatgaggttagaaatcttggattattcagaggattttagttgaccttcctttaraaacacaactgtccttgtcagaagtgtaacctgagaatgttaaatccaagaaagcttctaacatctgtactacttttcctaccagaaatttcagacctttcttaaaaaattcaggatggatgaagaagtcaccactaagggaaatggttccctgctctgtgcctcctggtctgtgcccagatgcttaagatagctacgcttcttgtctaagcactcttccttattctttattcttgaatattttttattcgttacaagcccttcctgattctttaatcactaaaaacagagcttttagaggggtagaagaggtgacaggcttgttgtaatgttcttttgtttaagccgattatatttataaagagggtggaagaaaacaaattattcttcatgtgcattggtgctgtatcaaacaaaagaaagaaacaaaggttagagacatttctcgagtttgatcctgtgtctgggattttttcaagtctgcctctgaaacttagacctgtgttgacagagagcacatgcaatattaaatgtgagtctttcagccagcctttcttagcttgggttgataggatagtgacttgggttctgtgtgttttgaccttaaatcatgtaaattaataagttattgttctgcagagggagcttctaaaatgttttgttttgttttcaaatggttctcatttagacaaatctcaaacagctactttagttacttctaaactttgtagttacatttagttttatcttatatgttgtctttaattctatctgtataaatgtcttttattcaaatataagtgaaagaatttatagtaggtggagtatataaggggaaagagtttttagccttactgaaatgtgattctgctaaattaacaggcatttgtaaaaataactagttatcaaactatttgaatagaaactttacaaatacatttttaaaataagattgaatcaaatactaaggatagaaggggaagggtggacaaataatccagttgtccctattttatgagaagtaaataagatgattactttctagataaagtataaaacagcctgtgttggtatttttctsccaaagtgtttgggtctggggtgtttctttttctgttttttttttttttttttttctcttttcttttctttttgagacaggatctgcctctgtcacccagactggagtgcggtggcgcgatctcgcctcactgcagcctctgcctcctcggctcaaggtatcctcctgcttcagccttccaagtagctgggaatacagacaagcgccaccacacctggctaatttttgtattttttgtagagatgaggttttgccgtgttgcccagcctggtctcaaactcctgggctccagggtctacccgcctcagcctcccacagtgttgggattgcaggcatgagctgccattgcccagcctttttctgtagttttctatttttgttgtttgtatttatctaagagggatttccgtcacctttagtgagatccatctgtcacagaagtgcccggctatgccaaaagcattaaaagtctagtctgacacacgtaagcagtggaaagtcttggctgaaattgggaaccagaagatggcaggcagccctatgcccttctccttttaaaatgaaaacgtcgatacaggraagtagaggcmccttggaattgccaatacctctcaaggggttcttgtttagtggagaatatgaaactggagtgaaacgagtcctaactagttgacaccactgaattactgccacaggataaagggaccttgggattgagcccttttcatttgctgaataccagaaatcagttatagcttaccagctgtttgaatggcttcctggagttttcagttggtggttttatgtttttgttttaagatcttagcaaagcaatgtctcaagatggtgcttctcagttccaagaagtcattcggcaagagctagaattatctgtgaagaaggaactagaaaaaatactcaccacagcatcatcacatgaatttgaggtaaggaggtttctacagtgttccacccccccgcccctcccttcatctgtcttcatgctgagttgctgccggtgatgatgataatcatcacctcaaatcagcacaagatgtacgataacatcaaaaacaaaaaaattagaattgcttaacaattaccggcttttaacatttgccctttgtaaatccattatctttttttcatttaagcctaggaagttttcaaagtcattaaaataatcagaaccaaattatactttgttctgtgttttgatgtcattgggtggagaaatgcatacctgtgttcagttgtaattgagagaagttagcttcatatgtcctgcatgccttttccagagagtcacttctgatagaaccatgctactttgacaattgtcatagaagttttccagaactgggaggcatttacttttttacttrtaaatcaataggttagtattttcatttttatatttcaatttatacttaatgttttgaagctagctgtgttttatttctttttgttcttttagygaagattaattttcattgagaagtagagaaagatattggtaagtaagtgtagcggccaggcgcagtggctcttagctgtaatcccagcactttgggagaccaaggcaggaggattgcttgagctcaggagtttgagactggcctgggcaacatggcgaaaccctgtctctaccaaaaaatacaaaaattagccaggcatggtggtatgcgcctgtggtcccagctactggggaggctgaggtgggagggtagtttaagcctgggaggtgaagtttgtagtgagccgagattgcgccactacactctagcctggacaacagagcaagactctgtctcaaaaaaaaaaaaaaaagtacagagccagttggaattcccattaaacaaatggtgtttgtttgtttgtttttgtttgtttttgagacaggatctcactctgtcacccaggctggagtgcagtggtgcaatctctgctcactgcagcctcaacttcctgggctcaagtgatcctcccacctcagcccccgagtaggtgagactacaggcacacaccaccacatctggctaatttttgtattttttttgtagacaccgggttttgccatattgccgaggctggtctcaaactcctgagctcaaacgatcagctggcctgagcctcccaaagtgctgggattacaggcatgcaccaactacgcccagcctgtattagcttttaggatgtgaaaaagtcttgctccctccatgtcctaatggtgtaagaatttcatttaackatattttaaatgtgtaacttgtatctgtctttatgtttttattaaatattaagcattctgctggttgtaacaatgacttctattttcacagcacaccaaaaaagacctggatggatttcggaagctatttcatagatttttgcaagaaaaggggccttctgtggattggggaaaaatccagagaccccctgaagattcggtaagttttagataaaatgtaggaaaatgtagggtaatcttggrcactggttttaacttaggacggttgggtagtgtaggggacctataacaatcatgtgagacaagacaggacttgctttgaattctctgacccctcatcctgaaactatggagacagccttcagctcctttcccttcttttagacctctgagtcttgctgaggtcctctaacagtctgatctccctgtggcagtacccagtatccctggatatgaaatgacttttgcaaagyactaaatatcccataagagcttcgtttactttgtttcttccttctctctcccaaaacatttgatttctcattgcccgtagggtcatggatgcttagccagaccttaaagctctcttcttgtattttattggaatacagcttcactcattaatttatatactatttatcatagcttaagctaatgaatctctcttgttttttcctaatgagaaaattatatatatagttcctagttagaggtacgtttatttgcatatgtggaaaatgtctttcagttcttaatgttttaaaaaytatacataacattctcactataaaaaaaaaagctaaaaaataaaaatctcacgtaatgttctctctgaggagcctcttatttttgatgttaaagctaaaattcctcttggctgtaatgcttaacagttacaatatgcatttttttttagggtctattttggtctttaatttccttgaccctagtgaatgaattgtgatttatttttctacttttaagtagtagatttaatagtattttcttccaagaaagagttagaattcttctggataggtatgttgtttaagaaaataagtaggtgtaaattcagtcagattcttaaaaatgtttgggaacagcctaaaattataataaatttaggcactatttattcccacacccccccgcccccccgaaacacttataacttttgcttaggaattaccctaatttaagtaacctcacttatataatttatgatggacctgggtatagaagtgtagtttccttttttcttttttcttttttttttttagacagtctcactctgtcacccaagctggagtacaatggcatgatcaaggctcattgcagcctctatttccctgggcttgtgtcctcccacctcagcctcctggatagctgggaccacaggcatttaccaacatgtctggctaatttttgtattttttttgtagagatggggtttcgccatgttgcccaggctggtctcaaacgtctgggctcgagcaatctrcctgccttggcctcccaaaatgctgggattacagacatgaaccactgttcctgacagtggttttggtcttaattcttgcttgcagacctgggaattttttgttttctactgtacaaacttaacttttcggagacagagcctacttgaaggaaggtacgcagatttattatgttcaayatattttagggttcaagaattagtttttttcagtggagaaatctatcttttgtactttgagagatcatgatatatagtagggattcttgaagtgggggtcagagggtggagaaggaaggagaagaggaatcatgggattttttcggttcagtactaccctaccccattcccaggaaagttctgataaattctttcaggaggctatgcccatgtagtgagccatagttactgatagtaatacagaattgatataggccaaaagaatagaaatataaaataaattctagatgtaacatgattttatgccgtctttttctgtttataaaagtgtaagtcttcattaaaagtgtctttattttgaagcataagttttaagcttcttcagaaaatgtatttgcaatcccatatgcccttaatcttgaaaattttggaatgcagaggcaaaaaataagtttgctcttcaactacgtcatgagtwtcttgagggcacaaatgtgttttatatacgatatgcatgttaccagcttttgcagatagttctgagaatacaaatcttgagctaatgtttgttcaccttggttcttttggattcctccttctagcctcctcgtcctactcttctctttcccataggtttcctttctcaggtcttagagattattatagagatcaattttcctttcaaaatgtaatttttaaaagtgaacataggtcttttttwaaaaaaaatgcaaataatattttatattcctaagtaaaaagaaattactgtggaagaacagccatttagagtaacatttctcatgtcagccttatatcaaaggtgtgacataaacattgtcataccagtggatctatatttttgtgtatgagttgacaattagcagagtcagccacctggtttgtaagtaaagttttattggaacacacccacacattcatttatgtattgtctataactgcttttttgcaacaatggcagagttgaatagttggagtggagacagtatggcttgtaacaaaacctgaaatacttattatctagcctatttactgaccccattttagtgtatgtattttcagaacatctttggtagctttctttatttctttggccctcagaaaactgacctcatatgcctttgtcatttcagatgatcacttttaatttttatctttattttttattttcttttagagatgaggtcttgttctgtcactcaggctggagggtagtggcacagtcatagctcactacagcctcgaactcctgggctcaagggatcctcctgcctcagcctcctgagtaggcaggactacaggcattgtgccaccaggcccagctaattttttttttttttttttttttgtagagacagggtctccctatgttgtctaggctggtcttaaagtcctggcctcaagtgatcctcctgccttaaccactttttagataaaaatagtttttcataaatactagattgaaggacatattttatagataggcattgaaattttatattgtgaggttttactcgttcttaccttttgtgttgaatgctttgttttagctctcagtgagtacatagatgttttgtgagaagtcttttgagttcatgttttatgaattatggctaataagaacccagtttatagcgttatggataatgctctgctccttctttgtaaatgttaactaaatgtaataataagattatcttgatatttaactacataagtaaaaaaatttttatatatatataaaggttaatgttttaaattagagcaagaaaggacaagccagcatatgtagcttatttgaccatttcattgttttccagagaggttatgagagtgtcttggtcttggccaagcttacacgttgggcatggacagggatgggaaatagatcagagttacgaggaagtacggggcctgttcaagaaggtattggagctgacgagttctcttgagcgctaatttaaaacctgttgaagtcacatggctggcactgacccctggtggtgatgtattttcatttctatacaaaatattctctaaagaaggcttttttaccagcacaggcaacatagacctcacctctacaaattttttttttttagttagctgtgcatggtggcatctacctgtagtcccagctacttggaaggctgaggtaggaagatcacttgagcccaggagtttgaggctacagtaagctatgatatcaccactgcactccagcctgggcaacagagtgagatcctgtctcaaaaaaaaaaaaaaaacaaaaaaacgactttttcatttcaatatttaataggatcaaaagagtgaaggtatatttgtgaacagggaggagttatgtagggtcatagggtagagaattggcatgaagagaatagcatgcatcaatgtggtatttagctccaatggattttttgttttgttccataaaattgctgagactttttcttagtctatcaatacaaaaaacattaaaagctattgtttatttataaggaagtctgaggaagttacagtttatgtgtgcagagtacagatacatagcatttttttttctgaaggtgaaccgtagtacactgtgcatttaaagtttgcacattaaaagaaaaaaatcttgaggcaatctggccaagcatctgatatagtatgccatataggatgatttgctttgagcatgtgaagatttcccagctgcaactagccaatgataaagccattagagacttgttttgtgtgtatgtggagatacacacacaaatgagattctaaaaagtattccacaaaaaggaattagtgkcatttaaagaaatggctctgaggacatggctgaataccaaagagtctcatcatttctttgacataaagttttaaaacagtaatatatagaaatactgacactaagcagacatactaatttagcaaatattgccaaagcttcaacttttgatttcatgatgaattgaacagtttttgaatttccctcgggattaccttccttcacattccttcgtgtacaggactttcagaaatggggacctgataaaggaactgacaacaagcccatgattattaattccatactggttacatgtctataatttcactttagaaatagcaatagcaaatacatggaactttaatggcagttacatatttgatttgatagactccmggttttattgttggaccagggtctctaactactgcctttgtgtccaaagtagaggacagtccagtcccacagaattgaattcattaggaaaatcagagtgtgggtttaggtggtaatactactatttgaacattgccagtccctccaattccaatttccaccccacagagaaagtatggtgttaaagaaatggtgttaaagtttctgaaacttcttttgcccacaggcaggctaacaagaagggagatacaagatgattttagtaaagagtcctttactaaggactttactggaacagattgtgacgtaagcaggttggtatttggaactccatttctgttagcatacctttccagctccctgagtcatctacctttgtcctttctaatcatactaaagtggagtgttcttttaaaactatcttcttagctgataaggatatgggtcagatgttccacaaggttgactaattttatgacttcagctgacttctataaaaaggtgatgaatatacataactgttggtagtgtttgaatttttttaaaccatctgtgtatcacttttaccttttacacttaaaaaatactcagaagtctttgaacttcttaaaatttctataaaaattctagatacagtaaggtttagggagcagttggtaccttctcttcataggtaccatctactttgtaggatcgtttgccatctgtaaccacagtgttttacttatttcttgtttttttcatctgggttttctgccaattcttttattgtcatctcttctctagttttccaggtttaaagtgcacagttgggagcattataattttacatctctttagcattttggaaattgctacaatttttaatgaaagggcagtagttacatgagtttgagaggcaaatatatcaagaggaagaaataaaatgctgtaagtaggttaacacatgagcattgaataagtgagaagcaacttacaatatgtgttttaaaatcaacttttaattttagaatagtttgatttacaaaaaagttgcaaagatacactatttttaactagaaacattataaagctatccaagctaatttgttactgtatctcatttttaaaattcccactgagtcaaaggaaggacaaggtaataactaagagtactgatggaatttttctttcaaggtcagaagtgaaaatatatgaaagatagctgagaagaaacttggatgtgccaggagaatacctgtgactagactaaatatggaaagaagtagaagtaggccattaaatacagatttctatttatagatgggcttatttaagacaagtgtcttcatcgtacatagtcctaatgccaacagcagattggaaaatattctcttatttcaaaagaacaagaaacaccatttcaaagggttttttggtttttaatgaagcaaagctttaagcatttttccttttttaaaactttgtaaaaagctgtgtatgcaaagctctatattctgtagttaatgattattgccagtgtttgggtactgacatgtcaggctttgtgctgaatcctttatgtttgtgatttcatttaatattcataacagacctggaagataggtactgttatgtcattttacaaaagaggaaactgaagttcagagtaagtcacctaagagaaggggccctgatgaaccaggtgtagatagtcaggccctaagacctggttctttggtatcctgtagtaacaacaaggagtacatccctatgtttatctctagtgcacagaatgtggcataytttatgtgcttatcaacaacagtagtaataacaatagcaacaaacatttattcagcactaataagcattcttctcaactcttctacatgtgttttcttacatgatactcagataactctaggagctcactgttatcctttttttcataatgcaagacacagtgggggctgagagggattgagttatccacacaattttccttagctaataaggcagaatttaggcccaggtctacctgagcccgcattcctaatcactatgatgtattgtagaacacccaccagttaccaccagtgtttgaaagaaacttgaaagtctttaaagtatggcctttccatcagttctccatctttgggtagagtagagcaggctccattccttcctttagagcctaaaataccctcacttctctttgaagttcttcccacgatacatttaacaaatatttattgactagctactgtgtgataggcactgggcactgagatacaagtgaacaagatagtcaagggcctaatactaacagagctctattctagtgggagagataaaacataaattcataaataagtaaaataatttagaagactaatttcccatcactgctcttctggcccaggcttacccccaacagtcacatctccctgtctgaagtacttttttctgatttatctgtagtcactatgtgaggctgtcgaagtctcctttattcattacatttattctacagacctatcaaatacccactgttttattttaattattgggaatgcaaaaataaagacagtcactcccctyaaagaacttaaaatttggaccatacagtgtttcccaaattttcccgtagaaaatgagtagggtaaatgtaagaggccgtttagttgggaaggaggctgtggctgcctccagccctgcccagctgcctagagggctgaaggaatcaataacacaggcatgcaatagcaagccagttcagaacttttggtttagtgaggagatgtttgcacaaaaatatgtttattgtgcaactgagtaatagctatgaatgtggttcaggagatatttcactaacaggcttctacctagagagaatgaataactggtgttctccattctcagaatgcttgggtctattttttttttttttttttttttaaagagacagggtctcactctgttgcccaggctgaagtgcagtggtgtgaccatagctcattgttaccttgaacttgtgaactcaagggatcctcttgcctcgacctcttgagtagcagggactacaggcacgtgtcagcatgcccacctaattttcaaattttttataaagacaaggtctcgctgtgttacccaggctggtaactcctgggctcaagcgattctcctacctaggtctcccaaagtgctgggattgtaggtgtgagtgacctcacctggccttgggtctactttttattatgcatatgttctcccaccaaagtgagtggcttgcttaccgaagtcagttgtgcttgttctcaaatgtgttcatgctagttatcttggttataatgacataatataattaaattttatacaaactagtgaaatgggtttaaaaaagctctttctaagaaaactgaattgaatgctttgggaaacttggataaagagtaatagcaaaaaaaaatgttgaataggtgtgacaactaagaaagactgggaaaatttcataaatctagaatgattcttctgcatgcagattgtttcacaaatgtctaagctcttggtccacttggaagaaactgaaactgaaaatcacagaatgtatattattgatgtggtttatttaagaaagatgacacacagctctgggtcaacagattcgtgctataaataaggaaaagaccctggtgaatgaatgtagacttatttgtaaaaagttaaaacagttaatgtgtctaaaactttttcatgattctatgcttgcacttatttttaaaattaactgactacttgttcagatgttctaaataattaaataagtgggtttctggtatatgtgctcagtgtagcaggagaaggagcagctggtgagttggtgaagtcctaatcaagttaaggataagaggtaatgttagagctgagacttgaagtatgagtaagagtttgcccaaaaaatcaggggtagatactccaggtttaagagaatgtggtatgcagatactccaggtttaagagaatgtggtatgcaaaggcccacaggcatgagagaacagaacgtgctctaagaactataatttttatagtactcctggagaataagaatgcaaataggtgggaaatgagggtaggcaaggtagtgggggccatgctgcaagctcattgtcaattgggggatcattttggctgaaataagatgctggaagacacaggatggacgatcctatgccttatagcagtctaggcggatgcattttttaggaagcaagtagggagtagctgtgctttaaattcctcagtgtgaaaccccaaattacataggaaatacagatttctcgtggttcttggtcactgttactgaaatggctactttgacatttacctgtttttaaattttttatttttaacaccatttctcagggatagctgagcttgtggtttaatttctgtatatttatgttgtttattgtgtgaatttttatagttttaaaatccctaattttatgatagagagctataatattcttaaccaagtgcacagtcaacaggtatctgagaaattacttcaagctctatgtaaatcactaaaaaatcctaccattacaaagaccacctacatatacattttgaattcattctgccttcagtgtatttaacacttttttttccaatttgttagtaatggcagtgagataaaaaggcttaagagatttgtcctagcctcattactccttaaccatgtaacattgggcaagttatttaactgctttaagtctcggtttccttactcataaaaagtagaaataataaaagaacctactttataggattttagtgaggattattaacaatattcataaaagcatttactgtgtgccaggcattttggcaaaggctcaaccacagcaaaggatgctatcgttacacattcaacaaatatttatgaagtacctcctctatgtcaggtattatgctgggcacagtaaaaacaatggaattaagagtctagattgtgctttttaaaattctgtgactttcatatttattctttgcctttggttttaaatatatttttatatgtttgttatcagtgtacttaatttgatgtatgtttcatttatgattcatgaataatttaatactttgtttttatttttagcaagatatcctatcaagtagaagaaccatatttacattcttataattttctttatcaaatgtgttgttagtctgcagttttcattgtattaaataactcatctakcctaacaaatttttgttattgcaaagatacactttagctaattctttaaacttcaggattgcaggaggcctctagtctgtcaggtcaatgagaataaacaacattatgaacatgcttaggtgactattttgtttaatgagttttattgaaggatatctagattcacatactgaaagccctaggttatatgtagaattacctttaaccagcaactccaaccatgtttataggttttatgtctaccaaactcaagataaatgtaagaggtaggccttgtcttagaggactattgtagctattaaaataattaagtacccgttttcatattgtatggaggtggagatgtttaaagagttggtgtgtgttcattatgtggtgtttagtgggccaaggaggctttgcacagtgtccttggcattaagttgtcaaaatttgggtgaaattttaggaaggatggttgatggccatcataggatctttgatcatctatcattaagcatggcaaaaycttggaaatgtcttttcttaattttttgatggtggaaaataagacagtggattcagttaatcacttgaaggaaatattgtagttcacggtagtgtgagcatatcagctcctgttacttctggggattctcttatagttgggtaggttggttctgattttttcctgttattaaaaccgtgtaatgaatataaaactttgcatttctgaattttctaagaataaatgttcagaaatggtgttttcttcagaggatatgcactttttaaaggttttgttttgtatttctgattgttttttaaaaagagtatatcaggctgggcgcggtagctcacacctgtaatcccagcacttttaatcccagcactttgggaagctgaggcgggcagatcacctgaggtcaggagttcgagactagccaacatggtgaaaccccatctctactaaaaatacaaaaattagccgggcgtggtggcatgtacctgtaatcccagctacttgggaggctgaggcaggagaatcacttgaacctgggaggcaatgagctgagatcacgccatcgcactctagcctgggcgacaagagtgaaactccatctcaaaaaaaaaaaaagaaagtatatcaatttgcactcccattcatattaatttgttggtccaacagctgttttttgagcaccaactgtatgtatattagtagagaaccataatgataaaaccctccattcatctagtttctagtttacaatctagtaaagaagtggacaataaaaaatatgtaacgtgatttcaagtagcggtaagtgaatgaagaaaaagaaagatgaacagagaatgaaggggtagaggtaatattttagataggctgggtagagaaggcgtctctaagttgacatttgagtagagacctacagtctgttttattgccaatctcactgtatttattaaagcatttaatattatcactttaaaacatatttgccagttgagatgaaaaatatttttaaatttctagatttttctttgatttttatttattagcaggttgatcttttttccattggctgttgtattaactgctgtttgaaacatttaatagagaactaaccttttatttgtagtaattggtcattggattttgaattgctatgatgctttaatataacaaaaaggcacactattcaagtttggcttcctagagaggacagcgcaaaatttaggctgaaaatgagtgacttttatgattctggctcacaaatacgtggtttttgcttagagttttactaaggctgactttagtaactgaagtagcagattatattgaaggatattgagcatgaatgattgtgttagtactggtgtatgtagctgtttggaggacagtgttggtgccaagatttctaactagctctttgaaaagacctctttacttacatgtaaaaatgttacaaatttttgcctttggactgtgaggactcatccatcactggaaaaattgccttcgtgttttcctttccatagtgttagtaacatttattttagagtaattaaaattaattttttttttttttttttgagacagagtctcgctctgtcacccaggctggagtgcagtggcgcaatctcggctcactgcaagctccacctcctaggtttacascattctcctgcctcagcctcctgagtagctgggactgtaggcgccggccaccatgcctggctaattttttgtatttttaatagagatggggtttcaccatgttagccaggatgatctcgatatcctgaccttgtgattcacctgactctgtctcccaaagtgctgggattaccggtgtgagccaccgtgcccgcccctaaaattaatttttaaaaaccccaaagatttgggagttaatagctgggaaaataaaaatatgtacttgatctgatagtttgctttgcttataatttataagtggtagaagacaaaaaactttcttaggaaatttgcttttccgggcttgtgatatgtgattgttcattctatttgtttattatagggggattgctttgtaattcctgtactaattttatgacctataaaatttcttatgcaaaacaaagttttctatttaggttttctttcatcaaacttgtatataacgtctattgatccagtattttattttttgaattaaagtagtgggtggttgtaatctggtttctaatcagtgatcaaaccacttttattttaaactaaggatttaaaagtaggacaagaaataattttcagagaacagatttcattaattaatagccgtttgttttattcatttattcgcttattcacaaatgtttgagtgctgccaacgctggggagctaaccygttcgtttaaagrtgatgaatatggtggggagtatcaggtggaagtttctgcccttatggagtttacagtcttataatagagccagagaacttagcagacagtttggagactgtaagaattgctgtgataggaggcggtagctcccaaagccaagagctgcaccagattcactactagggctgagggtcacaaatggcttctaaaggaagtgatagttttgccatttggttcttgaactccttgatggggcatacatgtgtgactgcacatacacacacaaaatattttttaaattaaattttaaattgtaaaatacacataacataaaatttactatcttaattattttaaaatgtatccttcagtgttgttaagtatatttttattatttggcaaccaatcttcagaactttttcatcttgtaaaactgagactctgtagcattaaagaacagttccccattcccttctaccccctctcccctaatsccctggcaagcaccattctggtttctgtctgtatgaatttgattacttttgatgactcactagtggacaaaagccttttttttttcctccttgctcttactgcccaggctggagtgcagtggcgcaatcttggctcaccgtaacctctgcctcccaggttcaagcaattttcctgcctcagcctcctgagtagctgggattacaggaatgcgccaccatgtctggctaatttttgtacttttagtagagacggggttttgccgtgttggccaggctggtgttgaactcctgacctcaggtgatccgcccgcctcggcctcccagtgtgctgggattacaggcgtgagccactgtgcacggccacaaaaacctttttaaatctcaagttttctttctgttgttttgaaaattgcctgatttctgttaccaattacatattactggttttgctttcctggagaaatttgagaacatacaaaagcctagggggttgtttatatggcagcgttcttgccagtggaagcacgaagccaacatatagccttagttagagagaccctcttttctctggccatcctgaggcgtctcaggcagtatggagctattttaggagaagaagcatggtttgaaaagggagaaatattatcaaagcttgggttttttccagaaggctttcttaaatcaggggttggcaaacgttttctgtaaggggcagatagtaaatattttaggttttataggccatacaatttggggatgattactcaattcagccatggtagcatgaaaatagccgtagactatatgtaaacgaatgagtatggctatgttccaataaaactttatgaaaacaagtggcagctctcacagaccatagtttgttgacctctgtcttaacatcctcaggctacacatgactggagagaaactttggctgaagcccatgtctgggagatcattcagctagttcgtgacttgaaacctagaaattcaatactatatttcatcaaatttgggccattgattataagttacaccttttatgtaccactaataaagaaaagaaatcaaccaattaattgtaagaacctattggttatatggtggatcctgctttcagagatgttaaaatgttgggtacgggtgagggagtgtgtctgaatcagtgaagtagtaataatatcagccaacatttgaatatttactgtggggccaggcactttgctaagcactttatatgcattatctcatttatcttcataacgaattaatgaagtaaatgaaaaagacttagagcagttaaataatttgccatagtaagtggtagattctaagaaacccaggtagcctggcattaaagcctgtgttctctctcacttactatattttactgtctcatttgatttaaaaggaggctttttgtcaaatgatatcattcatgctggaattgatgtagtttattgaatcgggtcacggaggaaacagcaactacataatttccctttagcatgtccttggaatttcagacatttctcactgcagccagctattgcatgccagtgccctcaaaaaaaaaaaaaaaagatttatgaacctcttctgaaagtgttttttaaatgataacatgtctaagccaagcaaaacatgctggacgaggtgttggtgctctgtatgccagtagagtgtctgtgatgctagccagcacttctggtcctgctgcagaggaggagagtgagctccacgtattactgtaattcaccttcttctgcatccgtgagccttacatccaggatggtgcaatcctgtatgaatgatgcagacttctgcaaagatgaccttattgactttcaaagatacaggacacacatgaaccactcagctctcagtcttagagaattctggtgtttgtagcacaggctgcatacaactaacagaacaaaagttgtggaagcttgcttttgagcacattagggttttcagcacttgtgaccatcaaaaagaaaagtcaaaatggaatggcaattaaagatggtatgcacgtaatcatctcaaaccacatcacagcatcagcttcttattcaagccaaacagaagccttctcattgaaacttagtttgnnnnnnnnnnnnnnnnnnnnnnnnnnnnnnnnnnnnnnnnnnnnnnnnnnnnnnnnnnnnnnnnnnnnnnnnnnnnnnnnnnnnnnnnnnnnnnnnnnnnnnnnnnnnnnnnnnnnnnnnnnnnnnnnnnnnnnnnnnnnnnnnnnnnnnnnnnnnnnnnnnnnnnnnnnnnnnnnnnnnnnnnnnnnnnnnnnnnnnnnnnnnnnnnnnnnnnnnnnnnnnnnnnnnnnnnnnnnnnnnnnnnnnnnnnnnnnnnnnnnnnnnnnnnnnnnnnnnnnnnnnnnnnnnnnnnnnnnnnnnnnnnnnnnnnnnnnnnnnnnnnnnnnnnnnnnnnnnnnnnnnnnnnnnnnnnnnnnnnnnnnnnnnnnnnnnnnnnnnnnnnnnnnnnnnnnnnnnnnnnnnnnnnnnnnnnnnnnnnttgcaaaccctatcttccgcttaggattagattcagctacataggatagagaaacccagaataacacagtagatctggagagaggcaatccagagttagtaagacaattatgtggtaatcagaaacttgggcttctctgtctggctgctctgccacccttatctcctcattgtccagatggccaccagaatgaacactattcatcatgcctctagtccaaacagcaggaagaaggaagatggcacagaccctgccctttcacagagacttcctggaaatcttttaattcacttctagttaatcatattgaccagaactttggcacaaatagctgcaagggaggctggaaattgagtcttttattctggatggcagtgtgcccagctgaaagtcagggttctaaagtgaaaggggaaaaaaatgatgttggggtaggcagctaataatctctgccatgccatgccagtgctttattttatgaatgatgcaataaggagggaaacatgctcaaattcttttttaaaagactgccacttgagagatggagggtgggttggaaagaggtaaaggatcatagagaccactgcaataacacaggtcatgagagtgacaggacttggtcattgatcacatatgagcaggcttctgtcttagcagccgagtatgttatwttgccatagagacaggagtaattgaagctgactgcgtagaagaggaggtctacttagaatgagattttcaaggagcaggcagaaagaggaggaaaacagagtatggtgtttcataggtcaaggggaatagagcacttcaaggtttagggactggtctgttgtgtcagatgtatctgagagtgcagataagaagtactgatgttattgataggatttagcaacttagcagagtgggaggtgtttgggtcatgggaacggatccctcatgcatggcttggtgctgtccttgtggtaatgaatgagttctcgtttcattagttatagtgagaactgattgtttaaaaaaaaaaaaagcctggtacctccctccctttttttcttgcttcccaccatgtgatctctacaaaccagctcccctctgccttccactatgagtggaagattccggaggtgctcaccagaagcagatgctgacaccatgcttctttcttgtacagcttgcagaactgtgcaccaaataaacctcttttctttataaactgcccagcctcagggattcctttatggcaacacaaccagacaaagacattattctaggtatgacttttctgttataaagtaaatttgtaggatctttcaaatgatccagattttggttattacctttagaaatgtgaaatagacaatacatgaaagtgactagcacagaatttggcacacaaaccctgtgcagtagcagtaagggtttagtgaataagccagtgttcttggaacactttctgtacatatggagtggcattcctaattcgttaactgtttacacagctcattttccttcaggcaaacttgcttttgttgaaaaaaaattctttcagattgcaataatcatacccttgtgaagcatacagggcaggtactgttagcttgctttgggtgtttggcagtgtctccaggaatagcacaaatatgctaccaagaactgggttatcctattactaatgggaacagtgtgtctatgactgtgtgatgaatttggcttttcttctaactggaaactaagttgtgaacaaacttggcaaggtacagatcatggtagatagttttaaaaagatctttttaaaaatctcattccactttctgcagaaaaactagattgacatcctagagggctgaatgttgtttagagcgtgttcttcagtagattgccaattaactttctttcacttatcccccagaggatgttagctatttggccaattcttttccaccagtgagaagagaacatgagtggcctggcctcctctggactttttgccaggagcctcatgcggtttgccccacctcacctatggagtttccctcctgtctgtttagttgcagtagaggtcttagaacactgaattttattcatgttttgggaaagagagaaacagggtgattagaattgaaagcacaaagatcgcactggtgactgactaaagtgattcagtcagagtaacattgaggctgtatccagtagtatgtgatgttccctgtgttgtctctgaacactagccatctttgcttgagtaaatgtctttgtgcattctcctgggggagctaagtagggaaagtggaaggcaggcctaaaacttgtctctgtgactaggtgtgtccagtgtgactttagctgttgctaagcaattttctaacacatatccccttggcttgttgaactaaaccaagctctgtgggactgcttggttaggtgcctggtagagggtgtggacagtgtcaccaagagagaacacctctgctgataatagggtgatttatgtgatggaaagctgtgcttaccaccaaatttaacatgtaataagctttagacagaaagtgtcctggcttcctggaatcaaatgactagtacctttgtgcacacccctgtgtcttttgaggggtggtggtggtagggrctgggtatgtcaggaaacatcagtgaaagacctcccctggaggcttccaacagtaacgttatcttgaccacttgaaatatttctcccgtcttcatacgctgttacttctttttttcctttccacagttattctgagagtcttctgtggttaacaaattcctcggcaggacctacatttaattagctgcttttaagggttagatatagcaagacaagaagatattattgaaagcactacataaagaaccatggttccttgacattttaagaggtggggcggctttctgcccccttaacttagcatgcaaggttataaatacaacacatcacagagaaatctggcacttacttgaatggtacataagtctctgtattgtgagttgccagggcctgttcccagaagtctttattgacttggtttttgaattcttaatgttgtccgtggatcagctcattttattttataccaaatatttgaacagtattcagaattacattttaaattcaaactcagtttcttaagatgccaaccttggggatattcgagttaaaactagaagtatatttagtataccttttggctgaaggccaaatggcctagtgttaaaatyaatatgaggctgagaatctatatcaccatcatagaataagtttttgggataacaaagaaattgcagytgttacagttctatttagaaatttagtaaccaagctttaaaatgttgatgttacagtgcaagaacaatagttcatcagcatggttatctggtagattgcttttgcagtcaccataatgcacatctataacagtaaatggacttactttggtcaacggaggttgttggaggagcaagatattttccaactatttttgctagtattgaatgtgctgattatgatgtagctgccatgatgtcaagttttccttcctctctaatagtaactgactgaagtgaagctctgtcctctcagtatcctgagcttgtaaatttcattaatttatggcaatgatgccatttccttgaagttatctcacaaactgaagttttgtgcatgtcgacggataatttctgaatactttctcatttatattaccttattttgtgtgcgttttcaaaaatatttcagcatgcacttgttccttcacacagtcacttgagatcttacattttggatctagaaatttggtgatggagtaatggctctcatgacaagtgtgtctctgaacatcagttttcattgcataaacataaatttttacattttctctagaacagaatgagtggaagatcttcacagcttgtcttgtaagaagtctgcatgcggccgggcgccggtggctcacgcctgtaatcccagcacttggggaggccgaggcgggtggatcatgaggtcaggagatcgagaccatcctggctaacaaggtgaaaccccgtctctactaaaaatacaaaaaattagccgggcgcggtggcgggcgcctgtagtcccagctactcgggaggctgaggcaggagaatggcgtgaacccgggaagcagagcttgcagtgagccgagattgcgccactgcagtccgcagtccggcctgggcggcagagcgagactccgtctcaaaaaaaaaaaaaaaaaaaaaaaaaataagaaaacaccgggaagattttcggatccactagccaggcactgggaagtctgcatgcttaggacacataagttggttatttcttagcagttctggcgattgaactgttgttagtaagtcctgctatgttggttttgttacttccaaagcataattttgggactatttttttgtgcaaacagcctatataaaatgtattaagtgctgttccatcttgtatgaacatctcatgtaagcagatgttctctgatagcttgtctttgaagcagaattatgagagtggcccaccctcttagctcatagccagcaggtgaaaagtgtgagtgaaacactgaatgttgatgattcctaaatcgttctctcaccctatttgtcactgataattgcataacacttttgtctttaatatttcttcaatcaggtatgtttttagcrttgttgaattgatcattgtattttgctttcacacttaaaaaaggctctgattatgtctccatgactaagtacaggaaagaaaagcagcacatttaatttcattaactaaaatttataataaaactttccagtaacatgtttctacaaggaactttgtacctaggactcagaacgtgggcagatatttgttttcttctacttaaaagggttggcagtctatttgtgtagcctctcaggctcaagcagtcctcccactccagcctcccattgagtacctgggactataggtgtgcaccaccatgctcaggtaattaaaaaaatttttttgtagaggcaaggtctcaccatattgcccaagctgttctcaaactcctgggcttaagtgatcctcctgcctcagactcccaaagtgttgggattacwgatgtgagcccttgcatccagccagaactttctattatttatggtgtgtggatcaaagctgatttagcatgaatacatatgattttggagttctgttttcttctggtgaaattttaaggcagcaaggttgacatttggtttttaattcattttcactggaggtaaaaaaaaaaaaaaagttcctgttagtactttttcttgatgacttatgtcctaaatcaaattaaatagctcaaaattaaacatggttcctaaagctcactttgtttaatgctatgaatgttagtataccaaacatttctgtaaagattagaattaaggtgtaatctagagttttctgcctcacgttattatttaaatttgtataaatatttgttccctcaaaaagggaatattttcctaaagatacctatctaatgtactgagttttatgtttattgtcattctgttttccaacttattgaattatttgaaaacattgttatatataaaattaatagctttcagaattattgtagcatttttacttttataataagcatttatactttgataaaatattgatgttacatgaaaattttcactccaagttacatctagataacgtttacctctatttgaaatagaatattcaaataacaacaaactcaatgatatcccttgtttaagttcctgatattgtaatgacaagatgggtcatactttatagtacgattcaatttatttaaaagttttgagacaaataaaatggcatacaatattgttacacacataggtggtaaaactatagaatgaaagtccggatacccgtaggggtagaagaggaatgtgattaggggcagatgcatggcagtgttccttttttaaaaatgttattctttcaactgtatatgtatattttataaacttttatgtatgcgatgtaccacaattaaaaattttaggtaaaattggaagacaggcctgtcctaccatgtggaaaattgctgctgtgtactctttttttaaagtgtagtcaaaacataaataggtaagactgtctctgaactaaaaattttacctaaaatgaatgcatgaactaggagttttcggtgactttcaactgattttcacatgccttgtgagacctctgtaaatattaggtccttgctaggaagtgaaaaataactgataaatggaaattcttggcttttacaaaataattggaaaataattggcctggtcccacttgctgactcttgtaaactaataataggctacttacagccattgatcacagtggtctttctttccttcctctcctctcccctctccccttcccctttgccttcctagtactggaattggactgtttctattcctacttaaagccagcctctccatttgttcatcagatcccttcttacggcctatcaagtgttgtttcagcaactctccctcttcagtcttttttccctcctgactgcattcccattaatgtataaacatcctcccattaaaaaaaaacaaaaactcaaatcctatattcctttctacctatagccccatttctctgtttctctttaaggcaaaactcttgagttttcgatattcatatctccaattcctcgtttttcattctnnnnnnnnnnnnnnnnnnnnccctcccccctcctccctctcctctttctgacaggttctcattctgtggagtacagtggcatgatcacagcttacttgagccttgaccacctgggctcaggtgatcctcccacctcagtctcctgggtagctgggactacaggcatgcaccaccatgcctggctaatttttgtattttttgtagggtcggggtttcaccatgttgcccagactagtctcaaacccctaggctgccttggcttcccaaattgctgggattagaggtgtgagccaccgcatccagcctgtttcttttagtgactggttgctctcagttgctgggctagaaaagattataagctaccctgttatatcagggtgacaaagattctactgtcatctactcttatttttctagcagtgtgacataaattggaagtttttctctcctaagcaatattaccagtttctttgaaatgctgaacaaatgatggtcatggcagtagagtcaaatgaaaacatccttcaaggattgtcaactctgcagggtgctttgtgtgtgtgttggggggtcaagttgttatcacccctgcgttgtcctcacctggaccacatgctgcaggggaagcgatcagtgtggtctgcagccatcggtgtggtctgcgttctttcctgcctccctcctcttccttgtcatttcacatcccaatatttatgtagcaccccctggagtgcccacaggcctgtcccctcctcttatcttttctgtaaccagcccttattttggttcatgaatatgaatggctttagaaagctacttagcagcacttaccaggaagattgacaatcctaccacatgaggaaagaattgatcattagtgatgattggagcaataacaagtagagagccttggagaagagtgcttcatgttcttctgtatttacaccaaacaagaaagtgtattaatttgcacttggcagttaacatagtatattgcagggtagaagaaataagaaccacagactagtttttttgtggaaagctgttaaaaacaagaattttgttatcaggaggcaacatatgatatatgtatgtatgttcatctgaccaagcataaagagatttttgcctccataggcttagatcactggagtgtgagcctgtcaagttctttcccagtcacacctacccattacacacacacacacacacacacacacacamgttcctacggtagcagaacaaataacagctaacatccacaaagcacttaaggggtagttttatttttttcagtccattatgtgttagctgttgtacaccatgatgtaactgaagagtcaatttgaggacctattccattaaagcaaaataacagcaaacatgtcacataaatggatagaaaatacattgtgatctttctgaaaggtttccttcttactgtaagatgtttagacttgcttgtgcctctgctttgaagaaaagaatctgggcctctgctgtaagttgtgtcactgttcctttcctgtaagggagaagttatagattaaggccctctgctcacagaaatagatgaggatgctagggagaagattgagttgggattttcttcagccccacctcttgccctttccctcccttccagggcatttcttagaacagtgacaacacttaattttccagtattggcttttatatggtgacacctgaaagttaaattcttgaggaaggaattctgtccttgtgcatacctagaagtttgacaaaaagtctatgctacgttcctctgaaaggcaaacttatgactgcatagaggagaatggcaaagaacaagtgtgttttggtatttgcctcctgtggtagaaggaataatgtgtaattttatatgtagttctccagaattgaagtagagccacagtacaacagaaatatttagacttgatgattctaaataaatgacttgatcatttgctatgttgatgcaaaatgggaattgagtgtttgaagatactccaagagatctggatgttcttaaccagccagacaatatatagggcctacaactttttcccccttctcgtactccattgtaaagtaaatgagccactgaactactgtgtgcaagggaagttgcctgttaaagtacttgattttgaaccacaagggcctatgacattaaagaaaagttgattaaaactttccacagagaaaccgaaactttatggaagcatggaaataaccctgggattgatatgctttaacgtcccttaaagytgtttaaattactcctataatgttatttttctttcagattcaaccctatgaaaagataaaggccaggggcttgcctgataatatatcttccgtgttgaacaaactagtggtggtgaaactcaatggtggtttgggaaccagcatgggctgcaaaggccctaaaagtctgattggtgtgaggaatgagaatacctttctggatctgactgttcagcaaattgaagtgagtaacatttagcctttctcatgagatactaaaatagtttttagtttttaagttatcataaatgttataaaatgtagcagatgtgaatttgagctaaccaaagagcctgctatctttaatctctttattggtggaaaaaaggtttagtgttcttaagggcaaatccttaaggttatgtaaaggcttttgatcttaaatagcacctgtggttgttgaaatctctgggtctgttgagattctcttttgatctcccactgctctacccactttctttctggtggcagccttcatcaaggctgggatgatcttgctttattaaccccttttgggagggtggtggggaggatgctgtgtatttggctgcaggtcatgcatgctaagaactgttcttggcttctctcttaggacaaagtcattaatcgtacaccataagctcttttggggcagtggccttattttttccatctccttatcctawtgcctagtatggtgctggcaactataatcctaatgcaagttgtagcagtggctaacatgtattcagcacttattgtccaccaagtattattctgagctctttatatgaatttactcatttgttcctctcaacaactctgtgaggtaagtactgttatccccattttaccaatgaggaaaccaaagcacaagaggttggttacttgcccaaggttcccaagatagttagtaagtgcagaattaaaattttaacatagggcagtgtgacttctaagaccctgttttcttcacactctgctgcctcgtagctcttctgaggttgaaaagatttcagctggggtgtgattcaaaatttttgatcattaatgttgagagtagggagccatgtctttgtcacatttatactttcatccctacagagatgttaacatagagtaaatgcgtaatcagcacttgcctacccagtaaggccacagagcactgtggctgtacacaagctccagactcaaactgcnnnnnnnnnnnnnnnnnnnnnnnnnnnnnnnnnnnnnnnnnnnnnnnnnnnnnnnnnnnnnnnnnnnnnnnnnnnnnnnnnnnnnnnnnnnnnnnnnnnnnnnnnnnnnnnnnnnnnnnnnnnnnnnnnnnnnnnnnnnnnnnnnnnnnnnnnnnnnnnnnnnnnnnnnnnnnnnnnnnnnnnnnnnnnnnnnnnnnnnnnnnnnnnnnnnnnnnnnnnnnnnnnnnnnnnnnnnnnnnnnnnnnnnnnnnnnnnnnnnnnnnnnnnnnnnnnnnaatacagatgttcctcttgttttaatgaactcttttaacacggatgaagataccaaaaaaatactacagaagtacaatcattgtcgtgtgaaaatctacactttcaatcaaagcaggtacaatgagtaaaaaattaactctgggtatgttactcctgggaaaggacttctttatcttgtttataacagagcagtttcaagatgtacaggtaccaaatattgatgttcacaagtgtttgatgcccataaaagctgagcatttgttgatatgtgattgttataatcactctggttctctaatttccagttcttaaaattcagtctgcttgagactctgttccatgtccagaatatttggggatagtttaagcctttgctttctgagagcatatttggtctccaggtgggtctgtgaaaatctttttatattcctacattattgataacctttcctatggaaaggaatttcttcaacaccttttatgggcttggggtaatttaataaattctggaggaaatctttggggaatagtgagtaaaaagtaaattcagatgatgaattctgattgaaggccaggaaactggagaaataagacttccatttaagggatggacatcagtccacatgaacttgtacagaagggatgttttgaggctgggtgtggtggcttatacctgtaattccaacactttggaaagccaaggcaggaggattgcttgagcctaggagtttgagaccagcctgggcaacataatgagacgtcgtctctacaaaaaaaatttaaaaattagcattggtggtgtgcccttgtagcccagctacttgggaggctgaggtgggagtatcacttgagcccaggaggtcgaggctgtttgtgctactgtactccagcctaggcaacagagcaagaccctatctcaaaaataaaataaaaataaaaataaaaaagaaggacatttctaaagttgtgtcattagtttgtttggttgtttttaagatctatttcccatggttacttttttttttttttttttttttttttttttactttgcagatgttttgcctttattttctagtctttagtctgttgcggtgctagctcccgttttcctcttgccccatcaccagctttacctttcttactagtggkgggaagcagacatcttggaatgctaacctggkgcttattttctgggaaagaaagagatccacccctgaatatatccatttgtaagaatgggcagtatttcccagataggttttcagggaaaagaacaatctcacaactacataagtttgagaaaatttacttgatayatcccttcttttggagagtcataaaacatgaatatcttaaaaatatgatgggtcctcccatctgtatgaccatagagacatgtttttgcagcagctatcaccatctggaaaacagattttggacaacacagatactgagagattttcttaaatggattcacctataattaaattacttattgatagactctgaaaagaagtgaaattttatttaactttaatgtattattttatttaaaggcctgaaatgctctacagggtcaatattgaaaaagaacttttttttttttaaaggtacccgaggattaataaagaatctttacttcctgtagcaaaggacgtgtcttactcaggggaaaatacagaagcttggtaccctccaggtcatggtgatatttacgccagtttctacaactctggattgcttgatacctttataggagaaggcaaagagtatatttttgtgtctaacatagataatctgggtgccacagtggatctgtatattcttaatcatctaatsaacccacccaatggaaaacgctgtgaatttgtcatggaagtcacaaataaaacacgtgcagatgtaaaggtaaataccgagaggaagcagtttagggcttcatgttttcacatttcgtaagttatgaagttaaagacttttttatttgaaagtttctatgttaaacaacacatttaatatgttctgtttgacataatagtatgtatcataaatccataataaatagtatcaaaatcatctctatttttttkgataagctacatcagtaattttaactaaaataatttcatacatatttatggcaaaaatctgaaacatgtgaaatctttcagtaaagttgtccaaacctttaatactcttctagtttggcatttaaatgttatttcattgtcccttttatgaaaatttactctgtttctacataatgtatttatatattttttgtataatcactatctttgtatttacaaaaaaatgcacttgagactgatgtggaggcactcactattttctgcctttctagggcgggacactcactcaatatgaaggcaaactgagactggtggaaattgctcaagtgccaaaagcacatgtagacgagttcaagtctgtatcaaagttcaaaatatttaatacaaacaacctatggatttctcttgcagcagttaaaagactgcaggagcaaaatgccattgacatggaaatcattgtgaatgcaaaggtaagccaaggttgtggcccattgagcttcctggttcctaaggtcatagtaggctacacacagaccccatcgcccactccctctgtcccatctattccattggtcactcccttttgccttttcagactctagttcctagccctgtcttccagaatctgctgtcacccctctagtgtgccaagttatggtgccctatatttgaccctgggttgtggtagtggcaaaaacactgggcttcaaaagtagagaacctacttcagtcttagttgttgctctgacactcataggtcatttggccatcggtactttgcatgagttttctgaacctatggtttatcatgaaatgatattactgaacagaagagttttaagactgaaaaaagattacatgtttaagagtttggcatatgataggtgcttgataaatgtcagttctcaaaattatttttctggccaggctcagtggcttatacctgtaatcccagcattttgggaggccgaggccggcagatcacttgaggccaggaccaacctggccaacatagtgaaaccccatctctactaaaaatacaaaaaactagctgggtaggtggcacatgcctataattccagctactcgggaagctgaggcataagaattgcttgaacccaggagggcagaggctacagtgagccgagattgcgccactgcactccagcctgggtgacagatcaagactccttctcaaaaaaaaaaaaaaatttttttttttccatcaatggatctctgaaatcacttcccaaatattaactaacctacatggaactaagttgtaggtgcctaaaacctctgttttctattccccacccctaatttcttacagactttggatggaggcctgaatgtcattcaattagaaactgcagtaggggctgccatcaaaagttttgagaattctctaggtattaatgtgccaaggagccgttttctgcctgtcaaaaccacatcagatctcttgctggtgatgtcaaacctctatagtcttaatgcaggatctctgacaatgagtgaaaagcgggaatttcctacagtgcccttggttaaattaggcagttcttttacgaaggtacgtaactataaagatatgtgagttcatatttcttaaatgtgtaattataaagatatgatatacatgtgaattggagactaattacagtctctaccactgacctgttgtattcctctgtctttgataccttttaaagggaattgaccatagaagataaatattttacttcacatttgaaacatgattgccatatggagagtagaaaataatctttaaattttggggcattttatcttctgtctcttccaagaccagtactgctttcatcagtgggaaaaggttaattctggcttaacaaatacttattgaatgcctatcatgtactgggcagtgttctaggttctagggatttagcagtaaacaaaacagactaaatctttgtcttcacggaattgacattctagtggggaaaggatgataagtaagtaaatgtatgatataccaagtggtggaaaatgctatggagaaacaaagcaagggtggagaatagggaatgcctggggaggtggcggggtggtgttgatggtgtaattttacattgagtggccacaggcagcctcattgagttgattgagtctgacaaatcggtatctagtgcaaaaagtgttctagacaggtggaatagcaagtacagtacatcctcagtgtcatcagtatgttcttggaaactgccacagtaagcagaacaatgtgtaacacattttgccataggctaattgatataaacaagagttcagttcctacagtttatttctggtcacaaaaatatcaccaaattttaaaaacaaaacacttctaatattaaactctgaaataaatgtgagctgtacatacattgattaataaaaacaagataattcttgactcacttattccagttcaggttcactggtgaccagagcttatcccggcagctcagggcacaaggcaggagccaaccctgcacaggccgccatcccatctcagggcacactcacacatatccacactcatactgggaccatgtagacacaccagttcacctaacatgcacatctttgggatgtgggaagaaaccagaatagttggagaaaacccacacagatgtggggagaacgtgcaaactccacacagacagtagccctggctggcaatcctttttttcccctcatcagcgttataacaaagtaacattgaacaaaacagcactatctgtggacctgctgtaaaactccaacctagcctgataagtgaaatccaaaaaatttaatcaatgaaatgtgacactgtgagcctttgtggttggcctatggggtcctgctctgccatccaagtctgttttagtccacagcaggtgtggtttggtgccacctgctgtggatgtgtagaatgcagatggggaattagaaactatgaatgcatgtgtcctcagagtcaaatgaagaaaatatttcaagtgggattgatcatgtgtcaaatgctgctgctgattcaagtaagatgagaattagatttatcagtatggaggtttgggagcctcacaggcatggatttaaaagagaatgaaaaacgaggaattggagatatgaatatcgaaaactcaagagttttgccttaaagagaaacagagaaatggggctataggtagaaaggaatataggatttgagtttttgtttttttttaatgggaggatgtttatacattaatgggaatgcagtcaggagggaaaaaagactgaagagggagagttgctgaaacaacacttgataggccgtaagaagggatctgatgaacaaatggagaggctggctttaagtaggaatagaaacagtccaattccagtactaggaaggcagagtaatgggcaatgggggcaaagtagtggtggtggtggatggaaacaagtggaagttttctaattgctcccattttcccagcaaaataggaaacggggtcacataggacaatctctagtgcttgtaaatctaaggaaataaaaagacaaagatggtgataacataataatttgtgctgttgctcttcctaaaatgtgctctaatttttcagaatccgacctatccactaaagtccagctccagtctagcctgcttcaaagcatgatctctttttttcagttaaattcagattgtgtgaactattcatctggctcttggcatgttgattatctttaaaaaaaaaaagaaaaaaaacccttagatctgctcaactatcttgtaaattgcttggtgtaaaaacaatgtttgtagctcctggtctttcctgcacggcatttagcatataatgagtgcttaataagtaggtgcttcccacagaggacctgagctttgccaaaaaaggtttctacagttcagttaaactttcttgttaatatttttcctgtctttctttgaacccatttgagacaaatttttatgtttctccttttctgtaaggttcaagattatctaagaagatttgaaagtataccagatatgcttgaattggatcacctcacagtttcaggagatgtgacatttggaaaaaatgtttcattaaaggtatgttgttacaatgaaaattatatttcttacagcttacaatataggtctcattttctagtcataaatttacatttactttaaggaatacttgttagtcttagtgccaccttaattactagtgtaattattttactgaaatgagaatctttaaaataggatcactattagcattagcttaytaaagatgattgagtaaaagcagaaaaaaaatgacaatttgtactgaatataacctattaaaggaatgttatcactgtaagaatattcatttacattattgtagtactcaggtactcttcagtgtcattccagcctcaygtaagaaataggagggaaacsggggtataaaagtattaaagctcaccaaagatacaatagctttttccaaatcatgtaattttttaaaaaatctcctaactagatttcatatactcctcccattaaagctacttacttaaatgaagatcttgaaaaaacaaatacatatattgaattttattgctgagactgcctaaagacttaagacatgaaaaatcttatcagtaaactgttataaaaacaacaacaaaagccctatatgtaaatgtaaaccaagcaccttttaatttctctatgaaggttrgataatgctggtggccttgcaagtaggcctccaaaaggggctggccatgctgtggcaccgggtccacttcccgctcttagttctacctctaacaaggagacagagaatctagaactactgccaggattgttacagaaggacacattacaattttccttaactgttatttgtttttcatgtttaatattgtttataaaaaaagttacttcactgtaaaaaaaaaaaagttgtacataaacttgatcactgtaagataatcaaattgcatttcagttgcaagtacactcttttgttttccctgtcacttagggaacggttatcatcattgcaaatcatggtgacagaattgatatcccacctggagcagtattagagaacaagattgtgtctggaaaccttcgcatcttggaccactgaaatgaaaaatactgtggacacttaaataatgggctagtttcttacaatgaaatgttctctaggattctaaaataggcaggtactttactatgttactgtaccctgcagtgttgatttttaaaatagagttttctgcagtatgcttttagtctaagaaaagcacagatggagcaatactttccttctttgaagagaatcccaaaagttagttcatcttaaagtgcaatattgtttaatcttaaaactgggcaactttggaagaacttttaacagaagcctcaatgatgatcactttgaattgcttgtgatttcaaaaataaagcagtgaagcaatacttgtgtacactggtactttataatgctaactataaactggtttattgttgttagacagttactatattagttggaagatttgccctttaagtacacactggctagttacctagccagtgtgtacttaatgagtccagtttttggcatttctaagaatcttaatcataccattatttccataggaattaaactgaaggtattttctttagtacctacctttcatctagttctaaaactgggatgcctgccatgctttccacaaactctccatttattgaaacaaagtggcatttattttcccagctgacgggggtgggcaaagggaaggcatttcttcacatccttgtactcttctatagtgaggtagggggtatagcttcataaaaagttccctttccctgaagcttcatttcctgaagcttgtttattatcactgaaaaaatgatcattaataatctttccattcaggtctgctggtagttcaatttatgccttttctttaaattcatccatacttgttttgagtaggctgcttgtttaaagttcacaatataccacttaaaaaaaagttgccttttaaagtctgttaattttttacagctttattttagacagatagtttaagaaccaaagacatacctctgtaatgataaaggaaagaaaacaagctttccttttaagaaaccaaagagcacaaaataagactgtttcattatacataatcaccacaggatattaggcactctgacagggttaggcaagattcttggtgtgaggtgaagcacaggcactttatttgtacagtgctgctgattctaattttgaaggtaggtattataaaagtctttacttgtcaccttatttctggccccaacacagcagcctatagttttaaaagttctgtttctccctggtctttgttcgtatacacatcgaaagtaacttaaaaacaaggatccaagggggccatacttcatatgttatctaaatgttaatatgagaactcaaaagtaggcagattatatgaatacatattcttacctctgctacaaataaaaacaccccaaacccttcatcatacttttataaaaatacagatattaaactgtagccttttatataccatttctgaaaagtatttagttgcataaatagatgccaggatcttttttttttaagtattaattacttaaaaaaaggcttaagtctttcaggtatttagagagctctggaaggctttacccagttgacatacggtggtagtagaaatattaaatatgcaacacacaaagcctgcaacttgacattggtcactgaaacaaaaattgaattcctaaatccaagcaatcaaaagatgtttattttttatagaaagatctgtaaaaaaataataatttttcaaacagctttactttcatagagaaaactttctacagaagttgactaagattttaaattgtaccatcattaaataaggtgggacaccatatgaatttcattgcactggaagaaatgcaaagcattttttaatataaagtatacagagcattctagtcaactacagctgtgttacagctatgtgttcttttggatttggtccaaagaaacctgagtctgtttccagagagaatgaaaaatgttatagacacctgatcagttactcctcactgtaggatgcacaaaaatgacattccttgtagatcccactgaatccagtttcccaacacttgatactttcctttttcccttcccccaccccagttcactttgggtttcaggttcaattctcgaatcacaggcatccagattttcttcataacaaacacatcccatggtcagatgaactacccagttttccaggatgacatcacctcttctgctcccaaatttcggccatatttaggtccaaatctttaaggccttttaaggcttgaagatttccagtgtaaaaagctacatctgctgtgaccaacctaaataatggagagaaaattattttttaaatctcaaactttctattcagataattaaagtaacagtgctcaccgagtcagagtcctattatctaaaattcagatttcttagtgcccaagtgtccaaatactttacttagcaggattcctgctatgaataagtaggccatttaatgctgtacttcaataataaatatttggaaaatgaataaaccaatggctgttagagtcagtttcatgataaattcagcccaagaaaatcagatttatcttgaaacagcatgaattaatatacagagaaaataacaggctaaactaaaatgtttttgattggttagcactagagtatgggagtgctgactaaaatagtaaactcaagggaaaagcaggctaggtttctaagtgtcatctaaggcgttaaatacagactagtattcatgtatataagcgatactggatatttctttaaaaacccaagagaaaaataggaaagaacataagaagtcacagatgaaaacacctgaataaccaataaactgaaaaaatggtaaacgtcaggaaaatgcaaatcaaaacaaggtactactatcccccatcagactagcaacaattaggaaatctaacagcaaatgttgaaaagatgtgggaaacaaattctcacaaactactccactaatgtgggagttggtacagccactgtcaatacctaacaatatgaaaagtgtattagctccaattcacttataggtatatgccctgaagaaatggtcacaccattagacatgtataaagatcttcagtatggcatggttataatggaaaaaagtaatgacttagcaatttatcactaggggaaatgtctaatttatctatggctgattcatggccaggagcagtggctcacacctgtaatcccagcacttggggaggctgaggcaggaggatcacctgagctcaggagtttaagaccagcctgggcaacatagtgagacctcgtctctacaaaaaattaaaaaaattagctgggtgtggtgccacacacctgtagtcgcagttattggggagtctgcagtgggaggattgcttgagccacggaggttgaggctgcagtgagccatgatcacaccactgccctccagcctgtgtgaccatgagaccctgtctccaaaaaaaaaaaaaaggttgtttgatggaatactgtacagcagtcaaaaacagactactaaacatatatcaacatagataaatcagtaaaaatgcctagtagaaagcaagctgcatatatgcaatataccatataagtaaatttacaaaacagcactacatatttttcataaatctaggtacaataaataagactaaaagaatgtagactaaattcactggaaatgttacctaaaggctgggagaaaaagggaatcggactgcagatggggtgtaaaggtgtacttagcttcatctggaatgcaattttttgaataccattttaaaaatacaataaatatttttttcaagagaaaatgacaaatgttgatcaattctgggtagtagaaatataaataatttattattctctgtatgtgtctatttttaaaatatcttagaggaaaaaaaatcacattaaaaagtacagagctgggccgggtgcagtggctcatacctataatcccagcactttgggaggccgaggcaggcagatcacctgaggtcaggagtttaagaccagcctggccaacatggtaaaaccgtctctactaaaaatacaaaaattagccaggcgtggtggcacgtgcctgtaatcccagctacttgggaggctgaggcaggagaattgcttgaacctgggaggtggaggttgcagtgagctgagatcacgccactgcgctccagcctgtgtgacagagtgatactccatctcaaaataaaatcaaagtacagggctggggagagggagaaataggaagcagctgcctaatgggtacaggattttcttttggagtagtgaaaatgtttggaactagatagaggtggcggttacgcatcactgtgaagacactaagtgccactgaattgttcactttaaaatagttaattttatgttatgtgaatttcacctcaaaaaaagtcaaaagctacatttttagagcaatttcagaaacaaaaacttttaagcaggtagtttatgtccttggctacagggtagaggttaatcttcagggatatttcaaagacatgaattgacttataaagaatgagtttctgttagcatgtgacagtgaggattctctaaggtcagactgacttccaaatagctatattaagaaagaaaagtaacagctaacgagttagcttgggtgcttcagaactactggtctacaaaaacccaactaaccaacccagatttagttatgggaataaaagtaaaagggtatgagcagggttaggccttaaaaatattattagctttttttgaacagcctctttaaggtacccagtatacatctctaccaagagtctcctaagtttctaatatgctattatcttttcaggagcaggtctcttatgtatgtaccatttgtatcatctgacatcaagtgagagatatacacagcgtcaccacatgtgatgttcttgctgaaaatatctgactctatgttggtataacgctattaatgttgattttcttaggtggggttcaggtattacggttgtataaaaatgtccttgtttttagagacacatgccaaagtatttaagggttaaattttatgactgcagcctacttttttggttgtttgtcaaaagggaggtatgggggtgggagggagaaggagcaaaagtggcagagagtatgtggcaaaattttaacagttgataaatctaggtaaaagctattcagtgttcattattgtcctttaagtgttccatggctttgaaatttttgaaaacaaataattctttaaaaagaaaaagaagaatcagataataagactatcattcttgcataaaactcttaaattcagcctaacagattcaacagaatgaagctttcacatagctctttgcaaaattgattcactgtacttcttcttaaatggcagggccaacttctgaccccaacatacatttttttcattttccatttgttcttataagtttgaaatttgagcctgaaattcctttaacaggaaataaaattttattcctaaaaaccctagaacactaaagaattgatattaatacgtaactaaatgatcagtgctttaaattttataaaatctcttccccatatctttatctacataactcttcaaaaaatcctattaaggaaacttttatcatcatccctattttcaaatctaaaaaacctaagctgagggggagtaagtgatttgcccaaagttacaacagctagtaagtgacagaactagaacttaacccaagttttcagattctaagtcctaccctatgctttctatgtactatgctattttacagtaatatatacaatctttcaatagcttacaataaaatatatacatatacacacatatattatttttcataaccctgtgaaagaattaagacagatttcatccttgttattttataaatgtggcacacaggttaagtgacattcacatggtcacacagtaggacttctgaatcctgtttggaatagggaaagctattgggtaactaaggaagtgctactaattcacactgcctcaaaacagatacataacgtcaggtaagcaattgtccatgtataaaccccttttagatagttagatagaaacagatatttccacaggggaaaaaaaaaacacaaaagcttgctgattttacaacgttggtcttcagtgtgattacagcagaaaaggatggcacaaataatcaaaactgatcattaaaacaattcgatatgggagtatatggtgaaaacgttaaaaaacatacccattttgaggtcctccatcatttatcacatttaagtgagataactgctttttcaagtggagt

SEQ ID NO: 95051 - DNA, 19771 bp, Homo sapiens
aaagtgctgggattacaggcgtgagccatggcacccagcgcatctcttgcgttttctaagtctacaatcatatcaacaacaaaaggaggctgttttatcacttttccagtatttattatcaattacctcgttttttatcttattgtattgactaaaacttccgaattaatgttaaataataatgtcagcttgggcaacatggcataacctcgtatctacaaaacaaacgataarcaaacaaacaaaaactatctgggtgtggtggctcaagcctgtagtcctagctactgaggaggctgaggtgggaggttcaattgagccatatcaaggctgcagtgagctgtgatcacaacactgcactccagcatgggcaacagaatgagaccttgtcttttaaaaaaagtctactataaatactttccttttatccttattttgcttggaggttttataatgaatggcttctacgtttaatcaatgcctttttggcctctattgattggctcatatggtgttttctcctttaatttgttgatgttttggggttgtattgatagacttcccaatattgattttgtataatcatagggaatataagttgctgaactccatttcctttttttttttttttttttttttgagatgggaggctctctctgtcaccaaggctggagtgcagtggtgcaatcacagctcactgcaacctcctcctgcctcagcctcgcaggtacctgggactacaggcgtgcaccaccacgcccagctaatttttgtatttttagtagagttggggtttcaccatgttggccaggctggtcttgaactcctgacctcaactgttctgctccccccttggcctctcaaagtgctgggattacagggttgagccaccgtgccagtccttgctaatttttttgtttgtttgtttgtttttgagacggagtctcactctgtagcccaggctggagtgcagtggcgcaatctcggctcactgcaagctccgcctcccgggttcacgccattctcctgcttcaacctcccgagtaactgggactacaggcgccagccaccaccccggctaattttttgtatttttagtagagaaatacaccatgttagccaggatggtctccatctcctgacctcgtgatccgcccgccttggcctcccaaagtgctgggattacaggcgtgagtcactgcgcccggcgttttttttttttttttctttttttttagacggagttttgctcttgttccccaggctggagtgcaatggcacaatctcggctcaccacaacctctgcctcgagtgattctcctgcctcagcctcccgagtagctgagattacagggatgcgccaccacacctggctaattttgtatacttgctaattttttaaagaaatgtttatctttattaacaagcctttgctgcaaaaataaactatccccaaatcttaacagcttacaacaacaacagcttacaaaaacaaatgtttatttcttcctcggttgtgactctgctaggctggtcccaagacaataggttggattcagggctaccctgagtatttctcactcagggacaagctgaaatagaggctatctgtgggtggcaggaaggtaaggggactgatggaaactgaccatgcctttctcactcatcattgaccaaagtaagagacagggccaaacccaacatcaacagaatgaggcgaaaatactctacccattgggtagaatggagtaattttgctaaaaaaatcttcctttttttttctagattttactacttgttgctgtagaatttcacataatttaatttatttttgttttaatcactcctatatctgtggttgtatctcctttctcattcccagtctttcagaccttggctatttcttgtttcccagctgtaactcacaatacatttcattcatgttactggtttttataaagaacaagctgggactacaggcaaccaccaccacacccagctaatttttgcatttttagtagagatggggtttcatcatgctggccaggctggccttgaactcctgacctcaagtgatccacccctctcagcctcccaaagtgctgggattataggtatgagccacagcacccagcccatttctcaactttcataattggatacatttctactaaatataatctatttccccatatctgggaaaccacactgtttctacactcacacagaacacttcgtttctgacactagatatgcaggttttattcccacatcaatcaattctctgacataggctgggtgttccacaattcaattctgacactctctacctggagttagtgtcagatcccacagattaagggctcagtcccgcaaggttgcccccattaaagatgccaactgcaaatccaagcctcctacacttctgaccaactggctgtataaatcagggattctcatgactccctccttggatttgataatttgctagaatccttcataaaactcagggaaacacttacgtttactagtttatgataaagaatattataggccgggcgcggtggctcacgcctgtaatcgcaacactttgggaggccgaagcaggtggatctcttgagcccaaaagttcaagaccagcctggccaacatggcgaaaccctgtctctactaaatatgcaaaaattagccgggcttggtggtgcatgcctgtaatcccagctacttgggaggctgaggcaggagaatcacgtaaacccaggagacagagattgcagtgagccgagatcaccccactgcattccagcctaggcgacagagccagactctgcctcaaaaaaagatatatatatataataaagggatgaacagccaggtgaagaggtatgtagaatgaggtccagaaggatcccaagtgcaggagtctctgtccccatggagttggggtacaccacaccatcttcccatggtggatgtgttcaccagctgggaagctcaccacatttctttgttcaagagtttttagggccaggcgcagtggctcacacctctaatcccagcacttttggaggcctaggcaaatggataacctgaggtaaggagttcaagaccagcctggccaacatggagaaatcccatttctactaaaaccacaaaaatgggccggacccagtggctcacgcctgtaatcccagcactttggaaggccgaggcaggtggattgcctaagctcaggagtttgcgaccagcctggactgttgcaaaaccctgggctggtgaaaccctgtctctactaaaatacaaaaaattagctgggcgtggcagcgtgcatctatagtcccagctacttgagaggattgcagggagccgagatcgcctgggtgacagagtgagactctgtctcaaaaaaaaaaaaaaaaaaaaaattaccctggtgtggtggctcacacctgtagtcccagctactcgggaggctgaggcaggagaatcgcttgaacctaggaggtggaggttgcagtgaactgaggtcaggccactgcactccagcctgggcaacagagtgagactcagtttcaacaacaacaacaaaaaagaattcttatagcgtgtaatctccagtccctgcttccccttcccagggtctttctggtgaccagctcatcctgaagctatctagggcccccaccctaagtcatattagcataaactcgagtgtgcttataagggtttgttattaatataaaaagtcacttctatcacatacgaaattccaagggttttaggagctctgcaggagaacaaaatataataaaagatacttattggccaggcagagtggctcatgcctataattccagtactttacaggctgaggtgggagaattgcttgagtccaggagttcatgatcagcctgggcaacgtagcaagaccgtatatctagttaaaaacaaaagaaagaaagagatgtttattcagcaaataacaaaggttttaggagtgctattgtaggaacccaggacaaagaccaaaaatatatatttcttattacacactgcaagattacatcgaccaagggctcactaagataaaatcttaggcactttcaactactagttttactgggatactttagtatacttagtggttggtattattagattttttttaaagttactccttgcatcttaaaagttcttatttagcacttacattacacattcctcatctatcttaatccattccattttcttaatccaatcagttttagtgtcgatttttgcaaagtttgttatttacaactatttcctttccatctgtctctgttctaggatatttatttggttcaaacctttcctcgattttggacagatgtgtatccggatgatgtgtctctgaatccttatacatcctcagacatgttttttgccctaacaagtgaattatatcttaatggggtatattgagttacagtgcttttcttctagtcaatagacgctagtctactctcttctagcttccagattgcagatagaaacttgctgggcacagtggctcatacttgtaatcctagcactttgggaggctgaggcaggaggattgcttgagtccaggagtttgagaccagcctgggcaacataatgagacccctacactacaaaaaagagagagagagaaagagggggtggggaaggagggaaggaaggaaggagggagggagggagagaaggaagccattttttttaaccaattgtgagtaacttattctttccacacttgttagaacctgaaattttataaaatataggcatgcatttttgttcttatgaatccatcctttagtgaatgttttcaatccgtataatctggtagaatttaggaaaactgtattcttttatttggttaactattgaatcttcttcatccattcctcttcctccttctaaaattccttttttttttttttttttgagacggagtctcactctgtcgtccaggctggagtgcagtggtgcgatctcggctcactgcaagctccccctcccgggttcacgccattctcctgcctcagcctcccgaatagctgggactacaggcgcccgccaccacgcccggctaattttttgtatttttagtagagacggggtttcaccgtgttagccaggatggtctcgatctcctgacctcgtgatccgcccgccttggcctcccaaagttctgggattacaggcgtgagccaccgcgcccggcctaaaattcctgttattctcatagcagggtctcctgaatttttccttaagtcccatcattttattatttccatctctataggcttttgctctgttgtgttaaagaaataattattcaatgatacttgttaaagcacattaaggaagactttatttagcaccatcgctacaggtttagggaccactgcaatgagttcttgcagtggaggagacaggttgggatcaactctgaatgcatcacggacaagtgggaatgtatagccaaggagcagtgtagggggtcagtggatggaaaattggtaagaggcatcaggggtaagggggattctatctaaactgacctaacaggattctcactgaagacaggccagggtggtcggatatcacttgggggatggtggaggatgagatattgagggtgatcagatgtcaaggatgggaggttcttactaaaacaggaatttacaaggagtgctacggatatgtagtggggggaggccagggatgctgctaaacatcctacgatgcacaggacgatctcctacaataacgaactagctagtccaaaatgtcaatagcgccgagattgagaaaccttcatgtagcttacggatacagcttttacccaatcgccagcatccttctcctggggctgaacctctcccccaggactgtcaggaggaggcgagtgataaggatcccaggactgcgttttgccttccttccccacccccactcccaacggctcctttctcttctcttagcagcacccagcttgcccacccatgctcaagatgggcgggatgccagcctgttacataaatgtgccaaaagcctggccatgcctggaaaatggaccaatccgcccgccaagaggttgggtctcgttccctagagagaaggaagtttcctctccttgaagtgagagctagaatcgcactttctgtcaagctgagagaaagactcttttccagaggctaaaaggacaagaaaatctgatttgcttgcttctaactttgcgttttaaagggggaaggaggaaaggaaagagggggagggtggttctgcttagccccacccctccggctaccccaggtccagccgtccattccggtggaggcagaggcagtcctggggctctgggkctcgggctttgtcaccgggacccgcaggagccagaaccactcggcgccgcctggtgcatgggaggggagccgggccaggagtaagtaactcatacgggcgccggggacccgggtcgggctgggggcttccaactcagagggagtgtgatttgcctgatcctcttcggcgttgtcctgctctgccgcatccagccctgtaccgccatcccamttcccgccgttcccatctgtgttccgggtgggatcggtctggaggcggccgaggacttcccaggcaggagctcggggcggaggccgggtccgcggcagaccagggcagcgaggcgctggccggcagggggcgctgcggtgccagcctgaggctgggctgctccgcgaggatacagcggcccctgccctgtcctgysctgccctgycctgtcctgtcctgycctgccctgycctgtcctgycctgccctgccctgccctgtgtcctcagacaatatgttagccgtgcactttgacaagccgggaggaccggaaaacctctacgtgaaggaggtggccaagccgagcccgggggagggtgaagtcctcctgaaggtggcggccagcgccctgaaccgggcggacttaatgcaggtacccagggctcagccgcgccggggcgggcgggactccagagcctccctctcaacagcactcagtggacattgaccagacgtgaaggcgtgcaccgctccacacccagcaggcagctgcgctggggcttcccagacctaaacccagggcgccctctttgttcatgcaaaacaagggggagtacttgtaaagcagaatccaccccgagctaatccatagccactcaggcctccagatgagggcggaactaacattgttgtggggtgtgggcacacttactccccaggctaccctgttcgccatcttaattctacagataaggaaactgaagttcagtgaggttaagcagtacgcccaaggccgtgacactagcaatcagaagagctgggattcaagctgaggtctttgtggctccaaagacctcttaactctttccactctgagagtcccggagctgacagcgggcagtactcttaagaattttcttctgtctgatgctgatttactgacctgggccagctgcattggttggggtcattcagaaatgtgcatcagaatcccccggggcacaaaagaaacgtgatgggggcccaggcacgtgtactttgaaatactcctcaggtggttctgccacacactcctggttaagtccctctgctctacagcttctgaggactggggtgagtgagcacagagcctagcgcttgatgcatgggaaccatcgtcaaggttcctaatcccactactattatttcccgtctgggactcagtttctccatctgtaaagcaaggggttcagatgaggtaaatagctaaggactctaccagttataacatccactgatcatgtgacctccagtttatttgcataaaactaatggcctctcctttttcttctccttacttacaaaaacctgacttcattctgaaatttatttttgaaaaaaaaaagaggggatcttggaaggggggccaggggtagtgacatacagatttctgatcatgctcaccacttagtgcacttctttctctgcagagacaaggccagtatgacccacctccaggagccagcaacattttgggacttgaggcatctggacatgtggcagagctgggrcctggctgccagggacactggaagatcggggacacagccatggctctgctccccggtgggggccaggctcagtaygtcactgtccccgaagggctcctcatgcctatcccagagggattgaccctgacccaggctgcagccatcccagaggcctggctcaccgccttccagctgttacatcttgtgggtgaggaggcctccatgctcactccacacaatgtggctcaacaccttcataaatcagccaacttgaatcccagcaatcccccagggcactcccaggccttcctgtatcacctgtattgtcaggtcctcaaaccatgttagaagggtttaatgttgaggctgagaatcatggttagcagatagagggtctggataacactagataggaggcctatgtacatgttaacaccggacgcccagcagmagtcccagcttcttagaatcatactgagcttctctctggggtcccagtgcaacagaagggaccaattgactcatttattcctcctcaatcccacagaggccagtcaagaactcacataagggaatctaagaagacttggtccttgcctttagacagtgcagtgtaactgagaaggcaacatatgcataagatcagatgaccatagagtttagaaggatagccctgtctatgatagaagctggagatgagtaaagatggtgtggacaagggtagtcagaaggctttttggaaggctttgaagggtgggtagacttgtgaaggacataaggcatgccaaggtggcctaagaaagagtatcagccaggcaaggtggctcacacctataatcgtagcactttggaagacagatcacgagcccaggagttcaagatcagcctgggcaacatggcgaaaccctgtttctacaaaaaatacaaaaattaaccaggcatgatggtgcatgcctgttgtctcagttactcaggaggctgagttgggaggatcacctgagcccaggaaggtcaaggctgcagtgagccatgatcatgccactgcactccagcctgggcagtagagtgagactctgtctcaaagaaaaagaaagagtaggctgggcgtggtggctcacgcctgtaatcccagcactttgggcggctgaggtgggtggatcatgaggtcaggagatcgagaccatcctggctaacacggtgaaacttcatctctactaaaaatacaaaaaattagctgggcgtggtggtgggcacctgtagtcccagctactcaggaagctgaggcaagagaatggcatgaacgcagggggggtggggcagagcttgcagtgagccaagattgcgccactgcactccagcctgggtgacagagtgagactccgtctcaaaaaaaaaaaaaaaacagtatcaaggtgagaccagccactgcactcagtagtgaaggatgactattgtgatttgtgaaaaatgaggctggagccagatcatggtgtccttgaatatcaagctgtctggactcaatgcaaaagccaatggagaagcactttacattttgaggaggaagtaacataatgcaagtgccatcttaggaagaggagcctggtggctgtgtgttgcctggatcaggaagaccagctggaggccagtttcagactctagaaggactggctttcggtggtgaccatgggaatggtagttgttcttacttattcaggtgtaggtcagagatgtgcattttggtgttataggtaaaatagagattatggatgtggctgcttatagccctgtttcaaaaggctgttttccactttagccagaggcaataagacagaaaaggtcgtcaatatgctctttttctttctccaaagaacaagatggtttgtatttgagtcacagcgtcccacccccaccagcccacccccaccccaccaaataaaaaaggaaaagcaaaagattgatttggcatttggtgcaacggccaggtgatcttgatagaatatgcctgtgtggggaatgtgtagcagttgcaaagtaaagagaaccctgtactttctgtcacaggaaatgttcaggctggagactatgtgctaatccatgcaggactgagtggtgtgggcacagctgctatccaactcacccggatggctggagctattcctctggtcacagctggctcccagaagaagcttcaaatggcagaaaagcttggagcagctgctggattcaattacaaaaaagaggatttctctgaagcaacgctgaaattcaccaaaggtaaacaactgcttctacagttcagcaggaatttaagagatgattaaataaaagccccaccagtctcaaagttgccagtgctgtgtatcagtcttacctctgctaagtgcacaacagctgccctggccaaattctagtactatggtatttgaccactggagacaggcagtcatatttaaatctaagatggtttccatgtgcattcttgcaagagataagattcatccacactttagaccatgcagacttggtctggaattatccagcaccttttcttcccaaccagccattccacacttagttaacaggaggcttggaggcagagaccagtttggagccagccatggtagggttgggtggtagcaccctaaatgagtaagtagatgtgcacacctctgtattccaaagccagacgtgtctatttttggctcatccctttccgtttctctttcttttttttttttgagatggagtctcactctgtcactgaggatggcgtgcagtggcttgatctcrgctcgctgcaacctccgcctcccaggttcaagtgattctccagccttagcctcctgagtagctgagatcacaggcgcaccaccacgcccagctaatttttgtatttttagtagagacgggctttcactatgttggccaggctggtctcgaactcctgacctcaggtgatccacctgcctcagcctcccaaagtactgggattacaggcatgagccaccatgcctggcctccattttttatgtgagtagaaaaggagagatgaaaccaaagctagaaagcctatgattccaataacctagtgcggacacttcctaacttctatgtgaacaactagcctaggttgggcctcctgtattctgttctcaatcgtgcctgggtgtcagtgggactgtacttattttggcatgacaggagacgctaggtcatggtgccccatttccctcttgctgtagctaggcctcataaatggtgaacttcatacatgctatcatagagttctgctatctaaactccatttacaacagttcttcaagcagtgtttctaattccaacctatagatttaccacttgcatctgtatttatatccataatccccaaatataccatggtatcttatttagcaccaagctgactagcatcacaaatctgtttcctatggaaggtgctggagttaatcttattctagactgcataggcggatcctactgggagaagaacgtcaactgcctggctcttgatggtcgatgggttctctatggtctgatgggaggaggtgacatcaatgggcccctgttttcaaagctactttttaagcgaggaagtctgatcaccagtttgctgaggtctagggacaataaggtgagtgatgaatgaaaagaaaacatgtgatttaacccagaaaagtgtggttcatttacattaccccragaaaggaagctctaccttagattacggaggttagtttctatgaagaaacctccccctctgaagataaagagggaacccgatttcagagaactgattcagattggttgatagaagcttcagtatcatgaaaagaagtgtagctgatacttcacaggttatctgaacattctaacagaatgaagaaagcactgactatattaggaagtatttcgagtagttccaagactttgttttcaaaggcagaattcatctcagtgtgctagaaagtctcttaggtgagtaaaaaaataagtaagccttggccttcaacagattataggttccatgccgggcacagtggcacttgcttgtagtcccagctacttggaaggctgaggcagaggattgcttgagtccaggagtttcaaggctgcagtgagctatgattgcacctgtgcatagccactgtaccccagcctgagcaacatagcaaaacctcatctcaaaaaaaaaaagattatatgctcctgaaatattccatctggcagtctagcaggtaccasctttgggaatgtttccaccatagggttttgcaccagctgagggacaggagagcttaagcatccttttttcactaagcctatatgagtcctatctgtggctgcctcctgggtaaagacactttatttaaaaacaattcttaggctgtcagtgacactaacattttactccaggcttcagtctttatctggtacagaacagaagttacacatttggaggtacaagggagccagagatcacctgtaacccccctttagctcctatgtggtctcttcagctggctctagaaaccaaattgataccagcagattgacaggagaaaagcatgtactttttttttttttttttttttttatggagacagggtcttactctgtcacccaggctggagtgcaatggcacaatcagcctcctgggtagctaagactgaaggcataccaccatgcctggcttgtattttttatagagacaggttttcaccatgttgcccaggctgatctcaaactcccaggctcaagtgattcggccaaagtaagatgcttttgtaatttttagacaragaacaataaatttgagaagaaataagacaaaatctggctagggatagtaaatttctagggaagtcactaggagatatatgggggtggggkgtgtaaaactagtggaagataagggttacttccttaagtgtatttattcagttccattgcagccccgtttccagtctctggtgataagggctttttgccctagtatggggagggtacccctcycagaggaatctttatgacttgctacatgcaagaagagacaggtcagctagccttttctgaaactacaatttctccaatgctttcacctcaaaattaacaatatacctatcggacatattctgagatggcacatgactccttcaagggtatttcacacacatgctaggaagtgaggggttaagtgtccctgtstgctttttcagatacgtggcttcagagagagcaagaaggctgaggaggatgaggagggcagggtgaggctctctccccaggctgatgatctcctttcccttgtcttagtacaagcaaatgctggtgaatgctttcacggagcaaattctgcctcacttctccacggagggcccccarcgtctgctgccggttctggacagaatctacccagtgaccgaaatccaggaggcccataagtacatggaggccaacaagaacataggcaagatcgtcctggaactgccccagtgaaggaggatggggcaggacaggacgyggccaccccaggcctttccagagcaaacctggagaagattcacaatagacaggccaagaaacccggtgcttcctccagagccgtttaaagctgatatgaggaaataaagagtgaactggaagggtggcacgcggactggggccgccgcggcggggttgaggtgggagtccggacgggcgtcgcagcggggaytactgaggcccgatcagctgacgctcaacctgagggcccctccagggacggagattctgggtatagttacagcgtcagccgtgacacaagccgccagaaccccacatattccgccttgcgcacagctagaggcccaggcccaccacctccggcacctgcccgcgcgccccgcaaccagtgggcaccacagcaggccccagccctgcccgctactcacctgggccccaccccacctctcgccgccctcctcaggccccaccacctcccgctacacatctgagccccgccccacctccaccactttcctcagccccaaccacctcctgctacacttctgggccccgccgcacctccaccaccctcctcaggccccgatcccttccgctactcacctgggtcccgccccagctcagtcctcctcaggccccgccttcgcccgctactcacctgggccccaccccacctctcgccaccctcctcaggccccaccacctcccgctacacatctgggccccgccccaccgccaccaccctcctcaggccccgccccttccattactcacttgggtcccgccccagctcaccgccttgctcaggcccggctccctcccggatactcacttgggccccaccccagctctccgcaccctcctcaggccccgccccctcccgctactcacctgggtcccgccctacctgtcataaccctgctcaagccccgcctcctccgctccccagttactcacctgagacccgccccagctctccgccctcctcaggccccgccctctccacccgggttcctctgctcagggcctccccgaccggaacatctcgccttttggaggctacgccccgccctttacggtacagagcccggaagtgtcttggactctcgcctttccatcttccggcctcgagtctcgctcaggctcggttttaccccggagtctattcgaagggggctgctacgtcagcgcgtctcagcgtaagacggcgctattccgctgtaacagcttccggcgggtcctggatgttgatgtcctgcatctaacgcggtgtaacccccgaagccgagcgagctccggaggaatttcagtatctgctacggtaacttcatcagcccgccaagatggcgatgcaagcggccaagagggcgaacgtgagtatcgggtgttctgcggagggtgggagaacttcgggtttgactttcttagcggcgtggatcggagcattcttgctcctcctccgtccccagagcggagaactccagaattcctatcctgtcagcgaagacactatccggccccatcctcagagatatgctccttgagccacatttctgtccccaccccttttgagagttcctcagtctctaccctagtgtcagtgatagtgttacccctatagcctctttgcttgacccgcacctaaggacctggcgttaggattatctccttgacttaaagtcgatatctcagaagagtcctcaactaacttaatggttcaccaacaactaggacctgggattcccctcagatcatggtgcttttcggatccttcattaacacattaattaaaacaatattttttgagcacctactatgtattctgcttgccatgtgggacataattcatcaattatatttattgaatagctactatgtgccagacactagtcttacgtattgggaatacagcagtgaataaaacaagtccttctgcttacattctagtgtttgagagtacagtgttacggaaacttttaaaaaaaaaaaactcaaaaaagagattagtcaacagtaaaacgcttagaggtgtaagatgaagttaggccgagtgaggtggctcatgcctgtaatccccgcacttttggaggctgaggtgggaggattgcttgagcccaggaattcaaggctgccttgagccatgattgtgccactgcgcagcacttcagcccaggagacagagcaagaccctgactcaaaaaaaaaaaaaaaaacagaaagaaagaaagaaagaaaagacaagcaattgaccattgtatatgtaaatggagacttttggtgaccttgatgataggaatcatttcagtggatgaaaacttgattgcagtggggtgaaaagatggtggaagttgagaaaatggaaacagcaaagacactctgtccatgagttctcatttaaataggaagtagggaaattggatgatagttgacttttttttttgagatggactctcactctgtcacccaggctggagtgcagtggcacagtcttggctcactgcaacctctgtctcctgagttcaagcaattctcctgcctcagcctcttgagtagctgggattacaggtgcccaccaccatgcccggctaatttttgtatttttagtagagacagggtttctccgtgttggccaggctggtctcaaactcctgacctcaagtgatccacctgccttggcctcccaaaacgctgggattacaggcatgagccaccgcacccggccagatagttgactttttaaaagatgtgtgatataggtgtatctttatgccaatgggagcaatccagcagagtgtgcgaaacatgatatggaagaaagataggttgagtttagaagtgaaggttttgagtagatgaaggttggcgtagtaatagagggaaagtagttggatatagatgaaaagtatttcaattggtcatgtctattttctccaagaaacaagaatcagggtcatctcctgggatgggcagggaagagggtacagcccaactcaggtgttagcaggagtgatggtggtaaggtttgcaaaggcctacacccaccaccatgcctggctaattttttaaaatttttgtagagatgggggtctcactatgttgtccaggctggtctcaaactcctgggctcaagtgatcctcccactttgcctcccaaagtgctgggattatagggaccagccactgcacccagcctctgttgctttttcaaagatctgcccattttcagaaacatcaaattatacctcttattcttggctttttattattacgtatcattaagaattttttaaaatgcccctaattataggggcatttaaattataattttttagaatgcccctaattataataacaatacgtatttctcattttagattcgacttccacctgaagtaaatcggatattgtatataagaaatttgccatacaaaatcacagctgaagaaatgtatgatatatttgggaaatatggacctattcgtcaaatcagagtgtgagtcttactgagtcatttaaagaaaatgatagcataatctgtaatttcagaattatagctgacgatgaggccaccctgtgctgtgtgcagtgcgacaacccttaccaagagccttgagactagcagattgagatcagagagatgagatctttttgaaggggggagaaaacctactgagaccctaatgatccagctcaatgagagccaagaagaggatttgagtttcctcaaagcattcattgaagtagtaatgaatgctttgaggaaactggttgagaagggaaagaactaacatttattgcatacctgttatttgtaaagctagcttgttacactgtgttttttgtatgcagcagctctataattttctcaacaatcatcactgtctctttaaataaccccagaatttctgaataaactaagtaaaagagtataaaagtaacagaaaaaaatgatattttcaactacagctctttcaattgaagatgtaaaagtatagaggaaaacatctaattacaagcattcacgttttaatttaatataaagattggggttcataccttcaagtgatatttactggacatctactgaataccattaaccataataagtgcttttatttggatcaacaaaactatagccctgagagtaaagtacctttctatcttacagtgcttagtggtaaaatcttctgactctaaattgaacctctacattacacagtaccatagcctctgacacccgaactcatatgaaagggctagtgacttaagagtccatctgaaaggatttctaaagtttttattttaaaaaaattattattttaccacagtaatgactacgtataaagtttttatttctagtcggaattccgtcttgtatgacttgagagctccttcctggctttaggactatgaggtcttgaggaccctccttttgaatgacactgtccctccagagagtaaaccaagagctggaaatacatgatcattggtactcagatggggatgaaagtgaaagtgttatagaccagctgtcctttttaggaggtctcagtcctttgagcatctgataaaagctttagactccttccacagaagaatacactcatgttgcatatatttcaggggatacatggactctaggttaagaaaccctgctctagatacagaatggtatacaaggccaggagttcaagacctgcctggccaacatggcgaatccctgccttggggatcaggagacaagattctacttcaggccttgttactagccatgtgtgtgactagttgcctagcttttttggttttctcttcatgtatgagataatctgggtggtggccttttagcttttaatgtggaaacagcatagattggttgtaaggcctgggttcaaatactggcttgcctactcttacgaaactggagaaaatatttaaccttatctgggtttcaattatctatgaaatacagtcttcctaacctactgtcttaaaagaattttaatttggatgaaattacacagtgtctgtgaaggtactttatcagttttccttcccagtgtacattagccactcttctgctcccatagcatttccatgtgtctctcctaggttaacacatggttttgctgttgtctctatattcatctgtcaccctgggcaggttgtgagttcctccagggctcgtaccatatattatttttgtttttgtgttgatagcacttgtgcgatacatggtaagcaccccatgtatactaaatgaataatatagaaaatagtagaataggccagatgtggtggctcacacctgtaatcccggcactttgggaggccgagacaggcagatcaccagaggttaggagttcgagaccaccctggccaaatggtgaaaccccctctctaaaaaaaaaatacaaaaattagctgggcatggtggcacgcgcctgtaatgcaattactcaggaggctcaagtgggagaatcgcttgaacctgggaggctgaggctgcagtgagtgagccgagatcatgccactgcactccagtctgggcgacagagtgagatcctgtttcaacaaaagaaaagaaaatagaagaataatataaaaagtggttgtgattggtttactagggcattataaaatttattgatagtactcaattaagggatgcttaaaatcagtgaagttagagaatgtttcagaaagccaaaatgaaaggacagggaataaagcaggggcatcttcagaagagtgcagagcagctcagaacctttgtgcttctattttccttgtatctggaatggttttcaccagctcatctcatgcctggctcctcctcattcttcaggtctcagcttcagtgtcaccttttcagaggggttttccctgaccaccctagctgaagtagctccctgtttccctatctgttacagctttctacttcttgtatgaaacatttctttttttaagatggagtttcgctcttgttgcccaggctggagtgcaatggcacgatctcggctcactgcaaactccgcctcccaggttcaagtggttctccagcctcagcctcctgagttgctgagattacaggcacccaccagcatgcctggctaatttttgtatttttagtagagatggggt

SEQ ID NO: 95052 - DNA, 41202 bp, Homo sapiens
cctgccatgcagatgtaaactaggggtggagcatactgaagagatataagcaagactctggcctactaggggtggagcacactgaagagatataagcaagactcatggataataaccaagatggagtcactctggccaatcccaggcatatacagatgcaacmctcctagtagggaattttaccctcccatttgagcaaagcccacggaagacttcccggcttctgccacataaaagacacagaacacagaactctacttctacaagaagtagaaggtagagccagcaagagatacaaacagaacatccaattctcgtggcaggaggatggtgagtttgcacagagaaggggcacaggatgatggcaggctgagctgtaaatatttttaggtatttggttcctattttgcttatacctaaattaatgatagaaaagaggatttccactagggttttgggctgattgcttttggatgtgggttactggtacccagtggggaagaggatagagacacaggaggagatgcctgttgggagacaaccctacccaacaggtgctgaattccaggaggatgtgtgaggctggagatactctctaagactggggaactcatcaccaggaggctagtgagagaaagcaagggcccccccgtggagttggacctgactgtagctggatattttgcgagtgggttagtttacacaatgacttgtcaatgctccatttatatggatatagctgaaagtcagaaaggaaatagaaatctgtgagtttagcatcaaaatgccgaaggcatttcagagtgtgtgtattttaggtagaggacagtctctgggctgttggcttagctctatccattcttcttggacatgtaattttaagaagtgtggtcatctggtttctgccaaacagatgaggaagccaggagatgagaacagacagacaaccctaagaggcaagagctggaagcccatgttagaaatgctaatagtgggccaggcgcggtggctcacacctgtaatctcagcactttgggaggccaaggcaggcggatcacctcaggtcaggaattcaagaccagcctgaccaacatggtgaaaccccgtctctactaaaaatacaaaaattagccaggcatggtggtgggcgcctgtaatcccagctacttgggaggctgaggccggagagtcacttgaacccgggtggtggaggttgcagtgagccgagatcacgccattgcactccagcctgggcaacaagagtgaagcttcatctcaaaaaaaaaaaaaaaaaaaagaaaagaaaaaaagaaagaaatgctaacaatgaaaaaacaatgaaaaacaaaatcaatacacacacaatggtacctccagctgctcctgccgctcagcccttcccaagaacttcccaatctccctacaatccaccaatccagggttaactcctggcagagcagggagctttcagactttcctccacaccaagtctggcttctgtcctgattggttatgtcccagccttatggatacccctgagcataaacgtgcattgctttagtaatcaattaagctagctaactttcctctctcagtatctggtaaaagaaatccaaaaactacagttaggggtcatttctttcctttctttcttttttttttttgagacgatggagtctccctcttgagcctcccgagtagctgggatcacaggcacatgccaccatgcctggctacttttgtattttcagaagagacggggtttcaccatgttggccaagctgggctcgaactcctgacctcaggtgatccatcccccttggcctcccaaagtgctgggattataggtgtgagccactgtgcctggccaggggtcgtttcttgcagggagaattatatatatatgttatatgttataggcccagcagacatcaatatattacaatgcaggagaataattgatgttcatattagtgggactcagtcattaagaaaagtttaataaaattcagctttatctatttaaaactgtaccgtacattttagaggttttaaacatcttggtgcttacataggattgagcctgtaaccatctagaacttacttgttcagagtgactcattcttcaggatgagctcacactcctgcatgaaacagaacaatagcctttctgtgttacttacacccaaataagcatattcttgtgtaggcagactctttcttttttgtttgttttttgtttgtttttgttgttgtttttgagacagagtctcgttctgttgcccaggctggagtgcagtggcgtgatctcagttcgctgcaacctctgcctcctgggttcaagtgattctcatggctcggcctcccaagtagctggaattacaggcacgcaccactatgcctggctaatttttgtatttttagtagagacggggtttcaccatgttgcccaggctggtcttgaactcctgacatcaggtgatccacccacctcggcctccccaagtgctgggattacaggtgtgagccaccgtgcctggcctgccagactcattcttttatgctggtcctgtgcagcctgggctaacggtgcctccctagtcatttggttcatgatctgtccctgctcacctgggctgatggtgccttcttgcccacctgggctggccatgcctccctgcctccttctttttccttgcctcagtgggccttgtcgggggggcagtggtagaagcaaggaagaacaaaggctcctttctccctttgacctgatgttgtaataatgataaacttgtcaactcatctccgacagccaatccaaccatagaccctagaaaaataggagtttagaattaaaaaaacaaccttgatcagccaaggatatggttggatgaaggcagaaggaagctcatagcatagagagacacactaaaaataaaagcaacaaaaacagagcacacatagggcacgcacctgttgtcccagctacttggaggggatgaggcggaagggggtgctgaggcgggaggatcacctgagcactgggaggctgcagtgagccatgattgcaccactgcactccagcctgggcaacagagtgagaccctgtctcaaaaaagaaaccaaaaaccaaaaacaacaacaacaaaaacccactgccaccaccaccaacaaaagcaaacccaaacaaacaatgtgcctcccaaatccaagaagaagactcatgttcaaaggtgacggaaaatttcaggtttgaagtagacaaggagtcagaaaataggcaacactactgaccacacctgattctgggtccagtatgtccttggcagtgtgctgtacagcggagggaggggaccctctctctagaaatatgccctcgttggcagatggccttgcttctccaagaggccatcatctgatctgacccccgtattgccttaattactcactttcacaccaattctcaacaccagccaggtcaacaggttgctggccagtccaggctcttgcctgagcgaaaggcaaaaccagggcaaagcttcagatgtgatgggtggatacgctgcacagcagttctgcagaggggctgctggcatcacagcttcacagacgcagtatgtgcactgtattttaaggagctgtgtgaggcaaggaacgccccagagctctcctgggaagccccaaatgctcaccgcagggcagtgagacccgtggggctgggagctgccaggagtggtgggccctctgcatttcactgtgctctcccgcaagcactcctctctctgactctccagggcccctctttgggcagtcttcccctcccccttggcccaggctttctctgagctccttcctgctccagttcccctcgcctgggctcatccagtcctcccaggcttccgtgacagcctgacattttagtctctgcctgcctgcagctccctgattctttctgggtctcccaattcagattcccaagaaaaaattcagatgactgagtttgtgttttcctgccagtttgatgtcaggggtcctgcctgggcttgtaaagggtcttggtctcctcagcagaggtggggccttgtgatttacaaggtggccctttccgcagggctgggagtcagcaggtgggcgtcactggtttagcaaggacagaagagtaggtttctcatttttgcaaagaaatggtccataagctggagattgaagcatttttcctccagttccctcactaaccagctgggtggcaatgataaatcacttccttttcctataaaatgaggggtctgaatagatgctaatgccatttgctacacaccaggcactgctccaactactgcaggcacatttattgccgaatccccacaaaggaggtgctatcactaactccttttaaagaaaggaggcggccaggtgcggcggctcacgcctgtaatcccagcactttgggagcacgaggcgggagaatcgcttgagtccaggagtttgaggccagcctaagcaacatggtgaaaacctgtatctacaaaaagtacaaaaattagcagggcgtagtggcatgcgactgtggtcccagctacttgggaagctgaggcaggaggattgcttgagtccaagagaagtgagctgaaatcgtatcattgcactccagcctggtgacagagagagaccctgtctcaaaaaagaaagaaagagagaaagagagaaagaaaagaaagagagaaaggaagaaagaaagagaaaaaagaaaaggaaggaaagctgaggcacagagcgctgagttgcccatggtcacacagttagcaggtggcacagatcctgtctagtttcagaatccttgtccttgaacatgctttgctctctctctgagattctttcagctcttgagctttagaaatggaagtttccagcaagttctttgcagcagctgatgttccctattaaatgacagtggggagtcttagaagtattcgggaggcctacgttcaccgctaacatccttgttgtgaaggcctgctgacgtttgccattccaggaccaagtggacaatgagttaagctaggccaggagggggttcagctccccataacaaggcaggggtggccctttgtgtccggcagcatggtagcccccccgcaggagctccggctaccctttgtgtttgaccttgtggaagggcatgggaaatgctggcctgtcagcaggcataaactcaaaagtttctccttcagctaatttcagggactgtctagccaagtgaatacacaggattaggtaatccatggatcctgcgagggcaattggctgattggcttaggtgtgcccaagagccctgcaggtgtcagaacaaatccatgtagaaatgcagacgcccacaccrgcttgaatggcataaaggcacacattggaatgtggctcatgagctgggacccaggatcaaccactggtttaaggagaggaccgtgaaatgtccaaacatggaggccaggccacctccctggatgcctggctgagggcagccacatgtctgcagcggtggcttgtgtccatgactgagatgggcagggtttgcaggcagtggtgatcccatcagcagtccccagatctctaatgtcaggagaaagagcatgggaagtccgacgtccaggaaagtctttcatcctgcttctccctgccttgggccttttcccatttccgcggtcacctgtccacaatggctgcactgtgtggctcttcaggtgttcctaagacactgaacaaccaaacccatggactgaccggatatgaaattgacgtgggaggagatcaggcaggtgctggggctgcctggcgcaatgcacggagccagaagtgctgttatggggagggtgttattgttttagtgggtgcagcaaagggtggtttagccagctgggcagatcaattgtaaattgttatttacagtttctgagcctttaaaagaagagcttcgccggaatcagtcttcattacagatgtgcagcaccatgagggccctggtgcttctgctgtccctrttcctgctgggtggccaggcccagcatgtgtctgactggacctactcaggtgagcccctagcttctgcatgctcccccagttaccctcacacccttacaacaggacaagtgcccttcttcttcttcttttttttttttttagacaaagtcttgctctgttgcccaggcttgagtacagtagtgtgatgttggytcactgcaacctccgcctcccgggttcaagtgattctgctgccttagcctcccgagtacctgggattacaggtgcctgccaccatgcctggctaatttttgtatttttagtagagacagggtttcaccatgttgtccaggctggtctcgaactcctgaccttaggtgatctgcccatctcccaaagtgctgggattacaggcatgagccattgcgcccggccaagagtcctcctttagggcatttcacaggatggccaggcagcccacttgccatatgttgggggtctgctcattgtggcttcagatgttaccttttcagtgtctcagaaggtatggagaataagctgaacttaaacttcaaataaggaaaagaaggaaatagctttccccttcacaaactcctgatttacttacaggctttttgctttaaatttttttccatccacagtgttggctggttcaaaagcacactcactgcttctatttgtaaaaccatttgctttgttggtccgtgtaagtggaaaacaaagttcttagaaaagactctcggtaacctcacggaaggtgctgtggggtttgcgagaccttctttcttggaaatttcatggtaggcagtttacccagaacatcttgacataaggacccagttccctttgatctgtgggctgccaaaatgagaggtgtttttttttttgtttttttttttttttgagacagagtcttgctctgttgcccaggctggagttcagtggtgccatctcggcttactgcaacctctgcctcctggtttcaagcgattctcatgtcttagcctcccaagtagctgggattacaggcactcatcaccatgcctggctaacttttgtatttttagtggagatggggttttaccacgttggccaggctgttctcaaacttctgacctcaagtgatccgcccaccttagcctcccaaagtgctgggattacaggcgtgagccaccgcgccaggccccaaaccagacttttaaaatgtgaaatgtaaaatcctggcattcaacatgggttctggtccacatgtgagccaaagctagaaggccgtgtctgtggactttgtggacactaaacagccctttccaggggcagtgaggagagcttcttcccgcatcccccttctttccatacgggaccatggattggggcccatgaggaggctggtggccgctggctgatgcaggaagtgagacaaacatctgcttcctgcagagtctgccccagttcagctgctccggaagcattccttcagggtgaacgggatgatctgttaagtcaagggcaacggaattagggacatcctgggaggttcagaaagtccagccagctctgaacaaccgctctgttcctgagsacagtgatcttacacatggcagtgcctcsgaagcctggggcattctgcttcacttggccaagcagtgcaggcaggtggttcagaggtgaaggaagagagaattcagacaatgaagtccttgtccttcccaggctctgcccagcctctgagacagtgggcttcctgggaaactactaggggctccaggagaacttgagagtagcttttgtaaatgccttccagggaaacctgagagatgttccagtattgacagtgccctgggccaaagcatcttgctctgagaaggcgttgtgctccaggccaattgccttgattacaaaccaaaaagcggtgagggccctagtacagacacctttttttttttttttgagagtttcactctcgttgcccaggctggagtgcagtggcgcgatctcggctcaccgcaacctctgcctcctgggttcaagtgattctcctgccttagcctctcaagtagctgggattaayggcatgtgccaccatgcccggctgattgttttttatttttagtagagatggagtttctccaggtttgtcagggtgggtctcgagctcccaaccttaggtgatccacccgcctcggcctcccaaagtgttgggattacaggcatgagccaccgtgcccagccacaaacacctgtcttaaaacaagctgtgtactcaccacacagctacccccgaacagggaacagaggtgggattctccatgtcacatggctgactccaagctccacagctgtatgggagccaagtcaccatgataatcactcacctatgttactctgtcccctaggattatcaaccctctctgaaaagataaactttctccttatgaattttaaaaaagtactcattctaggttgtcctggaacctgatgcttccttagtttccctgaatccataagtgtagacacctagatggtctttaccatacgggaatccataaaaggggctggagcaagaaaatagtggtggggggttcctgcagcatggggaggtgggggctgtgttcctgttgggggcatggaaggacaactgggcccttgggaggaaatgaggaagaggccccaggagcagcacaggaagagcaaagccaaggatccctccatgcattcaccagctggaaataagtcaaacgagagcaaaaatttacgtataaaacactctcaggccgggcacggtggctcacgcctgtaatcccagcactttgggaggccaaggtgggtggatcacctgaggtcaggagttagagatcagcctggccaacatggtgaaaccccgtctctactaaaaatacaaaaattagccaggcgtggtggtgcatgcctgtaatcccagctactcgggaggctgatgccggaaaatcacttgaatctgggaggcagaggttgcagtgagccaagattgcaccactgcactccaacctgggtgacacagcaagaccctgtctcaaaaaaaaaaaaagacttccattgatttcaaaacactgtcttgctcccagggccagcagttgccacaggaaagttagaggttagcaccaaagccccccaaacaccagagtccttggagttgacctcgttgtctttttggcctccttctgggggacctgcttctgctttctggaaggtgcctcygtgggtccccgcccagcaggccctggcctctggcctctggcctggtgaggttcctccagagtgggcgcrgccaggcagccccttgaactgtgtctttcctgtcttagaaggggcactggacgaagcgcactggccacwgcactaccccgcctgtgggggccagagacagtcgcctatcaacctacagaggaygaaggtgyggtacaacccctccttgaaggggctcaatmtgacagsytatgagacccaggcaggsgagttccccatggtcaacaatggccacacaggtaagaggaaggggtggtgaggggctccagtccatgggcagcctgmaggggaaggcaggttacacgtgtccctgccaggaatggcttgcacagagacacagagcacgrcctcagagctggaggcctcraacatgagggtcgaacatgagggctgactggccccgaaacctagtggctcttccagagagggcagcatccatctttygactcractccctgctggtcccttcctgcagcgttatcctcttacccgagctcacccaacccacccagcaggtgacaggcaggacaggccgtgctgctgaagccacccttcccacgggggctttctgtccatcaccttgggtcagcttttccacatttcctatattgagtctattcagctcaaagcacctgacaggtaggaccagggtttctcagagttttaagaagaaagctctggctttctgatccctacaagaaagaaggtgaaggtcagacagaaaaagcagggccgtggggatgccccacttcaggaatccgatatgagaaactgtaaattttgtttatttttttgagacagagtctcactctgttgcccaggctggagtgcagtggcaggatctcagctcactgcaacctccacctcctgggttcaagcgattctcctgcctcagcctcctgagtagctgggattacaggcatgcaccaccatgcccagctaattttttttgtatttttagtagagacgaggtttcaccatgttggccaggctggtctggaactcctgacctcaagttatctgcccaccttagcctccccaaagtgctgggattacaggcacgagccaccatgcccggcctggaaactgtgaaatctgtgctttacttgtgcagaatatcctcctgattttccaagttggctcgactcctctgagcctcatgaccaccccaggagggggcattttttaggcaggaagtctgaggcctcaggaggtcgagggactcacccaaggccacacactgtctaatggccaagatgggctcacacccccagttgtcaggtttcttggccacatcctccttaggywctgcactctctcactcctgcttgggttgagatacatccctgcctgccacacagcgataggacagtcactggacttggccaggcatggtggctcatgcctgtaaacccagtactttaggaggctgaggtgggaggatcacttgatgccagagtttgagaccaacctgggcaacttggtgagacttcatctctacaaaaaatcaaaacattagccaggagtggtggtgagtgcctgtaktcccagctactcgggaggctgaggtgggaggatcacttgagcctgggaggtcaaggttgtggtgagccgagattaccactgtactccaccctgggcaacagagcgagaccgtttctttaaaataaaaaaataaaagggtcacaggacttagtgttcttatcttgcacaatcaagaamataaaaccagcctggtgaggtggttcatgcctgtaatcccagcactttgggagcccgaggcaggcagatcacctgaggtcaggagttcgagactagcctggccaacatggtgaaaccttgtctctactaaaaacacaaaaattggttgggcgtggtggcgcatgcctgtaatcccagctactcgggaggctgaggcaggagaatcacttgaactcaggaggcagaggttgcagtgagccaagatcgtgccattgcaccccagcctgggcaacaagagcaaaactccatctcaaagaaaaaaaaaaaaagaaagaaagaaaaccaattgtcctttatagggttggtgaaagtagcaaattggagaatgaagctctgtctgtaaaaggactcaggtttatgtggccaggagccctgaaatacacaaagaatgaacaaaagcctcattttcatcataatgtcgagctcttgtttccaaagttactctctgatgcttccagattggcaggcggaactcttcctcccctccttgtcctctccttgtggagaaggggcraagcacaaaggccaaaggcagtggctttgttcaccctccctggacagckggtgggaagcaatcattgatggaggatctctatgggcaacrcttgctgagtgcgggcttcgtgctgagggcccagaagagggaaggcatatggaagagaagagcccagcttcccaaggggcttgcagcggctccckcctcccaatttccagaggaccctgtaccttcttcctttagggctctgctcaaatttctgtggtccggaagcctgttcctttggggttctcacctcacacgacagcatgtcggacattagagtggacccaaagttcacattaattatatatatattaaaaacaatttttttttttgagatggagtcttgctctgtcaccccggctggagtgcagtggtgcaatcttggctcactgaaacctccacttcccagattcaagcaattctcctgcctcagcttccctggtacctgggactacaggcatgtgccaccacgcccagctaatttttgtatttttagtagagatgcggttttgtcatactggccagtctggtctcgaactccttgcctcaagtgctctgcccaccttggcctcccaaagtgctaggattacaggcacgagccaccaaggctggccataattccatttttcgatgtaaagggtttttttctgagatggagtctcactctgtcacccaggctggaatgcagtggcatgatcttggctcactgcaacctctgcctcctagggtcaagcaattctcatgcctcagcctcctgagtagatgggactacaggcgcacaccaccacccccagctaatttttgtattttttgtagagatggggtttcagcatgttggcctggctggtctcgaactcctgacctcaagtgatccgcccaccttggyctcccaaagtgttgagattatatgcrtaagccaccgtgcccagcctgatataaagtattttgaaagatttttataatttagcttttgaagttatttggctattgccattggctacttttcagcaagctccaagcacattcaggaattctactgaagggggaaaaaaagctaatctacaaactttgaatctaatgagattttgatgaacactaagcttaacagtaaagttgacatgacgtattaaagatttgttaatttttggttttgcaaggttcttttatttgagacgaagtcgtgccctgtagcccaggctggagtgcggtggygcgatctcggctcactgcaacctccgcctcccgggttcaatcaattctcctgcctcagcctcctcagtagctgggattacaggcatgtgccaccacgcctggctaatttttgtatttctagtacagacagggtgtcaccatgttggccaggctggtctcaaactcctgacctcaagtcatccgcccacttcggcctcccaaagtgctgggattacaggcatgagccaccatgcccagtcaggttttgaaaggtttctaatcacatgtatcgagcaatcatttcagtgtcatgaaaatcctgtgttccacctgttcatctytcccttccttcctaaaccctggcaatcactgatctttttatttgacctatagtttttcctcttccaaaatgtcatatggttggaatcacacagcatgtagccttttcacattggcttctttcacttagcaatatgcatttaagtttcctccatgtcttttcatggcttgatagctcatttcttttcagtgctgaatattctattgcctggatgaaccagtttatccattcacctatccaaagacatccgggctgcttctcagttttggcagttatgaataaagctgttataaaacccatatgcaggccaggcatggtggctcatgcctgtaaccccagcactttgggaggccaaggtgggaggatcacttgaacccaggaatttgagaccagcctgggcaatgtagtgagacctacgaaagtaataaaaaaattagcctggcatggtggctcaaacatacagtcctggctacataggaggttgaggtgcgaggctcacttgagcagcttgggaggtcaaggctgcagtgagctatgattgcaccactgcactccagcctgggtgacagagcaagaccttctctcaatcaatcaatcartcagtcaatcaatcaatcaatcaattccatgtgtaggtttgtgtgttttcagtccatgtgggtaattaccaagagcttgcttgatcgtatagtaatgtcagaggcgtttgaaccagagtgaccccatcttgaatagggggtgggtaagataaggttgagacctactggactgcactcccaggaggttaaggcattctcagtcacaggatgagataggaggttggcacaagatacaggtcataaagcttgctgataaaacaggttgcagtaaagaagcctgacaaatcctaccaaaatsaagatggccacgagagtgacctccagttgtcctcactgctacagtcccactagtgctatgacagtttacatatgacatggcaacgtcaggaagttaccctatgtggtctaaaaaggggaggcatgaataatacaccccttgtttagcatataattaagacataaccataaaaacgggcaaccagctgcccttggggctgctctgcctgtggagcagccattctttattccactacttccgtttttttttttttttggagacagaatcttgctctgaggctggagtgcagtggtgctaccttggctccctgcaacctctgcctcctggttcaagtgattctcgtgcctcagcctcccaagtagctgggtttacaggcatgcaccaccatgctccattaagttttrtaattttagtaaagacggggtttcgccatgtcggccaggctggtcttgaactcctgacctcaagtgatctgcctgcttcggcctcccaaagtgctgggattacaggtgtgaggcactgcgcctggcctattcctttaytttcttaataaacttgctttcactttattctgtggactcaccccaaattctttcttgtgtgagatccaagaaccctctcttggggtctggattgggaccggtttttggtaacatatagaccaagttggaaataattgacattgagatagtattaagtcttcctatctgtgaacatggaatatttctccacttatttagttcttcctgatttatttcattagttttgtgattttccttatatagattttgtccatatttttgggttatttttgtatttttagtagagacgaggtttcgccatgttggctaggttggtcttgaacccctgacctcaggtgatctgcctgccttggcctcctaaattgctaggattacaggtgtgagctgcygggcctggcctcctcattttaaaattaaatttaaattagattcaacatttcaataaagagaaattcaaattgaaacacaggctgttgaaacaaagacaagttgctacaaaatttctaaaatgaactcccaatttctctgttttggtgcagactagtaacagttggtgggccggcactgatccattaatatatattgcccaggtgccggcactgatccattaatatatattgcccaggtgccgtggctcacctataatcccagcactttgagaggccaaggcaggtggattgcttgagcccaggagtttcagaccagcctgggcaacatggtgaaattctgtctctacaaataaacttaaaaattagctggacatggtggtgtgtgcctgtagtccctgctacttgaggggctgaggcaggaggattgtttgagcctgggaggtcgaggctgcagtgagctgaggtcatgccactgcactccaggctgggtgacagagtaagaccctgcctcarttaaaatcttttttaaaaagcacagtaacaggctcagggttgtggctcttttccaattgggcctgtgtgggcctgtcagtgtaaccagaagtaacacattccgtctcccgggagctgtgttttggggaaattgtgaggacctctctcatttctcctgtggtgcttactgtccatttagggagctctgctcgggtcctcagctcctcggctcccgtctgctttcagcatcactgaccttgcacgcctccttttaaggcccttccacgcctccttttaaggcccttccgtccttttcttgcaagcattgatttttgaggccagctacatctcaagctctaaatacagagcatttgttctgccaaacagccggtgaaaacctttcaggccggattactgcattatagcacattacgttatgaatttaatcatagctccccgctcctttagacaatttggaaagaaagagggggcacgtgacaggttttaaatacctcatatttgctatcttttaagaaaatgttcttgtttacagccaccattgatgactttaaataggaagatcttgccaggcgcagtggctcgcgcctataatcccagcactctgggaggctgaggaggttggatcacttgaggtcaggagttcgagaccagcctggccaatatggtgaaaccctgtctctactaaaaatacaaaaattagccgggcatggtggcatatgcctgtaatcccagctactggggaggctgaggcaggagaattgcttgaacccaggaggcggaggttgcagtgagcctagatcatgccactgcactccagcctgggtgacagagtaagactctgtctcaaaataaataaataggaagatcttgctcatgagacacatgctgcctttccaacgccgaaattatatcctcatagatatttttcttagtcacttttcttagtaactgagcccgtttttttctttttgtgtagttcattccaaaaggcagagatttcagctgggcgtggtggctcatgcctgtaatcccaacactttgggaggctgaggcaggtggatcacttgaggtcaggagttcgagaccagcgtaaccaatatggtgaaacactgtctctactaaaaacacaaaaattagccaggcatggtggcgggcacctgtagttccagctactcgggaggctgaggtgataggatcccttgaagccaggagttggaggctgcagtgagttgctgcagcaagtcatcgtggtgccactgcactccagcctgagcaacagagtgagcatgaaaaaaaacaaagaaaagaaaacagttctaagaggccccacttcctattcttataccttcggcaaattccaaacttggccagagatagagagtagaattctagtttccaagcccattggccataatttttcaggaccttccctttccctggggccagcaagctggacctgccactgtgtggtcctgcctctggcctgttggttctgggcgggaaggagcgtgctggggagaggcacttgcccagcctggtttacttagtgcctggcctccatcctgacctcaccctgtgccctgtgcgcaaacgcctcttctcctttggtgaccctgcccatggcattctaagccagtctatggtattggcttgcyctgggctcagacaggtgggaggtgagcagagaagctacccagcctgtaggcctgacccctctgtgttcacctactctgctctcagccccaccttgtctctccagtgcagatcrgcctgccctccaccatgcgcatgacagtggctgacggcactgtatacatagcccagcagatgcactttcactggggaggtgcgtcctcggagatcagcggctctgagcacaccgtggacgggatcagacatgtgatcgaggtacctgaggacccccactgtgtcctctttcctttgaaccccatagtcacttttctttttatttatttattttgagacagagtctcgctctgttgccccggctggagtgcagtggcacaatctcagctcactgcaacctccgccttctgggttcaagcaattctcctgccttagtctcccgagtaaatgggattacaggcacccgccaccatgccctactaagttttgtatttttagtagagacgggatttcaccattttggccaggctggtctcgaactcttgacttcaggtgatccacccgccttggcctcccaaagtgctgggattataggcgtgagccacagtgcccagccgtcacttttcttattaaaatagccaaggccaggtgcactggctcacgcctgtaattccatcactttgggaggccaaggcaggggaattgcttgagcccaggagttgtagatcagcctgggcaatgtagcgagatcttgtgtctacaaaaaaaaaaaaaaaaaaaaaaattagccaggagtggtggtacacgcctatagttccagcttctgaggaggctgaggtgggaggatcgcttgaggccagcaggctgaggctgcagtaagtcctgatcatgccgctgcactccagtctgagcaacaaaacaaacaaacaaaaacagccaaaagactgtgcratggtagcagttaagtcatgctgaagttgagtttattttttattcactcagcaactattgacagatcaccactttgtgacaggggttcaggcaaggtcctgccctcacaggactcaggttggcaggacttcacagcccacagggtgtggcaagccctcctttgtttcagctggatttctatgtgttagattttctttttttttgtttcttgagacagagttttgctcttttgcccaggctggagtgaagtggcatgatcttggctcactgcaacctccgttccctgggttcaaatgattctcctgcctcacccacccgagaagctgggattacaggcacctgccaccatggccggctaatttttgtacttttagtagagacggggtttcgccatgttggtcaggctggtctcaaactcctgacctcaagtgatccacccgcctcggcctcccaaagtgctgggattacaggcatgagccactgtgcctggactgtgttagattttctgagttacctcttttgccagaatccatccataggatgactacatgttaacaatggttgcctgggacaaggggcgcaagctcactctccctgcaaagcccccagacactccaggagaacccactgtcctcatgtgatcccttcagactctgccagcttgtctgcctggagggaggtgtggtcgggaaatggcctcgaactgccatcttccagaatcccactcttgctctttccattcttggggaagtttctgctcttgatagataggaattgcagcccagatggagagagatggaggtccaagttgcttgtgtggaacagtctgaggcctcagacggagcamctttctttctcttcctccttccctggaaatcttaagcatttgaatttctrtgaactgcccttgacccactctaccttgctcttacagattcacattgttcactacaattctaaatacaagagctatgatatagcccaagatgcgccggatggtttggctgtactggcagccttcgttgaggtaagcagaaactacccatgtgtgtctgtatttgaagttataggttgatgtccaaacaaggtgtgaagtctagttgaacagtcttctttattatcactcttcatcttttcctgagctcacagttcttggaaacattgactcgatggaagatcactgtgcyccttccgtgctgtcaatctccggaccttggttaacgtggacaagctgacttaaaagagctggaatcccagaggggttgcgtagacacaaattgttcgaagggcaaggggaaacctgyaactcagtcagacaaaggcaacacctctgcatttccttttttttttttttttgagacgaagtttcactcttgtcacccaggttggagtgcagtggcacaatctcggctcactgcaatctccacctcccaggttcaaatgattctcctgcctcagcctcccaagtagctgggattacaggcacctgccaccacgtctggctaatttttgtatttttagtagagacgggtttcactatgttgaccaggctggttgtgaactcctgacctcaggtgatccccctacctcagcctcccaaagtgctgggattacaggcatgagccaccaggcccagtcaacacctctgcatttctaagaaagtctagatggtggggccgggcgtggtggctcacatctgtaatcctagcactttgggaggccaaggtggatggatcacttggggtcaggagttcaagaccaggctgaccaacatggcaagaccccatctctactacaaatacaaaaattagctgggcatggtggcaggcgcctgtaattccagctacttgggaggctgaggcaggagaatcacttgaacccgggaggtggaggttgcagtgagccgagatcgtgctactgcactccagcgtgggcaataaagctagattctatctcaaaaaaaaaaaaaaaaaaagctgggcgcgatggctcatgcctgtaatcccagcactttgggaggctgaggcagatggatcacctgaggtcaggaattcaagaccagcctgaccaacatggggaaaccccatctctactaaaaatacaaaagtagccaggcgtggtgacgcacgcctgtaatcccagctacttaggaggctgaggcaggagaactactcgaacccaagaggcagaggctgcagtgagccaagataatgccactacactccagcctggatgacagagcgagactccgtctcaaaaaaaaaaaaaaagtcgggcatgcaaagaaataggaaaatgtaatccatatttaggaggaaaaaataactcaaaacaatctatagaaactgacctgagtggacccagagtgattaagcagacaggactttaaaacaactatcaatgctgtggctgggagaaaaattaaaaaaaaaaaacaactatcataaatgtttgaagaatgaaaggaaactatgttcaaagaattgaaggaaaatatgatgacaatgactcaaaaaaggaatctcaatggagaaatagaaactttaaagatgcaccaaatggaaagtctagagttgaaaagtacaataaacaaaatggaaaaagaatcactagatgggcccaaagcagatctgaggcagcagaagaaaaaaagaatcagtgcatttgaagatagagcaatgaaattatccaatctgaaaaacagagaaaaaagacagaagaaaaatgaacagccttgcagactcatggggacaaaatcaagtatagcaacacacacacacacacacacacacacacacacacacacacacayatatatataatgggagtcccagaaggaaaggagagagagaaagtggaagaaaaacaygaaacaaaacaaaacaatggcccaaaagcctcaaatctgaggaaaaacataaatttatcaatccaagaaactaaaaataccccaagtctgataaataaaccccaagtctagatacatcaaaaatcaaactgttgaaagcagcaagagaaaagggatttattatatgtaggggaatgacagtacaattaatggctgacttttcaagtcatcagaacacagtggaatgactgtcaatcaagaattctatatccaataaaccacccttcaaaaatgaaggtgaaacaacacattcccagatatacgaaaaccagtataattgctagccggtctatcttacaagtcatatataaggatgcttttctggctgaaagaaaataataccagacggttaactctgatccacagaaagaagtgaagagtactggaaatggagaatagaaaagactacatacatatattttttgtgttttcttcttttaatttctttttaaaaaccatcaagattatttaaagcaatgactataccactgacttataatatatgtagatataatgcatatgacaaaaatagaaggatgaggatgaaatagagctcttttgaagcaaagttgctatattttactgaaattaagttaatattaacctgacatagattgtgattgagttgtatatggtaatcatttgagcaaccactaagaaaataactaaaaatgattaaatggtaaatgagaagtatttgcttaacacaaaagaaggcagtaaaggtggaccaatgcaacaaaaaaggcacgagacatctagaaaacaaatagcaaatgcagtcataaagccaagaaagccaaatttatgcacagtgaaagagatcaacaccacttgactgaaaagagccattgaaaatagacctttttcacccaaagcaacttttctgactgttaaagtcaatactcattcagaaagagtgacctggtgttgggggaattgtagtcgttctgccttggacatctggctctctgtcggaagtcctgaggatgaagaagggaacttgtgagatcaagccctcctcatcacaaagaatctgactgtggctgacacygcccaaaacaagtgcacagaccaggtgcggtggctcacgcctgtaatcccagcactttgggaggccgaggtgggccgatcacctgaggtcaggagttggagacccacctggccaacatggtgaaaccccatctctactaaaaatacaaaaaaattagccaggtgtggtggtgggcacctgtaatcccagctactcgggaggctgaggcaggagaattgcttgaaccctggaggcagaggttgcagtgagccgagattatgccactgcactccagcctggggaagagagcaagactcttaaaaaaaaaaaaaaactcacaaacaaacaaacaaaaacaagcgcacaggggacttttttagagtaagagttggccatttctgagggcatcaccaatgactgacaagcttctttccctggaagctgccaaaatacttcagataatgcctttctggaaggactcatgaacctgcgtggttggtagcaaagaacagccagactgtctctgccaaaacacaagacggcacaggctgcctctccttactctctaggctcggcccaatccgctagaaagctgagtggctggattagtagcratggtgctggggcctcttcttcacttacgctcagtgctctgtgtttctctgcaggtgaagaattaccctgaaaacacttattacagcaacttcatttctcatctggccaacatcaagtacccaggtaagggaagccaactgtggctgcaggagggaaggggaatgagtgtgagtgtgagtgtgaggtgggcccagggggcaggggattgatgctggtggggagggtggcccgtgggccctgccaagggagtccatccctccctgtgccaggttacttgttccagtgatttctgctgttggcttaggcagcaaacctctctgagaagcctgtgcataaattcgatgtgtcatttcccatgattggaacttctgactggagttgcactaagtaggcatatccttgcttcgatgactgtcacctcagctggcagtgacagtcctggcagctagagagatgtccacctggctccaagctgagatgaatgtcaagagggaagccctcgtcataccacttggacatccagacactcggggtgttcttccgtcccctctcctccagagggcggcgttcttgtaagagccatttcccacccagggtcaacccttgacttttgagctataaccacaatagctctgcatcctcgacttcacacgtcccattccggccacacctcccagcctcccagtcctctgacttcagcacccagcccctcctgcaattcacctgaccggagtcctccaaacctggggcttccacattcttgctcctagtgacgcctgtgtcctttcatctctctcccagcttagattccaccccgatactctcaagtctccctcaacactcccatgcaaacaccctctagccctcacccctccacccctccacaaactcacctggcaaatctccagaccaactctggagtttttttagttattttcttagtggttggctggcagccaaacagctgaatgcaactggacagaaatccatagacatctaactggtattattatcgttattatttttgagacatggtcttggtctgttgcataggctggggtgcaatggcgcgatcatggctcagtgcagcctcgacctctgggactcagttgatcctcccacctcagcctcctgagtagctgggactacaggtgcaccaccatgcttggctggttttttgtattttcagtagagacagggtctcaccatgttctcaggctggtcttgaactcctgggctcaagtgatctgcctgcctcaacttcccaaaattttgggattataggcatgagccaccacacctggccaactggtattattttttattcatagctacaaatatgaacagtgcccagaaatcctaaagtatcacgctgggcattttctttctgacctcccaaattcctgtcacatgctttctcctctctcctgaagcccctgtgcctgggctccagcaattcccctggagctgacgctcccactcccactccattgagaagacagaagccacaggccagaaacactccgctccttaacccacgtgcatctggaccaaattccacatcccctcttcagctgcaacggatgacaaatccctgctcttgtcaacaccacccctcccacgtggggcccaaccccactcctctcccatgctcagggcctcctttcctgctattctctccctggtcttctgcatcgttgatttctctctctctctctcttttttctytttggagatggagtcttgctctgtcaccaggctggagtgcagtggcatgatctcagctcactacaacctccgcctcccgggttgaagtgattcccctgcctcagccccctgagtagttggaattacaggcacacaccaccatgcctggccaattttttgtattttagtagagacagggtttcaccatgttggccaggatggtctcgatctcctgaccttgtgatctacccgcctcggcctcccaaagtgctgggattacacgcatgagccaccgtgcccggtctgcatcgttgatgtcttactctttattaaagcctcctgctcagcacacacatctgccctaattcctcccacctccaaacacaagcaaacaaacgttatctcctgaccttaccattccccagcttcccccagttctctggctccccttgaaaaggtcatagaatagtcctgttctccattctcacccaccccaccctgagctggccccaatgctccacggagccggagtgacggtcagatctatgggccactcttcttctcgtcttagtttaccttcaaagggtggtctggcgcgccccagctctgccctctcactctctttctggctcctgccctaaatgttgggtggagtcaggctctgtctcatctcagtgactccacgcagtcccacagcctgaattaaaacttaccacttaaggctgggtgcggtggctcacacctgtaatcccctcactttgggaggcggaggcgggctgatcacctgaggtcaggagtttgagaccagtgtggccaacatggttgaaccccgtctctactaaaaatacaaaaattagccaggcatggtggtgcacgcctgtaatcccagttactcggaaggctgaggcaggagaatcgcttaaacccgggaggtggaggttgtagtgagctgagattgtgtcgctgcactccagcctggacgacagagcgcracaacatctcaaacaacgacaacaacaacaaacttaccccttaaaccattttaaatgtacagttcagtagcattaagaacattcacagtatgatgcaaccatcaccccgctccattgccggaactttttttcgtcttcctaaactgaaactctgtacccattcaacagttactccccatctccccttccagcttctggtaaccacagtttctgtctctaagaatttgactattctaggtacctcatataagtagaatcaaacagtatttgtctttttttttggtctggattatttcacttagcataatgtcttttaggtttgcccacattgtagcatgttatcagaatttcattccttttaaaggctgaagtggctgggcgaggtgactcacgcctgtaattccagtactttgggaggccaaggctggcagagcacttgaggtcaggagtttgagatcagcctggccaacatggtgaaaccccgtccctactaaaaatacaaaattagccaggtgttatggagggtgcctgtattcccagctactcaggaggctgaggcgggagaatcgcttgaacccgggaggcagaggttgcagtgagctgagattgtgccactgcactccagtctgggtgacagagtgagactctgcttcaaaaaaaaaaaaaggctgaagtatattccattgtgtggatatatgatattttgtgtatccatttatctactggtgaacattttggtggcttctaccttttggctattgtgaggtaacgctgctatgaatataggtgtacaagtatctctttgagtccctgctttcatttcttttgggtagataggagtagaattgctgggtcacatagtaatctatgtttttttaattttaatttttttttgttttttgagacagagtctcgctggggcgggagtgcagtgccttgatctcggctcactgcaacctccgcctcccaagttcaagcgcttctcctgcctcagcctcccgagtagctgggattacaggcacgtgccaccatgcccagctaatttttgtatttttagtagagacggggtttcatcatgttggccaggctggtctcaaactcctgacctcaggtgatccacccgcctcggcctcccaaagtgctgggattacaggtgtgagccaccatacctggccgtatgtttattttttgaggaactattataccattttccgtggtggctgcatcatgattctggaattcttgactttcacttaaatatattagagttacaaaaataaatctctaccacagagcccttttggaggttatatcttgaaatcttccaataataatcaaacttagaactcttttgcctactcatgggcttatgcactctgagacattgtggccttggttgaacaggcctatctacgtatgtatcaaaactatgttctctgcctttaagaagcgcagaagtgctcagggaaagtgaagcaaaatccaactcaatcctgtgttgccttgagagtcttgtgctgagctcaggggctcagtgttgttgacatgaatgaaacaaggacctctctagagcaggagcaggtgtggctgctgcaggagttttgcaggcctggtggaagtggccccaccctacgccccacctgtggctgggcttggtttccagcggttgtggcaggaagagctcaggaccaaatgcctgtacctggaccctggcttggttctgattctgcatttattatttaaaaaaataataaaaaaaacaacttattgtagagacggggcctccctgtgttgcccaggctggtcttgaactcttggccccaagcaatcctcccgccttggcctcccagagtgttgagattacaagcgtgagccactgcgcctggcctgattctgcatttacaactgttgtctacccacttctcaatgagcccaaaccaaggcattttggtctttcttcaagggcacttacccagaagtctccaggggccatatttatttctttcattgatcataaaatgtgtcctctgcctagccatgataatggtgaccgcagcagttacacttaggagtacttccctatgtagtggttcaatgycagctgctttccagacgttattccttcttaccctcacaacaatcctgctgattattccctttctacagatgagaaaatggccgcagggtgagcacccggccaagagcactcagccaggagcaggtgtctgagtgcgtctatccccaaagtctctcctctcaatcccttccaggaagaagtaaactgggaaattgtttcttaatcatcagcttctatgttctgctgaactcaagagattggaacctggcgaggcctgggcctgagctgtcctcccgaggggcagcgctggtccctgacattctgttaccttctgtcttcttggtcaggacaaagaacaaccctgactggccttgacgttcaggacatgctgcccaggaacctccagcactactacacctaccatggctcactcaccacgcctccctgcactgagaaygtccactggtttgtgctggcagattttgtcaagctctccaggacacaggtaatgtatggtatcactttgcckaagtcttcccattcgattgcctggttaacaagggttctccccagcatctcaacgaacgtcaacaactaaggggtcctacagtattttctgtgtgcagggctactgtgcctcgtctagccaaccttttttttttttttttttttgtgagacagagtctcgctctgtcacctgggctggagtgcagtggcacgatctcagctcactgcaacctccgcctcccaggttcaagcaattctcctgcctcagcctcccgagtagctgggactccaggastgtgccaccacgcccggctagtttttatttttagtagggacagggttttattatgttgcccaggcaggtctcaaactcccaggttcaagcagtctgcctgtctcagcctcccaaagtgctgggattacaggtgtgagccactgcacccggccatctccttttcttaaacttttcatttccttagaaaaaggtggaaaagacccctgctcaaggacactcacactccaaaatgttgccagtcaggctagaagtgcccccagacacctgacaaaagcaaatggtaaattatctctgggaaaatgaccttaaatccagacctagaagaattttcacaaataaagttacttgaaattagctcaattaagaaaaaaaaatacaaaacatatgagaaaaaaagacattatagatgagaaccagcagaatcagacctacaaagacttcagttagtggaattatcagacaattaatatgacataagaatgtttaacatgtataaagaaataaaaggtttaaatatgagaaaagagcaaaaaagtataaaaatggacatccagacttgggacaaaaactcaaatagaatttctagaaatggaaaaatagtatcaaaaattaataatccaggccagttgtggtgtctcatgcctgtaatcccagcactttgggaggccaaagtgggtggatcacctgaggtcaggagtttgagatcagcctggccaacatggtggaaccccgtctctactaaaagtacaaaaaattagccagtcgtggtggtggggcgcttgtaatcccagctaccccagargctgaggtggaagaatcacttgaacctgggacgtggaggttgcagtgagccaagattgcactactgcactccagcctgggcaacagagcaaaaccctgtctcaaaaaaaaaaaaagtttgctgggcacggtggctcaagcctgtaatcccagcactttgggacgccaaagcgggtggatcacgaggtcaggggttcgagaccagcctggccaacatggtgaaaccctgtctctactaaagatacaaaaaattagccgggcatagtggtgtgaacctataatcccagccactcaggaggctgaggcaggagaatcgcttgaacccaggaggcggatgttgcagtgagctgagatcatgccattgcactccagcctgggcaacagggcaagactccatctcaaaaaaacaaaaacaaaaacccaatgaatgggtttaacgcatgttagatacagtttgagagagaattagtaaattggagacagccaataacattatctagaatgcagcacagagaaaaggagatggaactatgaaaagaagtgaagagacattgtgtactggaaaggtctagtaaatgtctaatcaaaatcctagaaggagaagagaggcagagtagggaagaggcatgatttgacaaaatattggctgacaattttcaggaagagataccaagtcatatattcaagaatgccaattagtttctctctctgtctctctctctctctgggtgtgtagatatatgtgtgtgtgtatacacaacatcctgcagtaaacgcatcacattgaaatcatcaaagacaaagaaactatttaaaaattagccagaaagaaaagacagattatcatgaaaagagtattattagacagagagttgatttaacagccacagtgaaagtcagaagggagtggaaacataatttcaaagtgccgagggaaaaaaaatagccaatatagaattgtatgtgcagcaaagatgcctttcaaggatatagacaaaatacagacattttcaggtcaggtgaggtggttcatacctgtaattccagcactatgggaggctgagtgggcgaatggcctgaggagtttgagaccagcctggcccacatggtgaaaccccatctctactaaaaatataaaaattatctgggtgtgtgggtgggtgcctgtagtcccagctagtcaggaggctgaggcaggagagaataacttgaacccgggaggtggaggttgcagtgagccgcaatcgcgtcactgcactccagcctggcgacagagcgagactctggtctcaaaaaaaaaaaaaaaaaaaaaagagaaaaacctgacattttcagaaaaacaaaaattgagtttgccacttgatatatttctgcttcttctttctctcctttctactaytggacaaatactcatataaaaagctgaaaagagagcttgtgtgcagatacctgttggaagaatgcacggatagattagttctggaataatgcctgagacacagcacccagaacctcccctggacttgagatcttcttacagtcacttcatcagggttatataaatccaaactctagcccagttgttaattcttttttattttttattttttttgagacagagtttctctctgtctcccaggctggagtgcggttgcgtgatactggcttactgcagcctctgcctcccaggttcaagcgattctcctgcytcagcctcctgagtagctgggattacaggtgcacacaaccatgatcagctaatttttagtagagaagaggtttcaccatgttggccaggctggtctccaactcctgagctcaagtgatctgcccgcmccagcctcccaaaatgctgggattacaggcgtgagccactgcgccgggccaactgttatttcttttaaattacccagtgactcttcccctccataatgcactcacgttgcccccaggtttggaagctggagaattccttactggatcaccgcaayaagaccatccacaacgattaccgcaggacccagcccctgaaccacagagtggtggaatccaacttcccgaatcagggtgagtgagaccractcttgatcatgctctgcagtttaactcctgttttgctccttcctctaggtggacccatctcttctggtgatataagggaaggagagtcatttcagtagcaagaggctcaggtgggccaagctgcacagggcttgggcagagggtgatgactttttcccagtccaggcagggatgccagtgagtagaacacacgagacaatcagaagcgacagctacgtgatttattacctacctagtcttggctagagagagcaggagaagcaagaagaccacaacatccggaagctctcacaagagtgtaggttcaagttaaccttttttttttttttttttgagacagagtctcactctgtcacccaggctggagtgcagtggtgcaatctcgtctcactacaacctctgcttcccgggttcaagcaattctcctgcctcaacctccccagtagctgggactacaggcacctaccaccacgcccggctaattttttttttttaactgaaatggggctttgccatattggccaggctggtcccaaactcctgacctcaggtgatctgcccacctcggcctcccaaagtgctgggattacaggcgggagccaccgtgcctggccaagttaaccttattaaccccacccagattatttcctgcgcatcttgatcatagtctgtgttatgaacccacccccaacgcctcctatacattctctcaaagtggagttaactagaccacatattgttccctgcatctgcctggggcgcaggccccagaccccagcgtgctggaagcaggtgcgggcagrccagcctccgctgcatcctccagttccttggatcaggctccaacsgtgtccttggctcacctcgtttctgtgttggcaagagtgtaaatatttcacagcctcctcatctttattttgtctgctttctgtaaagttgtggtgaatccattgtctttacagcccattctgttaaccattcctgatacctttatattttccaatacagtagaatcagtatcctatcaatattgtgtactcaatattatcccactttttttttcttttttgagacaaggtctcagtctgttgcccaggctggagctcagtggcacaatcacggctcactgcagcctcaaacatccaggctcaagtgatcctcccacctcagcctccccagtagcggagactgcaggcacacaccaccacacccagctaattttttttgtagtttttgtagagatggactcttactatgttgctcagactggtctcaaactcctggccacaagcaatcctcccccctcagcctcccaaagtgctgggattataagcacgagccacctcgttcggccttatcccatctttatatgtaccttttaaaacttaaatttcctccgggtgtggcggctcacgcctgtaatcccagcactttgggaggctgaggcgggcagatcacratgtcaggagatcgagaccatcttggctaacatggtgaaaccccgcctctactaaatatacaaaaaattagccaggcgaggtggcgggcgcctgtagtcccagctactggggaggctgagactggggaggctgagtagctgggcatgaacccgggaggcggagcttgcagtgagccgagattgcgccactgcactccagcctgggcgacagagagagactctgtttcaaaaaaccaaaacaaacaaacaaacaaaaaaattaaatttccacctccccaacccgaataaggcctatttgtgattttctccccacctttccttcctggttcacttactgaattaacagaggatataggtgttttctatattgtttcctgaaatacaattcactcctccaatacaatactaacagaagaaaaaaactgacatcagttacagtaatcatttccccatattataccatatacaacattaacagcaagaatccctttgtccgaaagtgatgtcgtctttaacaggtccaattgcaagcaggctgaccaaagggagcttagactcatgggtctgtctcctaattcttttggagtctctcactctgtcgcccaggctggagtgcagtggtgcaatctcatgggctcactgcaacctccgcctcccagattcaagcaattctcctgcctcagcctcccaagtagctgggattacaggcacgcgcccccacgccaggctaatttttgtatttttagtagagatgggatttcaccatgttggttaggctggtcttgaactcctgacctcaggtgatccgcctgcccggcctcccaaattgctgggattacaggtgtgagtcactgtgcccggcctgtctcctaggtctaaatgttgccatrtttcccctgctttccctaaaacaattttacgctattcttgcaatagtcactaacagactgcgtatcgttctatttgccacatctgaaatgctttttccactacagcgtcactctagcatctcctcacgagggggtcagatgttctaggtaccggccccagactgaggtattccatgctgtgatttgtctgtaggtccactaagaatcgctgtttaggatcgattacttcaactcccagttcagcatcagagggcttccttacccccagggaacccgaattgtggcctccctttgctgattatagaacagacaactgggcatcatcttggcccaccttccctcaggcctggatttttctttctctctctttctttctttctttctttctttctttctttctttctttctttctttctttctttctttctttctttctttcttttccctccctccctctctctctctctctctctctttcttcctctctttctttctttttttgacagagtcttgctctgttgcccagactggagtgcaatggcgcaatcttggctcactgcagccatgacctccagggctcaagcagtcctcctacctcgacctcccaagtagctgggagtagcatgtaccaccacacccagctaatttttgtatttttttgtagagacgggctttggccatgtggcccaggctggtctcgaactcctgagctcaagcaatccacccacttcagcctcccaaagtgctgggattacaggcatgagccatcgcgcctggccaggcccagatttctatgtagcagtgattggctgtggtcaacccagctgcgtgactcatggtatttcactgttctgtagagaactgtatcccagcggggttgatatgattaacccacctgcaaggagtgaattgagaaaccaaggtcagttacaaaaacaagacgatggccaaatacggacctcttgcgatttatttactagaaaacgcctatatcccctcaggcaagggccacggggrgcatcgtgggagaagccaaaatccaagagtacagcccacctcaacacgccaccccttggctytgggcagcttagaagcctgagttcaaacacagtgaagatgactaaaggcaatgcacygggcacrtggagmgcattctaaggaatcaaaagacttcccaaaaatacgatgcgggtrtggtgtctggccgtcccccttctctgtttttgtgaggactgtacaaggtttaaccatttccgactaactcttctttttacagaatacactctaggctctgaattccagttttacctacrtaagattgaggaaatycttgactacttaagaagagcattgaactgaggaaagctaagaggaagattcaatattaactagcytgaagcctgacctagccagaagaagtgcctgtccgctgcagccgcaccctaccttgtctaagaaaccatgtgtgtctggaacacgctgctccccctggggcagctgttgggattctgattaaaagaggggaaacgatcatcctggacaggaagtgagatggcttcagttcatgagamgggatctgagttagacatcaccagtggaaattgattggaayagaaacttaaaggaaatggaaccctaactattctcccatcaaatcatatatgttgacctgtctgaattataaaccagcctgacctttcctttagcattagatgtaataaaataactttggaaatttgtcatttaaaaatttctttcctattcctttgtattacttcaaatatcccttctttgttctgcccgcccccgactcctccccccactcctccccctactcccccacaaccgcacataggtgaagggatagagatcaaagtgggagggatttccaagactaagattaataaaaaggaaggaggtgttttttgttgttgttgcttatttttttgagatggagtctcactctgttgccaggctggagtgcagtggcacaatcttggctcactgcaacctccacctcttgggttcaagcaattctcctgcctcagcctccctgagtagctgggactacagttgcgcaccaccatgcccagctaattttttgtatttttagtagagacggggtttcaccatgttgctcaggatggtctcgatctcttgaccttatgatccgcccgcctcggcctcccaaagtgctgggattacaggcgtgagccaccgcgcctggccttttcttttcctttgagacagagcctcgctttgttgctcaggctggaatccagtggtataattttactgcaacctctgccttctgggttcaagcaattattctgcctcagcctcccaagtagttgggattacaggtgtgcaccaccacgcccagctaatttttgtatttttagtagagatggggttttgccatgttggccaggctggtctcaaactcctgatctcaggtgatcctcctgcctcggcctcccaaagtgttgggattacgggcgtgagccaccacccctggcctaggaagagattcttacactgagaatttgtcagtggggaagtttggagcagtggctgtgagtcaaagaaaaaacaggagacgagaaagaagaagggctcccaggacagaaggaaagaagagaggggacctcactgcaaacccccttgttggtcaaatggtgcctggtccttgttaccagacccagattcaggcatcccattagttatgtgggatgataacatgacctcacagggctcatagggctgtggcttcattaaataacactgagaagtacccagaagagtgacccatattttttttatcattaaataacactgagaagtacccagaagagtgacccatattttttatttttatttttatgttttttgagacaggatcttgctctgtggcctaggctggagtgcagtggtgatcctagcttcatggcagcctcaacctcctgggctcaagtgatcttcctacctttggtctcccaaggtgctggaattataggcatgagccaccacacctggctgctaccaattttcttggtcacttatgcattcccttcatcgatgccccttccttcccatgccttagcttcctcctcacttctgattgagctcaccctggctcttctgaattccttctgctcttgttacctctgttgtttttccatgtcattatttgtcatatcctaagcacttccaccacacgtgactgccctcagccccgaaggccaccttcagtgaacttgcattatccccagtttacagaaagcaaaccaagacgtcgacttgcccaagatctcctaggtggcagatgaaaagccaggatttgaacccaagtcttttgtatccacattcttttaaccataggaagcctccctttcattttctcaacaagctttcttatgcacttgctctgagcctgacataacactaggtgctgggggttcagggatgggtgagaacagctcccacactcctacagctcgggtctggtgagcagagtggacactaaaataagtaatcgccatatcgccccatggtggagggagcgcctgtgtttaaaatccaagtgcttggcctgggttttgaaggctgagaaagagttcacctgggaaaccaagtcagagaggggcgggggtattgtaacccgagagtgtggcatgtgctgatgggaagacacctggggaagtggaagcaatttggcgtggtcagaggaccaagttcaaggatgctggcacggaaagcgggggtgtggccagggcaggtcaggccgtcactggtatcttctgtgccactaaagggtttcggattttaccctgtaggtgacggcagcgactgcagggtttccacaggggaatgacacggtgcgattcattctttccaccagatatgtgtgtctataatgaatgagagacgcaacagtgggcggtacggccaaagagcttacttacattcctgtgggaaggcagacaaggaaatgaagatggagatgggattacacttgcctgtcctcagggatccagccctcccacccctgaaagtctatccttaagagaggcttgtggccgggcgcggtggctcacgcctgtaatcccagcactttgggaggccgaggtgggtggatcatcagatcagaagatcgaggccatcctggccaacatggtgaaaccccatctctactaaaaatacaaaaaaattagctgggtgtggcgtgcatctgtaatcccagctactcgggagactgaggcaggagaatcgcttgaacccaggaggcggaggttgcagtgagctgagatcgtgccactgcactccagcctggcgacagagcaagactccatctcaaaaaagaaagaaagaaagaaagaaagaaagaaagaaagaaagaaagaaagaaagaaagaaagaaagaaagaaacttgcaaaaaagccattcatgctgacctttttaacagcaaaatacaggaaaaaacacaaacgtccatcagttggggattggttgactaaaccagggctattcacacaacagagaactgcatagggaataatctctaggctacatttgtttcttttttttgagatggagtctctgtcacccaggctggagtgcagtggtacgatctcagctcactgcaacctctgcctcccaggctcgagtgattcttctgtctcagcctcctgagtagctgggattacaggtgcatgccactaacgccctggctaatttttgtaattttagtagagatgggttttgccatgtcggccaggctgatctcgaactcctgacctcagatcatctgcccgctttggcctcccaaagtgctgggattacaggcatgagccactgcgcttggcctgtaggctatgtttttaagcctgaaaaaagcaattttacagatggcacaagaagaattagaaatatgaatatagttaagtatttgtttatgttttgaagcacaaacagggaaaaagaaaccaaaaataaattaaaatggtttcctaggctaggcgcggtggctcacgcctgtaatcccagcactttgggaggccgaggggggcggatcacgaggtcaggagatcgagaccatcctggctaacacagtgaaaccccgtctctactaaaaatacaaaaaattaggcgggcgtagtggcgggcatctgtagtcccagctactagggaggctgaggcaggagaatggcgtgaacccgggaggcggagcttgcagtgagccgagatcgcgccactgcactccagcctgggcgaaagagcaagtctctgtctcaaamaaamaaacaaacaaacaaacaaacaacaacaaaaaaaggtttcctaaaaagagaaggcaggggaagggtgctgagggtggcgtgggaaggtggagttttctggatgtgccctgtttggtagttttgactttggaacatcaggctttatgtaattgcaaagtaaaattaagtaagtaaggaaaaaagcattcctgaaacataaaacgcgagttacgtttcaacataaaaatatagcagaacaattgaacaattatacatagggccggtggcatgaacactgaaggattttttcatgttattttagacacggtatttttcatctacatacctgctgcagtatatcctaaggacaagaagaagtaccaaggaatcttaaacagtacttaggaatcctcttaaaaattatattggtattgttattttgaaattgtgtgtgtgtgcaattactatcctctactactatatgtgcacaaataattatgttaatgtcctcactaacaagattttcagcataaaaaacagagatccaaattgaaaaattaggctgggcttcatggctgacacctttaatcacagcactttgggaggctgaggtgggaggatcactggagcccaggagttcaagaccagcctaggtaacaccgcaagacctcatctctacaaaaaataaaatttagccaggcatggtggtccatgcctgtggtcccagctactcaggaggctgaggtgggaggattgcttgagccagggaggtgaaggctgccgtgagccgtggttgtatcactgcactctagcctgggtgacaaagcaagaccctgtctcaaaaaaaaaaaaaaaaattaacaaagctagataaaaactctgtaatcataaatttagaaatatcaatataaatttataaattcttttttttttttttttagggacaggatcttgttatgttgcccaggctggagtgcagtggctattcacaggcatgatcccattaccratcagcacaggagttttgacctgatccatttctgacctgggctgattcacccctccttaggcaacctggttgtcccctgctccagggaggtcaccatactgatgtcagacttagtgtggacacctgattggcacagtgcactgcagcccagaactcctaggcttaagctatcctcctgcctcagccttccagctacctgggactacaggcacgcaccactgcacttggcaataaattctttttctctttctaaaaacatgtatttcctaggtctgttcactgaaacgtcttaccaacaaaaacaacctacaagcaattaacaccttataaccagataatggctcccctttttttttttgagatggacttttgctctgttgcccaggctggagtgcagtggcacgatctcagctcactgcaatctccacctcttgggttcaagtgatttctcctgcctcacccttccaagtagctggggtcacaggcgcgcgccaccacacccggctaatttttgtatttttagtatagacggggtttcaccatgttggtaaggctggtcttgaactcctgacctcaaatcatccacctgcctcggcctcccaaagtgctgggattgcaggcgtaagccactgtgcccggcccagatagtggcttctaaatatcatttttcactatgaggaatcagggaaccttggagaaatgactgattccagatgcggaacaagaatatagaagatgggctgggcacagtggctcactcctgtaatcccagcactttgggaggcagggttgggaggatcatttaaggccaggagtttgagatcagcctgtgcaacagagcaagactcctgtctattaaaaaaaaaaaaagaatatttaagaagaacctgggatatctttttaggccagaaaacaagaaatttaactaagtactggatttatgtcaaaaagacactggggccatcttgaaggggctcctgggtcaacttaagcattcaaaagaacaatatcataaaaagaatcataactgcaatggattgaaaattgaaacactgaatatatagaaatatatgagttcattatggtcctaaaaataagtgaaagaaaacgcactggtcttctttggaggttgctagggaaaccatttatttttctgtaaattggcaaatagaaagaaagggtcaaatatatgtcccgccttccctgtgcacactgcagctgagagatcctatggttggttgcatcagtttcctgaggctgctgtaataaataaccacaaacgacatggtttaaaatatcagaaatttattttctcacagttctggacaccagaaatttgagatcagggtgttggcaggaccaagctgccctcaaagatgctggggggcttcttccttgcctcttccagcttccagcggtcacgggcattccttggcttgtggctgcatcactccgtc

SEQ ID NO: 95053 - DNA, 30874 bp, Homo sapiens
  misc_feature (1)...(30874): n = A,T,C or G
tgctgtgctgaaatccattctcttctcagcatttccctgaccaccaggaaacaagacaagcaaacaaaaaccccatttagtcagagaattccagtgcaggaggtgtggggactttacttccaaggacttcacttcatgggaactgtaacgtgtttgtgtgaaatcagaaagtctcttgtttttgaaacagagtttctctcgtcacccaggctggagtgcagtggcgctatctcagctcactgcaccctccacctcttgggttcaagcaattctcctgcctcagcctcccgagtagctgggattacagacacccaccatcacacccagctaatttttgtattttcagtagagacagcgtttcaccatgttggccaggctggtctcgaactcccaacctcaagtgatctgccctcctcggcctcccaaagtgtgggattacaggcttgagccaccgggcccagccgaaaatcagaaagtttctacccctctgcttaggaaatgccagaaaacatcaacctgagtatggggttggggacattttatcattggaactccaatgctgacacagtgtaactggcatttctgactgcaagctgcctctcctgactgcaaacctgttctagagagaacacagaatccggcagacacaaaagcttcctgagtgatgtttcgcaaatcctgaagctgctacagctaaattctaggtagttgtggtatagataagcaaatcaagacaaggttccttggactaacggtggtgttgtagcattttactggaatccgaggactaggggaatgaacaatcttcatcttggaggagcacaatgctgaggttgggggcgaggactggggaccaggctgcgttagttggtcctctggcacctcagccagcagctgctgcctccctgccccttggaaagtggagacgatcagatggagtgtgctcatggacgtgcttacaagattaaatgagttacatatacaagcatcctggtgtctggcaagtaacgaggcctcagcaacattattttttttatttatttattttgacacagagtctcactgtgtcgcccaggctggagtgcagtgtggcacaatctcagctcactgcaacctctgcctcctggactcaagcaattttcctgcctcagcctcccgagcagctgagattacacacatgtgccaccacgcccagctaatttttgtatttttgtagagatggggttttgccatgttggccaggctggtctcaaactactgacctcaggtgatctgcctgcctcgccctcccaaagtgctgggattacaggcatgagccactgtgcccggcccagcaactttattggtctgcgatagatgcagggagaattttctcattatcttgtggtgtgcctgaaggcgtggtgaaaccctgctccccacgcctgaatcacgccagatcactaccttctgaagaacgtggctcctcattttccatctggaactcagcaattgttacctgacctctcctcctctcaagacaagggccttcccaggggccggcactcctgcctccaagtgatgctgtgacaaccttaagaaactcagcggccgggcgcgatggctcatgcctgtaatcccagcactttggaaggccaaggagggcggatcgcctgaggtcaggagttcaagaccagcctgaccaacatggagaaaccctgtctctactaaaaatacaaaattagctgggcgtggtggcacatgcctgtaatcccagctacgagggagggtgaggcaggagaatcgcttgaacctggtgggtggaggctgcggtgaaccgagatggcgccactgcactccagcctgggcaacaagagtgaaactccatctcaaaaaaaaaaaaaaagaacctcggcaacaaccttaagaattttgtgaaaaagagggagggaacagagacacgtgaaaagaaaactggctggataacttcctgcagatactatttagggatattagtgccttctaggtgtccattctagcttgaaacagtaattcccagactgccgacctccccctgagactattatcacatccatcccaaagataaaggcgctggggccctgagggaggccatgctgagctctttgatgccaaatagagatgctttcctctgatgcctgctgagacagactttccagaagttgttctccctcggctgtcacttgggtgccccttcatgacctctgcccaggggaactctgctcccagcttccccagctcccctgggccttcttgcttaatcacctcccctttactcctctcatttggacaccctgaggaatgccaacctagcatgacttgccagcacatatactaaaaaaaaattggaatgatacagagaagatcagcatgggccccgcgcgaggacgtcatgcaaatctgtgaagtgttctgtacttataatttttttatatatatttaaaaataaaatacggctgggcacggtggctcacacctataatctcagcactttgggaggctgaggcgggaggatcaagaggtcaggagatcaagaccatcatagctaatacggtgagaccccatctctactaaaaatacaaaagcttagccgggcgtggtggcatgcggctgtaatcccagctaatccggaggctgaggcaggagaatcgcttgaacccgggaggcaaaggttgcagtgagccaagactgtgcccctacactccagcctgggtgacagagagagactctgtatcaaaaataaaataaaataatataaaataggctgggcgaggtggctcatgcctgtaatctcatcactttgggaggccgaggcaggtggatcacgaggtcaggagtttgagaccagcctggccaacatggtaaaaccctgcctctactaaaaatacaaaaaaaattggctgggcgtggtagtgggtgcctgtaatcccagctactcaggaggctgaggcaggaggatcgcttgaatccaggaggcagaggttgcagtgagtcgagatcgcatcagtgcactccagcctgggcaaaaaaaaatgagactccttctaaaaataaaaaaaaaaaaatcattttaaaaagcaagggaatagaccaggtgcggtggctcacacttgtaatcccagcactttgggaggctgaagcaggtggatcacgaggtcaggagatcgagaccattctggctaacatggtgaaaccccatctctaccaaaaatacaaaaaattagctgggtgtggtggcgggcacctctagtcccagctactcgggaggctgaggcaagagaatggtgtgaaccggagaggcggaacttaaagtgagctgagatcagccactgcactccagcctgtgcgacagagtgagactccgtctcaaaaaaaaaaaaaaaaaaaaaaaaaagcaagggaataataaaacacaaaatttagaatagtggctacctctggggtcaaagaacatacaggggacctaaatgacattactaatgttccatttcttttttttatttttttgagaaggaatcttgctctgtcgcccggctggagtgtaatggcacactcttggctcattgcaacctccgcctcccgggttcaaatgattctcctgcctcagcctcccgagcagctgggagtacaggcatgtaccaccacacccggctaatctttgtatttttggtagagatggggtttcaccatgttggccaggctggtcttgaactcctgacctcaggtcatccacccgccttaacctcccaaagtgctgggattacaggcatgagccaccgcacccggcctccatttcttttttcttttttttttttaactttccatttcttttctttttttaactcttgttgcccaggctggagtgcaatggcatgatcttggctcactgcaacctctgcctcttgggttcaagcaattctcttgccttagcctcctgagtagctgggattacaggcatgtgccaccacacctggctaattttttgtatttttagtcgagatggggtttcaccatgttggccaggctggtctcaaactcctgacctcaggtgatccacccccctcagcctcccaaagtgatgggattataggggtgagccaccatgtccggccccatttcttcctttgagacaggtctttatctcccaggctggagtgcactggtacaatcatagctcattgtaatcttaacctcctgggctcaagtgacactcccacccgagtctcccaagcagctgggataggactacaggcatgtgccacatctgcctaattttttagtttttacagagactggggtctcctccatgttgcccaggctgttctgctgttctggaactcctgggctcaagcaatcctcctgcctcagcctccctaagtgctgggagtactgatgtgagccactaagcctggactctagggttccatttctttctttctttctttttttcttttttttttttttttttggagacggtgtctcgctctgtcatccaggctggagtgcagtggcgtgatctcggctcactgcaagctccgcctcccgggttcaagtggttctcctgcctcagcctcctgagtaactgggactacaggcgcctgccaccaagcccagctgatttttatatttttagtagagacggggtttcaccatgttggtcaggctagtcttggaactcctgacctcgtcatccgcccgcctcggcctcccaaagtgctgggatgacaggcgtgagccaccgcgcccagcatggtgttccatttcttaagcgggatgtgggtacacagagatttatatacgctttatgtagtctctggtgtacgtgaaatactgagtgatgaataccaaaacctcatgatctgttatgaggagggaccatccagctacatccccttctgcactcatctggtatcttacctccccagagctccttatccaaccctgaagttccctatctggctggagaccctctttcacaaagatccctttctcaagctgaccagtgatttttacacacgtatcacagggagaatcagtaatccaagcgagttacaggtcgtagcagattcactctcccttgatcccggccacctgcagacaccatgcatgtgttacctacagtgcttcaaggtgtggtattctgatagctttggacagttattccccacctgcccaccaccaataaaacttctcaacaagcttacagcaagtgagaaataataactaaatgcaatgccgttgtgctgactacaagcaaatgtgaaccccacagcctgctaacaaagcctaaggagctatggaaacagggagggcatttggcagcctgtgaattttgaaaaagatttcaggacatctctagtaatcattaacattttagctacaatgtgaggtcgaagtgctggctcagaatgtggcgctgcagcctccaagaatcttgcaacggcagcagtccgggatcatgttcggcctctgatttcctgctagatttactggttctggccacagcagagtatctttatctctctaaccatttttatgtaaaataagattgtttggagccctttcagggccacgccttagaattgctctgagagtaccaagtgcctgatttcttagagtccttaccagtaggagatgttggctgttgatttagctgctgagtcatggggctggggatagtggttttcagtagccaaaaacgttagtgtgttgctggtgaaatcacaaactctgcttgcaaaattttactcttttttttttttctttttgctgaatttaatcctaaagttcttgcttcttactcactggaaagcaaatactatggtctcaataggccttaatttttaaccaacgccatggaaacctgtctgtagctaagaggataaaaatgctaggggttaaggaagaaaagcaggttttgcagctgaccagaagaaataattaaattcaagtacatatttgaacacctctttacaaggaaatgaggaaaatcagatgttttagttctcttacagaccagcagtaatgttgaaaaatataaaagtagccgtaacagaaaacgaagtgatcatytcagccctcccttggagtggggggatatattgcggagctgagttttaatggctatcagttcttgatcagaaaagtgaaatcactccaactccttccgtattccacggaatatgacccgtcttgaactttgagaaattccccgggtctgtgtgaaattccagttccaaataattcacatgaatggttcacaagaatccaggtaggtttgatctagttccctagatgggaatgagagggatgtaaaatttgagaggcaacatgacatggactagagagagaatgaattaacactggggaagcacgtgggggcgcgccggacacctagaaggcactcaaaaagtatgaggtagaattaaaggaaagtgaaccttcctttggctgtctcggcctgattctcaccgcagcaaggagaaagggacagggtcaccttggcgggtgccaggcggagcccggccagacgggcgcggctggagggcagcgcgcaggcgcaggcggcgcacgtggccccggacacgcagcgctgcggcggggycagcgccccaaccccggagtggggccgaggcgcgcagcctctcaacgactcgacgccaacggggtctctcggatcgcggcgcgaggcaggaggggcggggcaggagggccgcggcaggcccgggccgccaaagttgtcagcaaggtcgagggccggacgtggggccccagagcgacgctgagtgcgtgcgggactcggagtacgtgacggagccccgagctctcatgcccgccacgccgccccgggccatcccccggagccccggctccgcacaccccagttcggctcaccggtcctatctggggccagagtttcgcccgcaccactacagggccgctggggagtcggggccccccagatctgcccgcctcaagtccgcgggacgtcacccccctttccacgctactgcagccgtcgcagtcccacccctttccgggaggtgagggaatgagtgacggctctcccgacgaatggcgaggcggagctgagggggcgtgccccggaggcgggaagtgggtggggctcgccttagctaggcaggaagtcggcgcgggcggcgcggacagtatctgtgggtacccggagcacggagatctcgccggctttacgttcacctcggtgtctgcagcaccctccgcttcctctcctaggcgacgagacccagtggctaggtaatgattggggaagggctgagcaacgggcaggcggcgcagggcttttctgggcttgtggggctcttttccctccgagggaggcggcgcgcccgcaggcccagcgtggcggggtcgggggcacgtgcaagccgcctccctgggtgggaactggcgcccccgctcaccccgaggcccggggcgggggcgcaatgccaggcgcacgtgctgggcccccgatttctttggaggggaaagtgcagatcaacacgtgattaccgactgcggggccgagtcactgtcagggaaggtcgggagctgcacacgcgagctgcttagcacagcgggagttgggagtggaagttgcttttccatcgtagccaagtgtaaggtttttgggatagacgcagacttagcggcggtggccactcaggccaggcccttcctaaaatggaggagggcggcgatagtggagatggccacgaggctgcggccccctcccccaccggtagcccccgcctctcgcccgcgctcgcggcccgcgcttctgcctagtaagcggtgactcatttaactccgagaaggcacctcttgaggaacctrcagcagagccgttagatcattggcaagtcctccaggcgacctcgcccaagttgggcaagagcggctccccggctggccaccaaaaatcgggcctgatctgatttggtttttttttttttttgagttttgctattgttgcccaggctggagtgcaattgcgcgatctcggatctcggttcaccgcaacctcggcctcctgggttcaagcgattctcctacctcagcctcccgagtagctgggattacaggcatgcgccaccacgcccggctaattttgtttttttkttgttgttgttgttgttttagtagaggcggtgtttcaccatgttggccaggctggtcttgagctcccgacctcaggtgatccgcccgcctcggcctcccaaagtgctgggattacaggcgtgagccaccgcgctaggccaagaaggatgtattttaagaaagcttcctgttcaatgttcccctgctctgtgcgcttctctgggcggtagggtccattgcttcacttgcctttcaggcccacccgggccctgactgctccattcatttaccgtgtccctaattcggggttccatccaggcagctaaaaaagctgtgaatggtccgggcgcggtggctcacgcctgtaatccgagcactttgggatgccgaggtgggcctcctcaggatcacctgaggtcgggagttagagaccagcctgaccaacgtggtgaaaccccgtctctactgaaaatacaaaaatcgaccaggcgcggtggctcacgcctgtaatcctagcactttgggaggccgaggtgggtggctcacgaggtcaggagatcgagaccatcctactctactaaaccccatctctactaaaaatacaaaaaattagccgggtgtggtggtgggcgcctgtagtcccagctactctggaggcggagcctgcagtgagtcgagatcgtgtcactgcactctagcctgggcgaaagagcgcgactccgtctcaaaaaaaaaaaaaaatcacctgggcgtaatggcaggcgcctgtaatcccacctactcgggaggctgagacaggaggctgaggttgcagtgagccaaaatggcgccattgcactccagtctgggcgacaacagcgaaactccgtctcaaaaaataaaaaaaaaatcacactttattttcacatcctaagacgtttgtctttttttttttttctgagacggagtctctctgtcgcccaggctggagtgtagtggcgcgatctcgactcactgcaagctccacctcccgggttcacaccattcttctgcctcagcctcctctcctgacctcgtgatccaccctcctcggcctcccaaagtgctgggattacaggcgtgagccaccgcgcccggccaagactttctttcgtcttaagtcactaaaatgaaaacaaaagtactgaggcaccctaataaaattgcctttaaaagtatgactgaaatactcaaagtataccacagtggtggcctggagatggggcagggggatattgactggaaatggcctgagataactttttgcagtgatggaaatgttactcgggtatataatttgccaaaacgcaaaattaaatctaaaaatatgtttaaacaaatttgcctttttggaacctagtaaaaagtaagtacctttttttggctaatgaataaaactccattgttacatagacaacaaagccacagaagtgacttcagtaaataattttgaaagttaaaaacctgccacttgccacctcaggacattccagagaagatgttggaggggagcccaggtagataatggctttaaacactaagttcctctcacccacctcagttctataagttgttcagttagtttctttggagagcgccaaggaaaaaagtaagaatgggtttttctttgaggaattggtatttgttgttcattgctggaaattcttgtatttttttttttaaggtggtgttaaaggaagccccttcccttgaagtatcctggtgttcaaagaatctttcctctatttacaaattataaaaccccgttgggaagaaataattagatgtcattattggctggtcctggtggcttacccctataatcatcctagcatgctttgggaggccaaggcaggggaggatcgcttgagcccaggagtttgagagcagcctgggcagcatagtgagaccgccatctcttaaaaaagtaactaaaataaaataaagatgttatcattaatgacataacaacactgaagacccaagtactgtgaaattggaaagtcccaggaagtggcagtagccaagatcacacggtccaaggacttcattgttcctgacttccaaactcagaatttctgatcaaatacctactaagtgaatattaatctgaagaattatgtccaaacttcattcactattttgttttaattctgctacaagcaaggttttcccctggtcccgccaccctctttttggccctaggtggttttgcttgtgaccttcatgtctgttcttggttcctttccattcccatgccagccctcattgttcactcatgacaatagccagtttcagacagctcctgggccactctgcgtcgagcaacacattcatctttctatttggatttgattctccctgggcacacacgtttgtgggctttttctctctctttttttttttttcttttttcttacagaacaagacctcaattgctagggtttaacccatttatgccagaggttgcaaatctttttttgtgaaaaatcagaccttggcaatgacttgagcagtcggataaaagtaactcccacgcccttagcgttccagtaatggaatactaggcataaaaaggttaaggccttccgcagctaggccctaactacttaattaggagaattcncactgctttccagcaggcttttccccccaccctagccagctttcctacatccagtatttagtccagtgctgattctctctagtccacgaacctcggaagtgattccttgaatgagtgaggaaatgcagcattatggcttatggaaaacatgaactgtgtgtttcttctacagaagttcaccatgtctattctcaagatccatgccagggagatctttgactctcgcgggaatcccactgttgaggttgatctcttcacctcaaaaggtatgtgccacctccttggtttccatggttccttccaccgtgcttcattttaaaaattttctacaaatgctggagccttaggaaaaaaaaaatctgttaaagcttttctttctgtctgcacatgctagtaggttgtgattcctgactgtgagggttggggaatttttaggcatggagccagtgtcttgctgtttctcggcttatttttttctttttctttttctttttttttttttttttttttttgagatggagtcttgctctgtcacccaggctggagtgcagtggcatgatttcagcttactgcaacctctgcctcccaggttcaagcaattcttctgtctcagcctcccaagtagctgggactacaggtgtgcaccaccacacctggctaatttttgcatttttgggagagacgggggtttcaccatattggtcaggctggtctcgaactcctgacctcactcaggtgatctgcccgcctctgcctcccaaagtgccggcattataggtgtgagccaccccgcctgatcctgccagctccttggcttaaaaccacataagttggctcctaagtcagtgaagtaaggaagtaaggtgataccacaagaccttgtccctaaaggggcccatcactagttgttgrctgacagcttgctgtgaccaaatgcaggatacagtgtgataggatggtatctcttgataaggggagggatagcaggtgtgaatatagcacctttatctctgtgactagaaatcagtcttcagcaaggatcaaggacagtttttacctgtaggctttggaatagtctggaggctctcatttttacctggctgtcaatccctataggaggagttttcttatgaaaaattagagaattgtgaaactccttcctttaagaagaaaatccagtgcctttgtagctctgtgttacctccagcacatggcgcgatggacagagtgggtgaggttggcaaaggagcttcaggcagaatcactcagcggtgctaaactcacagagaactgccagtcggagctgagtcaccatctgtgagtcacaggcctagcagtggaaccccagcccttcccttccccttgcacctcccctccccctcaggaagaaaggatccttgaggcctgacttcgttgggcaaaagaatgcctgagttggctgcttgctgtgtgggctctcaagcactgtggggtttctcactggctttatggggaaccctgagggttctcacaggatgccaagaattcccttcatccagtaagagtggtttgcttagtcaatgggtggaactttctacttggatattaatgaactttaagcaacaaaagaccccagatgctagaagattgttgggagttggacattttgaaattgaaatgaatggaactttctcttgtgtgtcttaatccttttcaaaaaacatgaaatgatggacttgctcagaacctttcatctctctctctccctgtctcatcaacttttttagagcagttttaggttcacagcagaagcaggcggaaggtgcagaggtacataaacccatgagtacccactgcctctgcacatgcgcagcccccccattgtcagcatccccactagagtggtcaacatgcgtgaacacgttatyatcaccaaaagtctgtagactccaagcctcttgttttcatcttgtctttgcctgatccagtgtagggtggatatgtagggagccagggcagctttcaagaaggaagtatgacctgttgatagcgcacactgcagtgcagcagggaacactgctgggtcctttgctagaaatatcttgttggtttctctgcaacatcttccttgacaccatctgttcttttgcctccaccaaagattgcccttgttacaggtataggtttcaccagatggctggtttcagtatctgcaagattacttggttcagttcttacatttattaaactgcgcattttattatctttattccttccccccacatccatcctgtttgccagtttccagttgggcatagaacccctaaaatagcatttagcattgtccaaactgaaacaaatgagctagatactcctcctgagccagttaaattaccctaattttatgcttaacatcaatatagtacctgtctgggcatggtggctcatgcctgtaatcccagcattttgggaggccgaggtgggcagatcacctgagatcaggagttcaagaccagcctggccaacatggtgaaaccccatctttactaaaaataaaaaaactagccgggcgtggtggcaggctgctgtagtcccagttgctggggagcctgatgcaggagaatcgcttgaacccaggaggtggagattgcagtgagccaagatcacgccatacactctagcctgggggatagagcgagattctgtctcaaaagaaaaaaaaaaagtaccagaacgtcttcaatgccctgtgtggctcrcattggatttctcttgggcagtgctgctggagtaatccacagggcaccaatgcgagcttgtgagggatgcatatttgcctgggtcagaatctacattttaacaagacctccaggtggcatgtaggctctgctgtagaacactttctttctgctagaggaattagtcatctttgcagtaagttctgcagtacaggatcataaacatgtgaaaggcatgaagaacagcccagagcgtttaattcacacagctggtaggaggaagaaacagctccctaatgacaaatgcatctgtgggcgggaggggacttgggattgtgctggaactggatttctgaattgctactacatcttttttcctctcatccaggtctcttcagagctgctgtgcccagtggtgcttcaactggtatctatgaggccctagagctccgggacaatgataagactcgctatatggggaagggtaagccttagaacccacagcccatggcctccctgcttccagccccattcctggccttgcccagtcctgtcctctctgggtggcacttgcacttgcaggtttatggcaggtaaacctgctgtgacccatgatgttgatggaagcagtgcaccaccttgtggacaggaaagttggtgtgtggattccggggttcccgagcctgcatgctctgggtcgagagttccaatgcttgcttctattgcagtttgttcccaatctgcgaaatactccttcacggttaggacaggaacccaagcatgagaacagggcctgttaactaaagaaaagtttccccatctcccaggagggttctgtgggccctccagagatcatcagcctcttcacgggctagaaaggatccagggaaggtctaaccaatgacctgccctgaatggtgagctgcaggtgtgtcatttagtgtgattttcctgttgactgactcataggrgccctgctctgtggcagagctagcctctggctgtattcaaattgacttagtgtgtgtgcaacattgacctttctagagatagaacatgtggccaaattasagaaaagcacatagggctagatcacgcattctcagtggggcacccggaaaactccaaaaaggctgcagggaggggacaatgatgaaatcaggttgtgaaacactgggctggtgtcgcagtggtggtgctgggtgttcagtcccgctttaatgctgtaagaagcactctacacacacgaacatgttaccatttgaccgttgtttaatggcgtacrtggggacttagccggagcaggatgatgctgtgccttgatggtaatgagtgctcagtaagtaagcatttgtggaagattgaacgcatggcccctgaaatgctctcctctgctttcctgccccctcactgtctctcactcgcagtccttaatcaccggttctcttctgagtctctctcatttttccttcttcatcctctgctgggcaggygtctccagacccattaagtatattaatgagttcctggcaccagccctgtgcactcaggtaactgattgaacagcctttagtctgcagttggcgtttccagtgcatggtcttgcaaactaacctccagtcagatcgttctgagccagctgctgttttgtgtggctctaaccctctggggtcctaggtaggagcactcagactgggccggaaagtcctccgattctggggggaaaggggagagggggaagaggtcccacagaaggtcccttggtgggcttccgcgtcggcctcaacagtggttctctctaacaatgctgctcaagcctgttttaaagttaatgtcagtaatttgatttgattgttccttccaggtgtctcaaaggctgttgagcacatcaataaaactattgcgcctgccctrgttagcaaggtaggacctgcctcctgataactaatgtgtctaatgccaccagagcgtctcccaggcccaggggctttcctgtttatggaagagcttattctgagagctgtagaagcctattggattccctgtcangcacgagaacaatccntgcatgacataattctaacctgcccgctgcctcaccccacttttgggagcagatggaattgcatcagaagaatgagacacttcgagccctgaggtttcttcccccctgcaactctctggacctttgaagaaattaagatccagattttaagagtggctctcaggggtgtttgtggtagtgtccatggtgactaatttctcatgaactttggaattatttactataattctactgactttaacagtggagttcctgttaagtaaaatctggaaatctcagtatgtcaaacataaaagagctgctggaggtgaagtagggctggggacccagcaacccacccgactctgcaggttttatctcatttaccctcccttcggcccgtccctccgtaattcctgtggcgctcatcagatgggactggtttgaaaacccctgtctaaaaacactccgggccaggtgcagtggctcacacctgtaatcccagcactttgggaagctgaggtgtgtggatcacttgaggtcaggagttggagaccagtctagccaacatggtgaaaccctatctctactaaaagtacaaaaattggccgggcatggtggtgcacgcctgtagtcccagctacttgggagtctgagacatgagaatcgcttgaagctgggaggcagaggttgcagtgagcagagattgtgccactgcactccagcctgggcaacagagtgagactctgtctcaaaaaataaaaataacaaagctctctaggcccagtccaagcccagccacagcctccgtctattcttgaatctagtccctctcctccatgaattcattctgtacacgagggaaaaggaggagttcctttgttgtctctgtccctgactcgttggtttaggcctggcttttgtggcactctgtaattactccctgcccgaccagcccccagacaaaatgtcttgttaccgttctgtctgcaccaccccctgccagtctcccggacacctccacacataccttgttctctgtcccttcatacccctgcatagtgtgactcacacgatgagcaggatcccctgacttttttttaaccccctaragaaacataccaaactgttagtgagaattgacctctgaagctgtgtssttgggtaactgcctgcctgttgcagtgatgccttgacaaagctgtgaaagacaccaaattgctcatacagcatgatgggatcagagttgattttctttgcatatttttttatatcaagcacatcatagataaaaataatgccttgttattaatatattagtttaaaatggaatgctgatttttggctgggtgcagtggctaacgcctgtaattccaacactttaggaggactttaggaggctgaggtgggcagatcccttgaggccaggagtttgagaccagcctgggcaacatggcaaagcccatctctataaaaaaaaaatataaaaattagccaggcatgatggtgcatgcctatagtcccagctgagtttggaggatcatttgagccyacgaggtggaggttgcagtgagctgaratcgtgacactgcattcctgccttggcaacagaatgagactctgtcttaaaaaataaaaattaaaaaattaaaaakkaatactgatttttattggattactttgagccagttctcagtacgtcagttttgttactttatagtctcatcaaaaattcattttgatccatcattagacgctttgctaaatgatttcggactacctgcagaaatcatgcctcccatcagaggatgaagatttgccatctttgcagttagccaagagtgagcagcagagcctgcctttcaagggctcagcctgcttgagtgaacagtgagctttgcttatttattgcctatgaaagccatgttcctgggtagcagtggtctacatagcacatacctgacagttctcttgggtgtaaagtcactttgggctccctgggtagactattaaccttttgttacaaaagcattgtctgagagtgccatctctgttgcattgttgggtgaatgcctgataaccatcaaagcaagcagaaggcagttttttgtctccccactgatttttgtcctccactttttttgcttataaaacaaacatcacagaattgattttgatattacacagttccaaagtcagattccatggtaggggagcaaaggctatgcagataagagtggccccaacccctcattctcccctctmcctcgtagaaactgaacgtcacagaacaagagaagattgacaaactgatgatcgagatggatggaacagaaaataaatgtgagtggcctgaggtggcgtctttactggggaagatcatgaagtctcctgaagattttaaaacctttcaggaagaggcccatgatcttagtgatgagctacatgagcctgtggtctcttcccatttctttgctttactcttaagaaatcacacttttggccaggtgcggtggctcacgcctgtaatcccaacactttaggaggctgaggcaggtggatcacgaggtcaggagatcgagaccatcctggccaacgtggtgaaaccccgtctccactaaaaaatacaaaaaattagccaggcctggtggtgggcgcctgtagtcccagcaggagaatggtcccgggcggassttgcagtaagccaagatcctgccgctgcactgcagcctgggcaatagagtgagactctgtctcaaaaaaaaagaaaaaaaaaaaatttttttgaatatcaggtgcaaaaccaggtgacaatagcctgtcagtttggttactcagaagagctttgctccttataatgaattcagcaattcctactgttggctggagttgggctctgtcttagaggggaaaagcagtggtgagtccacatagaatgctatttgtatttctagtaacagtgaaatggaggtgtgatgggggaggagatggtgcagaatacaaccctcagggcagtacagcaggagaaaagctggtgaatcagaaatgacttcattccactcggttctcttctgttctagctaagtttggtgcgaacgccattctgggggtgtcccttgccgtctgcaaagctggtgccgttgagaagggggtccccctgtaccgccacatcgctgacttggctggcaactctgaagtcatcctgccagtcccggtgagtggtttattggaacttcccaagcaaggagttgggggtttcagcttgctgttggggacccgagacctcctatgccttgatatcctaacacatgtgactctcccagcacagctctgccccttgttaagtgtgaccttgagcaggtaactcaacttgcctgtgccccaggtcctttatctgcaatggaggctcggggaggaaatgacagcagtactttccttgctaggctgtgagcattacctgacatagtcacaagtgtttctcctggtgatgatgaatttgcagttatcaaaatagacctggcrtgaactggttgcagtagcgcacacctgtagtcccagctaatcaagaggctgaggcaggaggatcacttaaacccaagagtttgagaccagcctctaggcaagaccagtatagtgaraccctgtctctaaaaacatgagtcagagacctggtgagcatttcacagcaccctggcccctctggtgctcctcaagaagcaagtcttgggctcatctgtgagctagattgggatggtaggaccagaggggcttactgccctgtggggctctctggacccagtgccatgcttctctgctctgctctccccaggcgttcaatgtcatcaatggcggttctcatgctggcaacaagctggccatgcaggagttcatgatcctcccagtcggtgcagcaaacttcagggaagccatgcgcattggagcagaggtttaccacaacctgaagaatgtcatcaaggagaaatatgggaaagatgccaccaatgtgggggatgaaggcgggtttgctcccaacatcctggagaataaagaaggtaaaggcrctagggaaccgcccccccacccagccctgcagcgccagctccctctgttggggggtcgtccacacctgccactgtggaaatctattctttccacctgtagtttgtaaagatcaagacccttcaaacggttttaaggaggaaaaggggagcttcattttattttacttatttttttctttttttttttttttttgagatggagtctctgtcgcccaggctggagtgcagtggcgcaatctcggctcactacaacttccgcctcctgggctcaagtgatacctactagtttggggagccaagtgtctgtccgtctgtcctgctggcagggcagcttagccatggacagcagaccctgagcctgagctctcaacggcacagcctggcgggaggatcctgccaycccgggctgcctccactgggctttctcttggaccccgcttctgctctatttaaggcctgtgccttgggacagctgatctcagctgcttactgtaactgtatcttggccaggacagctgttcctgggcactaaatttgggagcatttgtcagtgagaagggctgctttcttggaaagagagctgaatttcccattttgtatgcaccaagaactctgacccatggtttcttgccccaaagcagaaaaaaagtaactgatgtcagaactactggttggggcctgaacacctgttgatctttgtgttacagtccctgtgtagcagctgttgaagggaagttttctctgtacctacctgttttccaaacctgttgtcaccatctcttcccaggcctggagctgctgaagactgctattgggaaagctggctacactgataaggtggtcatcggcatggaygtagcggcctccgagttcttcaggtctgggaagtatgacctggacttcaagtctcccgatgaccccagcaggtacatctcgcctgaccagctggctgacctgtacaagtccttcatcaaggactacccaggtgagtgttccccgagtgccatctccctttcctgccactgacctgcagcagggcagctggagcatctggctggctggtgatggctgcaaggaggggatggggagggagtgtctgaacttccagctcccgtaggggattcaccactgggtttgcccccagttgtgcatacacagrgcttcacagaggttcttgtgtagctaaggagctcgggtgccagcagcgacattgcatrataagttgttcacagtcaggagcagaggcagtctgtgctccattagacaggtgagggaaccaagccttcagaatcagaacagccacttggtactgagatgtatcatgcttcctgtgagctgggaatattcattttaggctgtgtgtgtgcacaggatagagactgtgaccacctttctacaggagaggaarctgatggctggctgaataatctgcccgagagcacacagcaaatggtggggcaagaattcagaccaggaaatctgactccagagtctgtgtgtttaaccactaccctaaataacttggtcaaggttgagccaagacccaaactcaggtcttctcacttctgagtctgtggctccattctgattttcagtggcactaaactcaaacaaccctagacaaaaagtgtcctcttcttacaggtcttaaacaaaatttttgaggctgggcatatggtggctcacgcctggaatcctagcacttggagaggctgaaacggcatcacttgagcccaggagtttgagatcagcctagggaacatagcaagactccattgctacaaaaaaataaaataaaataagtagctgggtaggttggcatacccctatagtcccagcgactcaggaagctgaggtgggaggatcatttgatcccaggatttcacagctgcacttagctatgattgcacccctgcactcaagcctgggtgacagagtgagattttttttgttttagatctatagatacccaggattgtgggtgacttttgtcccctgctgcaggagtaggctggggcacattgtttcaaggatcagttggggagcygtccccatcctatgcttttgggcattgtgaggccaggcragcagcaagtcaagggggaagcaaggctgggcattgcggtggagcacactgggaggatcacactgatgaagcgtgtccctcctttccttagtggtgtctatcgaagatccctttgaccaggatgactggggagcttggcagaagttcacagccagtgcaggaatccaggtagtgggggatgatctcacagtgaccaacccaaagaggatcgcmaaggccgtgaacgagaagtcctgcaactgcctcctgctcaaagtcaaccagattggctccgtgaccgagtctcttcaggcgtaagtgtcttcccaggcgagcagctttcccgcagctacggcttgtgaatcagaaaagggcccttttgttctggtgatggggaatcctgctggccagaatgtaggactcgctggaattttaacaggttttgtgtttgaactcaggagccttttaaattaaacaattggggcctgtaatcccaacattttgggaggccaaggcaggaggatcacttgagctcgggagctcaagaccagcctgggcaacatagcaagtagttgtattctgtgaagagctctgtcagagaacactaatctttctcccatcaagggaggctgaacccagtgtttcaactatgacaggagggctaagaaggtcctgggggtggaagagttcaggggagggtgagggttctcctctgtgctcttgacaaagcccaggcatggagggctttagccattaacagcccctccactgctttcctgctggcaccgaggggtaatggcattgggggttatggaaccagaaaatgggatcatgccatctgggttgttccttggcttccaggtgcaagctggcccaggccaatggttggggcgtcatggtgtctcatcgttcggggragactgaagataccttcatcgctgacctggttgtggggctgtgcactgggcaggtaagaatgagcrtctcctcctttcttctctgacctcaacttcctaggaagacccaaaaccagtgaggctccatgtctgtccccgttttgctcaygtcccctgagtcagtgctcttgtttctgaggctgaacagaatgggggcatgagsrccctgcctgtatgttgtggcccccactttcctagcatcagatcctctagaaattctctctctgacaccacaccctctccctgccagaaatgcctgcaaagcttgtccgctgtaassaaatggcctttcttttctcctagatcaagactggtgccccttgccgatctgagcgcttggccaagtacaaccagctcctcaggtaaggagggctcctgagaacaaggggcctgtggttcactaggtgggggcctgcactcagtgtaggcactgccctcccccaggagctcctggctctgggaacatgtacaggtgcaggtgcacagtgcagacagccaggccctgagcaggcttaggtcaggacagagttaggcctagactccccctacccacccactgcagcsscaccagaggcaggagcctgttccacacagtgctgccctcttctggtgagaaagaatgggaccccctttgacagctgatgcatgactttcttagagctttcagagagctccttcatatgatctgtttcagcgcatttaacccctgtttgtggatgtggagccagggctgggagggaggaagaaaaggccgaagggcacatggctgggtttccacttgtgagcgctgtggggctgttctggtctccctttcctgtctgtgtccttgggaagcccctgaacaccaggagacttgtccccccgcccgccaccccgctaagttctcccatattaccccttcattcaaactgtatcctggaaattttcaaacatatacaaaaaagcaggtgaacagtagacgcagggcttttttgttgttttgtttgtttgagacagggtcttgccatgtcactcaggctggagtgcagtggggcagtcatagctcactgcagcctcaaactcccattctttttttgctggggaattttatttttatttttttgagagggatctcactctgtcgcccaggctggagtgcagtggctcagtcttggctcactgcaacctctgcctcccagattcaagcaattctcctgtctgagcctcccgagtagctgggattacaggtgcccaccaccatgcctggctaattgttttgtatttttaatagagacggggtttcaccatattggtcaagctgacctcgggtgatcctcccactgtgcctggccccaaaatgtgttggcctttttttttttttttttttttaacatcaagatccaaacagctcacacattttgtcttttaataaggtcactctccttttctccccatgccatttatttgttgtcccttcaatattttttaaaaaacaaaagcattagaatttttatattccaagaaatggcaatgctgacattttactttgctcctctgcaacactgacggggagaggagaggaagagaaggggcrgtgggtggagggcacctagcatggtgagttgggatgaggagaactaaatacttttctatatctggcttctcagagaagcacaagtttagagggtttaaagaaggtggacaaactggagagttctgtgttctcaacttcccaggagtggggctrtgtctttgaccacatctaggatgggaaaacttaaaacttgaggtctgacttttcttttttcctccccatctctttacctttctccttcccaagaattgaagaggagctgggcagcaaggctaagtttgccggcaggaacttcagaaacccyttggccaagtaagctgtgggcaggcaagsccttcggtcacctgttggctacacagacccctcccctsgtgtcagctcaggcagctcgaggcccccgaccaamacttgcaggggtccctgctagttagcgccccmccgccgtggagttcgtaccgcttccttagaacttctacagaagccaagctccctggagccctgttggcagctctagctttgcagtygtgtaattggcccaagtcattgtttttctcgcctcmctttccmccaagtgtctaragtcatgtgagcctcgtgtyatytccggggtggccmcaggctagatccccggtggttttgtgctcaaaataaaaagcctcagtgacccatgagaawactccgtgtgcctgtgtatgtctggaacaatctgggtctgtccttagtgttcaggggcccctggcgaaagggtgtcggcctttgagaaccaaggtttggtgtcgtaacagaaaaggatgaggatccattggggtcattttcctgggtccttgggaagggaaccagaggcaaaggcaagagaagagacatacacggtccctccaggatagtggggtcaaaacagagtctaagctggaaggcagagcgagactttgtttggacaccttgtttggaagaaacttcaaatgcaggcctatttgtagataatcttaaggatggtagctactaggttacacagccatattcagaccagaaggacttcagggtaaaggtgaccatcctgggaagagatgttctcttcccagggtctcttcctggggaaagcaggtgaaagaaggattaaatgggagctctgggcaggaaggcagaagggcatcaagaagacctcaggacccgatttaaatgaatgaattccactcctcggtttctcaagcttcaggtttcatgtgtccggtagctgccatttgtagctgctgcccactgcattggattaagcagatggaaaacttgaatgttgcagcaagtactgttctagggtaatgctgaacacggggtgtgaagaatacgtttattaaaaagtgagagatgaagcgagttgtagtggctcatgcctataatcccagcactttgggaggccagggcaggcggatcatctgaggtcagaagttcaagaccagcctggccaatatggcaaaaccccgcctgtactaaaaatacaaaaatgaggccgggtgcggtggctcatgcctctaatcccagcactttgggaggctgaggctggtggattacaaggtcaggagtttgagaccagcctggccaatatgttgaaaccccatctctactaaaaatacaaaaattagccaggcgtggtggcaggcacctgtagtcccagctactcaggaggctgaggcaggagaatcacttgaacccgggaggcggaggttgcagtgagccaagattgcgccactgcactccagcctgggtgacagcgcaagactccatctcgaaaaaaaataaaaaattagctgggcttggtggcatgcgcctgtaaccccagctgctcaggaggctgaggcatgagaatcgtttgaacccaggacgtggaggttgcagtgagccaagatcacaccactgcacttcaccctgggcaagagtgagactccgtctcaaaaaaaataaagagatgagaaactgtggttgccatctgcaccttaagaggtcccatattctattacttgatttttctccctaaaagaagtatcttgagttgcgcgttccaatgcacagtcagggagctggggagccctcttgtggacattcttgttcattgttaatgtcaggatttaacctgagaagcagaaccaataaggagaggtaaagttagccaagcatgtcggcgtagctatggtcccagctactcagcaggctgaggccagaggattgcttgagccccagaggtcaaggctgccataagccaaaatcgcaccactgcactccagtctgggtgacacagtgagagcctttctcaaaagtaataactggcctctgattgtggggcctggataagcacgtctgaaattcacagggctgccagtgggaagggacaatggccagcagcaggctggaactccaggggcttgggtgaagctgtcatttcacaggtgaaatttctgtcttgaaacctcggtttttaagaccacctcactagctgggtgcagtggcttgcacctgtaatctcagcactttaggaagctgaggtgggtggatcacctgaggtcaggagtttgtgaccagcctggcccagatggcgaaacccagtctctactaaaaataccaaaaaattagccgggagtggtggcgtgtgcctgtggtcatagctactcaggaggctgagacaggagaattgcttgaacccaggaggtgaaggttgcagtgagctgagatcacgccactgcactccagcctgggtgatggaggaagactctcaaaaaacaaaaaaacacctcgcttatggagttgggcagatctagagtaattaggataattccttaacgtctacttattagtagctttaattaccgctgcaaaatagcttcacagtaatacctagattagtatttgattgaataactggggaatcgtcaagttgatatatcaaagccatcatggttccccccttgtcagctctacacccatatgcatttccttaaactatacttaatctccagataatgacagtaacaaagtcattctcctgcctaacttaatgcaatcatcccacataaaaccccagatactaaccctttccaggttctcatgaccagtgtctgagaactgatcctggagggaagtaaatcatggaacttgggtctgacagttactggcatgttctacatcttgtttgtctcaactcgaaggcagcaagttagcatgagtatttttcagtttggtttaatgtcaacatttcctgactgtgaggtgaacctcatttatcactcttgaggttagatggcaaacacaggtagataggatcccttccagtccacaccaccctgaaaggaagctgctgggctggggttggagccatttccattgcaggctggactgagcggtttaccacattgaccctggagacacagaggccccaaataaggaaagccaactgtgactaaacttcctgacccagcagaaacaaagcacattcctgacattgactggcagatgtgagcccagcagaagtgcagacctctgggtcctttcctggggagcctgtctgaagcaggacaggcaacatgaataagtttcgagaaagccatcctcagtgaaacatttaagataggtctggggttagcctgggctgaaaaaaaactatatatatggtttggtttggttttttctgagacagcatctcactctgtcatccaggctggagtgcagtggcatgatcttggctcactgcaacctccacctcctggattcaagtgattcccgtgcctcagcctccggagtagctgggattactggcatgtaccaccgctcccagctaatttttgtaattttagtagagacagggtttcaccatgttggccaggctggtcttgaactcccgacctcaggtgacctgccctccttggtctcccaaagttctgggattacatgcgtgagccactgcacccagctgaaaaaaaaaaatagtaaaaaattagctgggcatggtgacatggtccctgtagtcccagctactcaggaggctgcggtggagagatcacttgagcccaggagttgtgagctatgatcactgcagcctgagcagcaaaccgagactctgtcttcaaaaaaaaaggtaagttgaaagtttaaagcaatgattccgaaacttggccacattagaatcacctgggaggcttctgaagcttctatatcaggactcaccccaggtcaattaattcagaacctcagggtggaacccaaagcttcagtattttttaaagctgactccagtgtgcagccagacttgagaaccgctggtgtaacaagtaaatggatttcataggtggtgatataaccaggcagggctggaacgccaagctttcaaggacacagtgggaggcagccaggctttccctgaaaagcacaaagtcctggtaattttcattttagtgaatgcagccgaggcaggaaggtggcctctgaatgccaccaacacagtccacggggctgtgctaggagcctgcttcttagcaatgtgttccatactagggcctgtagatgcagccacactagctgtcccctaagcagcaggttcccagcacctgctccccgatagcagccgcagtgcaggcagcagtgtcggagaacacagagccaggctgtgtgactctggattctggcttttcccccaacaactgtgtgtcagttcctccatccataaaagggggctaataacacaatagtacaaccactcaagggtgagcacacatagtactataaacgatcacaccaactcgggctcccacgcggaataaaatgattcagctggacaatcaggtgccgatacacttaggtaagaagaggtgcaggacatagggaaaggggaggaaggtgtttaggcctgtaatcccagcactttgggaggctgaggtgggtggatcacttgaggccaggaattccagaccagcctggccaacatggcgaaaccccgtctttactaaaaatataaaaattagatgggcgtggtggtgtgcacctgtaatcccagctacttaggaggctgaggcacgagaattactcgaacctgggaagtggaggttgcagtgagccgagattgtgccactgcactccagcccgggcgatacagtgagacccttactcaaaaaaaaaaatgtaaattgattctaggtcccaacacttctccttgggcttctgtgagtttcccattcccaattcccttttctatttagctaactttattgaggtatcattgacattcaataacagatgtccatttggagcgtatggtgtgtgtattagtctgttttcatactgctataaagaactgcccaagactgggtaacttataaaggaaagaagtttaattgactcacagttgagcatggctggggaggcctcaggaaacttataatcatgacagaaggcaaagggcacaggcaccttcttcacatggcggcaggaaggagaagtgccaagcaaagagggaagagcctcttataaaactgtcggatctcgctgggcgcggtggctcacgcctgtaattccagcactttgggaggccaaggcgggcagatcacctgagatcaggaattcaagaccagcctgaccaacatggtgaaaccccatctctactaaaaatacaaaaagttagccaggcgtggtggcacaggcgcctctaatcccagctactcgggtggctgaggcaggagaattgctttaaccagggaggcggaggttgctgtgagccgagatcgtgccattgcactccagcctgggtgacacagcaagactccatctcaaaaacaataataacaaataaaaataaaattaaaaccgtcagatctcatgagaactcactctcacaagaacagcatgggggaaaccggctccatgattcaattacctctatctggtctctcccttgacgtgtggggattatgggaattatggggattacaattcaagatgagatttgggtgtggacacaaagcctaaccgtatcagtgtgacatattttaacaaatacacctgggtaacgggaatatttccagcacttccaaaagttccttgggtcccttgccactcaatccccgccccatcccttccccaggcagcctactctgtgtgtgtgttttattttaattaattgccaatatctaaaaaaactgacttcatgtaaaatcgtcaatttctggggtttttttttttttttactgtgtcagccagactgagtgcattggtgtgatcaggactcactgcatcttccgcctcctgggctcaagcgatcctcccacctcagtcttttgagtagctgtgactacaggcacatgccaccatgcctggcttattttattttattttgttttatttttttgagacaagagtcttgctcatgtcacccaggctggagtgcaatggcacgatcttgactcactgcaacctccacctcccaggttgaagtgattctcctgcctcagcctcctgagtacctgggattacaggtgcctgccatcatacccggctaatttttgtatttttagtagagacagggtttcgccatgttggccaggcttgtctcaaactcctgacctcgtgatccgcccgcctcggcctcccaaagtgctgggattacaggcatgagccatcttgcccagccgatgcctggctaat

SEQ ID NO: 95054 - DNA, 19651 bp, Homo sapiens
cgctggggctgctaatccggccacgggctatttttgcggcgcgccgggctaggaatccggggctgggccgcctccgcgggcgactcgggaaactccaggaagaaaagcccggccgccccggsggggcctcgccgcgacccctccccggccccggccccggccccgacacgaccccggccgctctgagcagctccggccccgggtgctgaggactcgccccgcgctccgcggacgcagccccggaacccgcccgcccccggagccctgcgctcccggccgcgctcactcactgccgccgccgggggtctctggggggtcctgagggcgccggggaggaggggctgccgccgctggccgggagggcgcccgcgccgagtccccgcccgcccgccggtccggcccgcccgggaatgccctggagcgaggggcgtgcgcgccgggggcgggcccggccggagcggggcggtcgcgctgactcagagctcaggaatgcgcgccgcccgcctgcccggcccaagtcacctcctcccggaaggccgccggggtccgccygcggggacacctggggctggggtctccagcgcctcggcccgacggaggacctggtgggagcggacggcagtgtcagcgctgggcggctccgcctctccctggctccagattgaggcttgagctgtcctgccctgatttgtgctgagaagagggtgaggagggagagcaggcacggggtaaagggcggaggatgggtgtgtatccctggctcccctaaacccgacctcctccagaggcccacgctgacaagtcctgtatcccacactcacccaatcccactaagcactcacattccctcacacacattcatgtgcaccgatcactcacaatcatacacacacgtccccacatccttccacttcatgcgttcattcgcctgcacatgcacgtgctcacatgcacccacctactcatgtacatctttcatgggtacatacacgtgcacacacacacgtgtacacaccgatgcacacactcagttcaggaccacagtcattacccctccccctgccctgtgcccctacccccagaagccccgctccaccagcaggcactcaggccaggctgcaccggccccacccgaagccactcagcagaggcagcgcagtgtctggtgtccactctgggctcttctcactgtctcagagctcagcggccaccccggggtgggctcatatccctgcacaatctgggctggactcaaaatggcactctgctttccgctggggctgctggtgagagtttcccagcatttctctcctgacactgggtgggctgaccctcccagggtgggggacaggggtgccaacagcagagtacgggcagggctgtccaggagctctgagtggtgggtggccaaggcttcctctggatagagggtgcagggatcccttcgtcccatgggtccctaaggacccctctacagggtgcccccccatgcctcggacaaatgtgtcttcaggccctgtgctggtcacaaggtgctgctgcttcagtgccatcctctgggtctgggtggcaccagccctctccaaactgagctgttgcacttgagggcccgacgcagacaatggcctgctccttggctagacagaaaaggggagaatttgaacttaaggtgctggtacacttaccggtagatcccagagcctgggcaagattcccctgcccatatccttgtccatgccacgggatagggcggtgcctgcacataatgggtgctctctgaacacaagcaatatcaacacaattctcatgtagaaggagacaatggaagctttggagggggtggagggtaactccaccaggggatgactgccagtgcatcacggacaccgggtgagagggagcctgccccrgtgccaacactcagtgctccgatagcctgcacgtgccacccctcccatgccaggctcacagccagagacaggacagtctccatgcttagcattattgaccctgccagggataagcaagccctatcgggcctggatgcccagactaggctggcagggccagaagtggtgtcctctctggaaagctggggactgggcttgcctccaaagcatgccacagctgggcatctggtgtcagcaggtctcctcctgcagtggactctgtcagaccccacctagacccgctccaagacccagacactcatcgccagctgccaggagcaccagtcacagccggctcagagctgaaaccccccgcacccaggagtcaccttcagtggggagcatgccccagtctgcctctgcaggcaaatccccagctcagagcctgtgtccaggaatccccaggctctcagcccaccctggcctcctgagtgaggtcatcagaaggatgatcagaggggggtcgatacacgtgtgctcagtgtcaggcctctgagcccaagcctgcacgtatamatccagatgaagcaagtgaagaatcacaaaagaagtgaaaatggccggttcctgccttaactgatgacattaccttgtgaaattccttctcctggctcagaagctcccccactgagcaccttgtgacccccactcctccccgccacagaacaaccccctttgactgtaattttccactgcccgcccaaaccctataaaacggtcccaccccatctcccttccctgactctcttttcttcggactcagcccgcctgcacccaggtgaaataaacagccttgttgctcacacaaagcctgcttggtggtctcttcacacggacgcgcacgaaactcaggattgtacccagtccacatagacaagtgtgtgcacatatgtgtgctctgcctcctgcctgccctactactctctgtcctggtggaggagccccctatacggaaacccagctcccggcccctctcttcccgcgtcatgcaccctggagaaatggaaatcagctgcagttgcccagcactcccggggctggtgggcaggcgtctgagaatgggttagggttagggtctagaccaaacccagggtttgtggccctcacaccaggacacgagggaatgggagccctgaccagtaagaggagtgttcccaacaggtaccccagaatcctctgctaccccagaatcctcagctcagcttctaggccacaagtaatcacccaaggggtcagaccctgggctttggggagtccctggaaggatcagaagaaaccgcctggggagcagggctccagggatgggcccatgaccagctcctggctatttggggaagaggcagaagggggccaggccagccagtgkcctgaagtcataggytatttctgaggcagctgccccctccccatatcccagggtttggcaaggggttcccataagcacctgggcccagggcctggcagcacagccccaggcagggaggatgtagctcacacacacccaacctcggcctgcccagtggctgccttctctgcccaaggaagctttggccctccagggctcatcagacacagacggccgcagagaccagtcaagaggccagcagccaccctgctgggaagctgccagctcaaagctgtgtagaggagtccatgggctctgacctgacacccacctcaacagctgtcagcacccccctccatcagagagaagacggagccagtgtgctgggcaccctggggtcataaggctgatactagaaccctggcccctgtagccaatacagccacatctctcaaagacttgtttataaaggctccagcgactgatggccacacctcctacagctggaggcagctccagcccctccacagcctgtggcctattgtggaggtcgggggtcagggctgctcaccccagcaccaatactagccttcactcctttcaaagcctcaagggtgttctcatctccatcttccactgatatccttgcctcctccaacaagcctgttccagcccagcagtgggacaaactggggacagaggaagccccaggccccctcctctcacctggcaccactttctcttgtcctggaccagcccgccagcccactctgcaggccacagttggaactctcatcccaccgcttccagcctgtggtgggagcatgagaccacaaaccaggaagtggggggggggagtgcccagagattgcgcaacccccagcactcagtccagaacatctggagaagttggttgctggcgccccggtgccggcctctccacctcctggggcaggggccaatctgctctccaagtgattctctttcctcataagaaaggtggggataaaaacacccctctgggagcctctggactccccgtgagttctgcaaggaccatgtatcacttgtaacatcagaataaatataagtacaaagtaacacccatcctctccctgcccatcaagaggacaaaggctcaactggggcctcagtttccctactagactgagggggagcactcggggggatggggggctgttcccacaggaaggagagactcattgtttgggaggcatggctgcagataagcagggagggtgtggaatcacatccagggctgctttataaacacggattgatgacacattatgcccccaccccgggaagcggcacacagtgctacaaacagctggtggcttccagccggctgatggcccctccctccccaggaagtcctggctggggcccatgggggtgggacggctggtcagaggaggagaggcagttggagaccagggtcctgccctgttagcctttctgtaggaccaggtgtcacactcatctgagggctccagacacatggcctgtgcgtctgtcctgcccagcgtctcccacctgacgcggccaggtgcccagttgctcttcaaggccttttcaggtgctcctttccaggaccagggtcacagaagtcaaagctcaggaaaagcccctcgagggtttttgtgcggcagaggtgggttgtggggtgggattgtgcctgccatagtggaggggccctgcagacccagataaaccttcaagtggccagaagcgggggatggctctgctgggtgctggggctgccatgggccgtgggagccagcagtgtgcccagctccctcagggcccgtcccctaggcccttccgtccactgggccaagcaccgtccctgcccctccctaggggcatggatctgacttgagaggttgtgagagcttacaggcgctgggccgtcggggaggcctcagaagcgtaggacggctgcgcactgccgggccgtgttcagccctggtctggcctcggcctctagaggaggctgcctgcgctccagcaggcccaacccagaacgtgggcgagctcccttcagcatccctgggcggaaagagggatgggggctctgctgcagaggcagaatccgcgccgctccctccttccttcccccgaccagcctgtgacaaccccggccaggggcgggggcctccgcacaagcctggcgtccacttcctggataaggactccccggcccactccggaccagggctggggcggcctcccaggcgctcactccgctggcaccccaccggaaaacacgtctgcggcccgccccctcccccaaagcacgaccactccgcccgggcccctcgaggatccactcaggttcacgacgggcccgtcctctcggtggtctgaccaccggctggtggagtgggctctggggccgccaggcgaccagggcgcaggcgggggcggacagctcattgggaggggcgccggggcacagtgcggggctcgccccacccccaggtgccccttccccgctctcgcctcgcaggcaccgcatcgggcccgggaatcggtccggacctggcggtgggcgctgggaagaggatccacctccacgtggcccgccccgccccgggggcgcagccagttcccggcgctcactgccctccctctcccggcttccgtccccttctgcgcaggcgccgctccgcccggtcctaggggtgcttccgtggtcggcggtgctgggctccgcgccggggtccgatgtcccaacgaagtccccaggccacgagccagccgtgatgcaccagcagcgcatgcaggggccacaggtgagcagcgcagccatcaggccagccaccagcaggaacaagacagcagccacacacaccacaggcagcagcagcagagcagcaggccagcagggagcagggagtgccaggggacagggcgtagcgccacaccagcccacgagggttcggggcagagccagagcataggcacaagggccaagctcgggccgagagcagtggccgcaacgcccgggggctgaacccacggcgcgctggcagcgcgggccgagctgcggagacggtcacgtcagcgtccgttccaggccgactggcagtctccgttctacattaacgtcagcactcccgttaaaaataatgcatctctcccatgccaggaggacttaggtgctgctaaagaccagccctccgggtgctgccaggccggcgctcacccgccaccttcatcttcccttctcctttgccccaggacagccgaggatgtgtggttaggttccccctacccatggggaggccagaggtgggaggctggcggcctgctcggtctcagcagaccctcctagtccctcaggagaccttgcctttgccccacttgctcgttatccagcctgggccatgaagcagaggacagttagggaccctgagcacgcggtggtcaccccgytgctcayccctccctgtgtgtccgaccttggccctgctaagatcctgbgttttgaattctggcaagggttggatgaargggcagggctccagaaaccagctcagacgtttgcttgggacctgcatgatgagtgggaatcggagggcaccagccctgctgtcccaggctcaggcccccatctgctccccaggtcatgcagcctgggcccccatgccgtgcagctcgcacatatgtggggcagagcagccaccctgcccccagcagcagccgtccatygtcagacgtgatcatttcctgaggcctcgagtgtgtcagggtgtttgtgcctcrtaacaacccacaggatggtcacccccgctttgcagatgaagaaaccaaagcaggtggtcagatccagtccttgcacttcctgagcctgaccttaccacacagctgtctcctattcggatgcttatttattttttttcccattacagttttgccgacggatggggcaaaagaagcagcgaccagctagagcagggcagccacacagctcgtccgaygcagcccaggcacctgcagagcagccacacagctcgtcsgatgcagcccaggcaccttgccccagggagcgctgcttgggacygcccaccactccrggcccayaccgcagcatctatttctcaagcccaaagggccaccttacccgactggggttggagttyttcgaccrgccrgcagtccccctggcccgggcatttytgggacaggtaatgtgaacatagcagcgagggccctcctgaagtgcctgtcactgcagttgtccctgaacccctgtccgctgcctgctggattggccctcagttagtcctccttgtcctcatgcatttagcggctttgctcacactggtccctgcttagcttcatctcagttgcctgaggtcatctgggaagaatgtagagattgtcagtgytgcttgcccagggtggagcaggggtgccactgtctgcccccggctctgggcatctagggcaggagcacttgcaccgttagccttcctcaccggcaatccacctcagtttttccacacgtgggaactgtggctgtggccagtgtcgggctgccccttcccgctgtagtggctcacagtgcagtgctggcttcccagggcccctgcagcttaatgtaggtcaaggatctgggctctgccaatcagacttggagtaagaagcagggactgcccaggtcccatcctggtggggcctacggtgcagcctgtccccacgagcagatgctcacacagccgtggcatcttggctggatctgttgggagcgaggtggtggcggtggtcctcgatgccaaagccccaggcctgcctttctggttctccagaggctccaaggccttccctttgtcctttaatgagcctacttttaggttataatcaccaagaagaaccagaagagaaataccagtgccaggagttgggtgctaaaggagcagaccctagaatgtgggctcgacctcatggagaacagagaacattctgtccccatgcggatccttctaaaagcaccttaagtaatgggcatttgtggccaggtgtggtggctcatgccggtaatcccagcactttgggaggcggaggtgggtggatcacgaggtcaggagtttgagaccagcctgaccaacatggtgaaaccccatctctactaaaaatacaaaaattagstgggtgtgatgacgggcgcctctaatctcagctacttgggaggctgaggcaggagaatcacttgaacccgggaggcagaggttgcagagagctgagatcacgccattgcactccggcctgggcgacagggcgagactccgtctcaaaaataaaaaaaaaatacaatgggcatttgtgatacaacaaaacagcacgtgtggcaggtgcgtcgtaggaacagggcaagggcscagcatggcatcagggaccacaatacgtttgtctctattcagcatccttgtcaggccacagtcatgcccacttgagcccattggtggacaagatgatgtccagcagagaagagggtgtctcaccctgtgtcccttggatcagggacagccctctgccctctccataacctcctagtggatgcccttgcagacccctcagccaggcttgggtcatgyactcatccctaaaagggtcactgcagtgagttgccatgaaatcccaggccactctctgggctgaggagggtgtggtctcccccaggaggctctgccaacaaggaagaggggtgtgtgttggccatgggggtggggaggggtgagaggccccagtatctgccactggtggaaatggtatcagtgaaatcctgatcagaaatttgggatggaaaaggaaacaatgagaaaagggctgtgggaacctcctctccagagtggtagttgggcccccccagtgtgcccccatggaggcacaggagtgtgcagagtgaagcccctggaggggcattccctctaagctccagggaagatggaacaggrccaccctttctcccctggacatggcctggccaagcctggcctgttcacttctgtcctcatggctctggatgcctaaggatttcgggcttcccgcmcaggcactgaccccttcttcccaccaccctayctccrggaaggcctcctgaatgctccccrcrctgaccccttcttcccaccaccctatctccgggaaggcctcctgaatgctccccacactgaccccttcttcccaccaccctatctccgggaaggcctcctgaatgctccccacgctgaccccttcttcccaccaccctatctccrggaaggcctcctgaatgctcccggcgctgaccccttcttcccaccaccctayctccgggaagscctcctgaatrctcccccggcgagcatctaagctccagtgcccctcctccccagcccgtgatactgaccatggcctttggcaccacagggcttcgtgggctgaggtgaaggtagcctggctgtccagctgacctatctggcctaaaaacgagaggtgcaggggatgtggttggtccccagtgctctgctgttaactctggggctccgagcagtgacacaactgttggccgttaccaggaccatggtccaggctggggcaccgtggggcagctggrcctactgctcagaaagccggagggtgggagctgagtatgagggtcccttgtggccacctcagcagcccaggtttaggggacttcacgggctctgggattgcccaggtagctggtgtggggacatccttggggtcctgtgccttccgtgatgcctggcctcgtgctaaatgctgatggttttctcaagggcacttgggaaaggaggaatctggggaatggagggtcctgctgagaggacttgacctgcaaggtgaatccatgactgccggttcccagcccagcctggctgtggcctgaggtatcttcggcctgcggtctggttgtctagcagggctggaggagacaactggtgccctcaatagccacattcagcctcagcaggagcaagagaagaggcaggatggagacggggcaaggtccctggctagacctgggcggctgacacaccctgagctggggagatgaggtccaggctgggcactgttagggtgagtggacccccatcccttcccgccctgagcagaaactgactgcccacaggtcctagtccggcgacttcctaatggcacagaactccgaggcygcatcgtggagaccgaggcatacctggggccagaggatgaagccgcccactcaaggggtggccrgcagaccccccgcaaccgaggcatgttcatgaagccrgggaccctgtacgtgtacatcatttacggcatgtacttctgcatgaacatctccagccagggtgagcagtgctggggcacgggggsstggagggccggcagagccctgtccgctagcagccaggggaccactaggaggactgaggtggggccagcatttgagcgaggaggtgccacttccaggccaggccagggtttcgggagctctggctacgctgacggggcagggctggttaggttaaaggggtagaaagggccgggtggggccgggcgcggtggctcacgcctgtcatcccagcacttcgggaggccgaggcgggcggatcacctgaggtcaggagttcgacaccagcctggccaacacggtgaaactctgtctctaccaaaaatacaaaaattagctgggtgtggtagtgggcwcctgtaatcccagctactagggaggcggaggcaggagaatcgcttgaacccgggaggcggaggttgcagggagcsaagatcgcgccattgcactccagcctgggtgacagagcgagactccatctcaaaaaaaaaaaaaaaggaaaggaaaagaaagggttggttggagtggaggcagaaagaaggccgaggacacagtgtcgcctgcccttgacggaggcagcacatgaggatgagaagctgattggagaagaggatgactgcagtgctaagagcagcgtggtcaggttgccaaggatggagcagtgggcacagcagggggacttagggtcrgcggaggagtcggtgaggaaagggaggtttggcaggaagtgatcaaaggggtcatgtttttgtcaggatgtgggacttggatgtgttctgtgtgaaggagccagggcacggggctgtggtgatgagggyggccaggctttgactcatttgcaggcggctctgtgggggctcagtgagmcaacgaggggcgtgtgccctgcacccacagggatgtagagggtcctgctcctccctactgaggtgggtcagggtgggcagcaggcaccccacctggtgagctggaagcagcgtgggaatcacagaatggacgggaacttaaaggctttgcttggcctggattttatcttgaaatacttttgacagctggctggttgagggtatctgctcacaggaacgccgcatttgctggctttgtccactagtgctcgcccctggctgctgatgcggagcctcacgtggccgcagcccaagagtagggactggcttggccaccthcaggctaagcttcggrctcccaggtggctgggagrgccaggggtgcacaggtgcatcagagcaggtgctgccttgctggagggccagggctcttctggccagggtccaggtcatcattgtccccagccaggaatccaaggggcctttccaaacctgcagggcagagggaattcgggtatctgtgcttgagtgagcccctgggcccaggagccttcgcttgctgtctctgtttctcaaggggcctggcctggtgagggagggggctaggctggaggagggatcccaagggaggtgagggggcttygtcagcctcctcctgccctgcctgtgcagggtgttgcagtcagtccttccactgagtcattgcatgggctctcccaacatccggtgcacactggcagctgctctaagccaactcctagcccccaccacttgaccaacacaaacactgagtgggtgaggcagaaggggagcgctggggcctggctaggcyaaggcttcctgcttcctggctgaatgatcgcacccgaggactggctctctggagcttcctttgctggctttatagctgctgccagtcacaagaccaggggaagccaggtggaaaggaactgatacccagcatttgtcatgtgtttttaacagtctggctttgtgggggcggccacagtgggggaggccctgcctggtggtggaagccagaggtgcccacaggaggcacacctcatggtgcaggcttggaggatggcaaggtaggcagaggggtctggacacagtgaggtgcagccccctcccaccaggtcagacccaggagatggtgcaggtgcacagagcaggtccctggcccaggcaggaaggcagctgcaccctccctgcagcacaggatgtctggatgtgtactagggcagagaggacaggagcctagggaggctccacttccaaactgtccgtcccacaggggacggggcttgcgtcttgctgcgagcactggagcccctggaaggtctggagaccatgcgtcagcttcgcagcacyctccggaaaggcaccgccagccgtgtcctcaaggaccgcgagctytgcagtggcccctccaagctgtgccaggccctggccatcaacaagagctttgaccagagggacctggcacaggatgaagctgtatggctggagcgtggtcccctggagcccagtgagccggctgtagtggyagcagcccgggtgggcgtcggccatgcaggggagtgggcccggaaacccctccgcttctatgtccggggcagcccctgggtcagtgtggtcgacagagtggctgagcaggacacacagkcctgagcaaagggcctgcccagacaagattttttaattgtttaaaaaccgaataaatgttttatttctagaaaactgtgccttagccagagctcctctaggtgatcaacccatgtctggagctagctcttcctccaggacacragagctgggggcctgagtacgtagcgccaggcccggtgtggatgctggggagaatcatcagtgtgggagccgaaagcccccgagggtggggtcctgcacagtgggccatgcctccaccagcaagatgtgcacaggtgacagggcttctccagcctagcagggccagcccaggccctcgtgmcccagatggtcaggaccaggtcacagcttggctatgagcctgtttgyggcttctgtggaytgtggtgaggactgggccaggaaaggctcagggtagcctgggaggaagaagcgcatggcagacagaggtgctggggagggggccacagggcacttcacaaatggaaggctgtcagagagacagggacaggccacacaagtgtttctgcacattcttcagggtggccacagactggggggtccaaggagcaggtgtagggacagaaggagggtctgagaaacgcacagcccacatgggccttgaaggatgcggcctcacccagagacaggagtcctggcaggcccccctccagcgtggagatgcctacgcgtgcggcaaggactggagggaagcgtaggaacacagagggcagcagccccacagcggaaccaccaggggcaaggacagcggggctctgcaggcttcactgggccacggccagcccgcatccacccaatgccaggcctcagggccaagagggctcagcctcagcacggggggagccctggggtggggagacgcgagcgcccacctgcgcaccccagcagccttccgccctccgcctgggctcaggggagcagagcctggaagacggcaatgacagggtcctcgtgggtggtcaccaccagcacgctgcggaacttgtcaaacagcatgagcagctgggagcgccgcgtgttctcgttgtacataatctcctccaggtggtggcggccgcggaagtagtgaaggagcctggaagggatgggtgggygtgagcccaacctgacaccagcccccagaggcctctgctgaagagccactgctgggaatcagctctgagctgcccacaggcctgaacagagctggtggtgaaggccagggaggcagccaccacagccccccaacaagggtgggcaggcctcctggaccccatgcccaccacggtcccgctgaccaccaggtgggcggagtgggttcaggacggcagacggctgttcaaacccagaggtgcccaagcctgcgtcctgatgttgggaccagggttctgctggtggcttctttttcgtgctacagtgagtcccacgtagctctggagccaaatggtcactgcttttttttttcctttttttgagagacggagtctcactcagtcacccaggctagattgcagtggctcgatctcagctcactgcaacctcccgcctcccagattcaagcgattctcctgcgtcagcttcccaggtaagctgggactacaggagtgcgctaccacacctggctaatttctctcttttttagtagagacagggtttcattatatgttggccaggctggtctcgaactcctgaactcaggtgatccacccacctcagcctcccaaagtgctgagattataaccgtgagccactgtgcccagcctgcttttttttttttgagacggagtctcgctctgctgcccaggctggaggtgcagtggcgcgatctgggctcactgcacctcccgccttcccgccattctcctcctcccgccaagctccgcctcccgccttcaggccattctcctgcctcagcctccccagtagctgggactacaggcgcccgccaccacacccagctaattttttgtattttttagtagagacggggtttcaccatgttagccaggatgatctcgatctcctgacctcgtgatccacccacctcagcctcccaaagtgctgggattacaggcatgagccaccgcgcctgactttttttttttttttttttaatgtcaccatcatttggaaggtcactgctttagggtgctttctgcaactcaggctggcacagaggaggctaggatgcaggtgagacctggaccagctgctcagaagagttgcaagtggttctctcgagggccgagtgtggttcttaaccggaaactcagtccctgacaacccgaccactcccgggaaactatgcccctgcactgtcccccaagtcagggtggggctgacagagaccactgagccacatcacctttaacatgggggaccctggatgcccgcagggcttacagtcctgggcaaacccctgccaagtcccatgagggtgagaacttggcacttaaattagccgggcgtggtggcgggcgcctgtagtcccagctactcaggaggctgaggcaggagaatggcgtgaacccgggaagcggagcttgcagtgagccgagattgcgccactgcagtccgcagtccggcctgggtgacagagcgagactccgtctcaaaaaaaaaaaaaaaaaaagaacttggcactgcctctcaagggaaaaggaacatctaagaagtactggagagagaagagtccgaaaaataggcatgccaggcccatggcccggcgtcttggtgacaagccgaaccctcaggcctgggcagtggcacctgcccctacacacctgaatgcagagactccatctcgaacagggccccatctgttctcagtggatttggtggttctgttgcgtacgtccctatccactttctgccctgaccctgcaactggccccagtcccaacgggtcaacctacacccacctggcaaacatgcggaggtcctcagggttctgggctgcgggtacactgaggatggctgcgcgttcatgctccgacaggctggccagcaggttctccgtcatcctctggttcagtggcgagtccccgctgggaagtagctctgcgctggagttgtccatgctggggctggtgagggtcatgtcatcgctgctggctgtgggggacatgggtcagggtgaccaagtggaattccaggacacccaggggaacagcgagggcagagccagcagccagcctccaatgacacccctaactcctacaagggttagggtacatctgcctgcaagcattcgctgctgccccacctcctgggtgtgacacgcccctcatacggctgacttgggaaacgggtagcctcccctctgggggcaacctcaagggacctgaacagaggtgcgatgtgtgccccacaaacaccccaaggtgggcctgggcatcctgtccctcacccaggatggaggacaaagcaccctgggcaggtggggtcctcacatgaagcatgaagcctacagccagacctcagccaaggggggactttcaaagtcttccacccccttccttccccaagcctggggaccggggacctgggacctggcaacaggctgctgccctcaagccacactggccatgacagctcttctggggcgcagaggtgtcagctgtcctggtagtggtatgagatcctgctctgctcccaggctggggcagagattccagcactgatttgctgggctgggagctgcccctaattctagcaagcctgctgaagagcccggagacagagctgccacctcagagtcacggtggtgctaggagacaggagaggtgtctccacgggggacacgaggcacgtgcatgtgcgtgtgcagctgtgtggaggcccctcatcactcacagcaycrcccacgttgagcctcctggatgccacccccaagcgtctcccctgactaccacagcggtgccctgggggtcctacttggggagccaaagctgagggcgttgggcgtgctgaggctgcgaccgccgacccgggcagtgaaggggacgtcgtcctctcgcggacggggctcctcctcgctgggtgaggccatcaggcagacataggtgtgcagctggatgagaagccggcgctgcagcatccacaccaccatctggatgagctgggtctgcgggtggcagcaggtgaggctggtccccctccccactccaacttcctcctgggtgatcagggagccatggccctagacatggccacagcacgctccctgtgctgacgcacaggcagaaaggccctcttctcagaaagggagcccccagctgccagccagctctgcaaggcccgctcaccctcctgggaagggagaggggccaggggaacatctggatcacacctgcacaggctcccaccacacaccggggccacccagcatctggctgaggagcaggacctgagacgtggaggcccctgtgactgcttcgctgagcaaaccccccaccctgtgctgctgcagctgcccctctgcctcctctcttctttggcccactggccctggagttggacccagccagcaagtccacctccacacaagcccagacactgtttaaaaagaggctgtgggcaggtaccctgagagcagaaagtcctctccttggatctacctgaaagtccaccctgagcacaagagtggatccacaagaaagctgaggccagtgaccctgggcttgggggtggagcaccccacccccacccccaccgtgagaaggcacgtcctggccaggccctccaatgtctctgggttagcaggtggggctggcagtgaggagcagtgaggagccttgtgccaggtagagtccagtccccatgagaaagtactgcccagactcaggcgttgaacagtaaggagtgtgagacacatcagtgtcctcagatacacatctgtctactcatctctgggagggtcaacaaggagctgctggccagggtcacctcctgggagggggctggggaactggggatgggaatgggggatatatcccaggcaagtaagaagacttggtcaaaaggactgcaagatatccagacttcacatgaatttaagaaataaaacagacgcgggtggatcacttgagctcaggagttcgagaccagccttgccaacacagtgaaacctcatctctactaaagatacaaaaattagcckggtgtggtggcacacacctgtaatcccagctacttgggaggctgaggcaggagaatcacttgaacctgggaggcggaggttgcagtgagccaagatcacgccactgtacttcagcctggacaacaaagcaagtttctatatcaaaacaataaaaaaaaagctgggcgtagtggctcatgcctgtaatcccagcactttgagaggatgaggtgggtggatcacctgaggtcaggagttagagaccaccctggtcaacacggtgaaaccccgtctctactaaaaatacaaaaaattagccaggcgtggtggcgggcacctgtaaacccagctactcgggagggtgaggcaggagattgcttgaacccgggaggcaaaggttgcagtgagccgagatcatgccattgcactccagcctgacgtgcaatcaaaattaaataaaatcaataaaccaaaaataaaacagaggggcttcccagcactggagcccaggcagaacctggctgacctaggccccttgacaaggcctggagcaaccactcagtcatggcctggaaaagccactccgttatctagaccacaggaggcctctgagaagggagcaccagcagctcctccctaagcactgccccaagagcaggggtgcagagagtgccttttattcagctggtacaacctggctcagctcccagaaaccaagggctctgtgaaagaccgcactgagagytctgtcaggtttagcgtctaacggagctgaaaagccagaatcgttmkcattcgtaatttgagaacggaaagggtttaactttaaggactggttttgcctaatagatctggcacttactcagatacttctggagacaaagacttgagaacacccagctcgtctgtctccaacaccgtatcctatctggccctgctctgagtctctgcccagaactcagtggaggggaggatggcaaagccacctcagcacaaggctatgacacctgcagcccacaggggaagccactggccctgccacagatgcaggtgcaccagttcatcccacagacctgcaggaggcctcctatcccccagccactcctagctcccaacctgcctgcccgttgccctgatccaggcccactagggtcctctctaggctctcttgaatgaggagattctggggaccagtgaccccagaactcatacccacagaccctgtggccacctgaaccatggcagggagtgaagacagaagcagaactctcagagggtcaggcctggcccagtgagaacaaaactgcctttgcaccctcatctgtaggc

SEQ ID NO: 95055 - DNA, 27555 bp, Homo sapiens
tcggcgtcagatgcagctcgctgtcctggacttttttttttttttttggtgccctggactttgctgccaccctggaagtgcacgtggggaggagccgaaggatggggctcggggggcacgttgcagggcagaggcggcggggyggggggagcacccaggctccagtccctggagcctggggagccatggatggagaggagtggggagttagtcagaggcaggcttggcactgactgtggccccatctacaggtggccatggtgcccggccctgcctcatagcaggctgccatgtcgcgggaggcgggctcatgccgcgtgggcacaggggcgagggcgcggtctcggaagcccaagaagccacactacatcccgcggccctggggcaaaccctacaactacaaatgcttccagtgccccttcacctgcctggagaagtcacacctctacaaccacatgaagtacagcctctgcaaggactccctgtccctgctgctagactccccagactgggcgtgccgccgtggctccaccacgcctaggccccacgcacccaccccagaccgccctggggagtccgaccccggcaggcaaccccagggagcacggcccacaggtgctgcccccgcgcctgacctcgtggtcgccgacatccactccctgcactgtggcggaggccccaagtccagggccaaggggtccccagggccaccaccccctgtggctagggccacccggaagggtcccggccccagtgggctcctgcctgagtcgtggaagccggggatgggaggggacccaaggggcgtgggtgcgggggacatggcctcagcaggccctgagggcagcgtcccctgctatcccccgcctgccccaggggagttccctgaggcccacagcctccacctgtctctgctgggcgtcaactacccgctcagccccggcctcttctcctacttggggccctcactggccgctgcagcccatgtgcccttcctggcctcggccagccccctgctgcccccggccacggccttcccagccgtgcagccccctcagcgccccaccccggccccccgcctgtactacccgctgcttctggagcacactctggggctgccagcaggcaaagctgcccttgccaaggcccctgtctcccccaggagcccctctgggactccggctcctggcctgctgaaggtgccagttccagggctggggccctggccccgagtcacccccagggacccagggcaggagggggagctggagcgggcagcccagagtgaccccaggaggaggctgtccctgggaagcaggctggagcttccgaaggcatcccccagcctgacaaggttctgttcccggagcaggtgggcgtcttgggctcccggttcctggggtggacggaggggctgggcggctgggcatggcggttgggcggctgggcatggcggctggggtccgtcctgagctcagtcgctgggaaagtgggctccaggccacagaggggaactgagacccgagagccagcgcgggggtcctcggggtctccaggagagcctaggctctaggctggggccacagggcagaggccgtgaggggagaggggcaggggccgggggcgctgtgggggcagtgcggcctcctgaccagcttccaccccacagcctgcccaccggctcctctgtgatgctgtggcctgaggacggggatccaggcggccctgagacccccggccctgagggccccctccccctgcagccacggggcccagtgccaggaagcccggagcatgtgggcgaggacctgacccgrgccctcggtgactacgccagggtggagcagcgcctgggacagttggggcccgcggggggcctggccccgagacccctgcgggagcagctgggcaagatccgcctggagctgctcaccattcaccaggcgctggagcaggccgtgaggccgccagacgcacccctcgacctctctgtgaaacgtgcgcccgccaaggggccccaggctcttggagaggcgtgggggcggcccgagctgggtcccgtgttgaccgggggcacccccgagccacccggcatgctgggccctgcagcgccccaacccttctctggccacaccaccaagtgtgaggccgactccagcgtcccacccccagggctccccctcgcagccccagatgaccctgtcattcctggcagtggctggggcacctgtgttgcgacgaggagttcccagacccctgaggctgtctgtggcctgcagagcccccagggcgccgaggtctgacctgcagcgcctgaggtctgactgtctctgcctgcagcatgccggcccctctcctgcagcccctgcccctcacctgcctgggacctgccccgcctccgcatgcatgtggatagacccccacgggccgtggccaacgcttgtccctggggccacacagggacactggaggtcacagttatttattgatcacaattgtggacattaaaacagaaactgttcacacacgccgtctgtgcctccttcctttggggccctagtgtagccacctggacacccccctaaggaagtgtcctggcctgggaggcctgggtgggcagcagtcctgctgggcctctgtcttcagactcggccctctcctgtgggctgggccctccccgcggggctggggtctgggggtggggcgggacatcggcgacgggagctgagccaggagagccgtgtggactgggctgctcggcctgtgtcttggtgtgtcgggggtggagaggcgtgtggactgggctgctcggcctgtgtcttggtgtgtcgggggtggagaggcgtgtggactgggctgctcggcctgtgtcttggtgtgtcgggggtgggcacggacccctgaacatcctctagcctctgaatccagcaaggccgcgctcatatcagctctcctgcggttaaacggtggccccggggctctgtggctggaggctgctcacccagcgtgggctctgctggcccctgccagcccctgcagccgtgataggtatcagccttcacagctcactgcctccctcccagcagggcctggcttggccctcccacgggcaggggatgggcagacagggaggggcacccgggacccccacagcaaatcacttctctcctgggagagctggccacaccctccacgcccaccctggaatgggctctggagcccacatcgcccccccaggaggagaagcagttcctgcctgcgtccagccgggctggggccagtccaagcaggctggcagcggccccattaactaccagggagatagcatcagccccgaccctgcctcggggcagctagagctggggtgctgcctggccaggcgcggagtgctgtggggacaggtcccagccgggcccctctacccagaggcttcctggaggggctgcagggggctctgggcagccaggaactgttcccaagtcccgagtctgagggagactccctgtcctcagcccccgccccccatatgtccactgcaccccatatgtccactgcacctcagtttctcacccccactgagcagacaggtgagcatggccttgctgggggcaacagcacccgtctcccaggtgtggagacacgacctccttcgctgtcacccgtggggagcaggacaggcctcatggagggtgcctcagccagcaggtcacccgcctgtggtccagacccaaggaccctgcttgggggtggcagcctggggctgccttgccacttggagtaatgaacttgctggttgtggggggaccatgggggacccctggaggggggtgggctgcatggcatctggccgtgtaggggacgtgggaatagtgtccgggcagagggcgcagcctgcaacaaggcgcggaggcaggaacaccacagcatggggagtcctcaggggacctggtttttctttcatagaagcttcaggggccaaggccggagactgcactctccctcctccacccggcccagctgcgtccctgccagtggctcctcccacttcctccagttctagtttccaacaacagaggctgcagccacccagccccgaagcagggcccagcgagacagggcccaggtaagagacccctccccccggcctctctcggtggggcaggtggaggccctcggaataggctgcctcgcccctaaggggtcagaagtctccctgacctaggggctcgggtagaagggctgtgtgtgggtgaccgcccccccgccgtagaaaggggttccacaggcagatggatttgagaaatgttgcttatctgtctgaggcccatgagctcatctggggctcaggggaaaacccacagcgagctccacgggtcatgtgtctcccagactcaagtcccaggcacctagacactagggtggccgctgggcttggtggccaggtagaccctcaggaccaggaggacccggcctcataggaagaaactggaggagtgactttgccattcccacacacagtggggccttattctctctcttgcagccccaagcgtgacccagctgcagagaagctgagacggtgattcggactgactggactctggcctccaggtgtctgcacctcacactggacccacctggagactccacgggctcccggcagctccggctgcttgggtggatccgggtgcccgcaggggctgtgggagggccccggggcctgcactgctcccccgatggcctgctcttcctcacggccggggctgcaccctgtgtccacgtgctagatctggagggacgccccatctgcctcctgccctgccgcactccggggagcggggccttcgttccagaggacgtggctgtgacagcgtcagggcttgtggtggtcagcgatcccatccatggggctgtccatgcactccagcacacagcccgggaccccgggggccamtgggtgacagtgggcaccttcctgtctccccgagggctggctgtggatgccctcaaccgcctcctggtgacggactacttgcctggggctgtgcacagcttctcgttgggtcctgcttgggagcccctggccccagcctccatgctgggtctggagggcccctgctgggtgggcccagggcctgatgggggccttgctgtgagtgaggagtttggggatgtgaggctgtttggcagtgcccgccaacccctgggctccctggggggctggacggggcacactttcggctgcccagcgggcatctgctccaactcagagggcaatgttattgtggcagacgagcagaggcgccaggtgaccctgtttccccgggctgggccacccatctgcctggtgtcagaggggcttgggcagcccttgggagtggcctgtgcaccccagggccagctcctggtggctgatgccaaggacaactccatcaaggtgtaccagggcctcaaggagctggcctgacctgaggctgggttggagcagccctcctgtgcctgaggccagctcccaggcccttggatcaccgcgggaggaaccctcaggatgggtggagcctccaggctatgggcattgcctgcctgatgccagcaccacctgggctgggccctgggcttggctcgagttctcctgctggtgaggctccggatctcaggagcagccctgagtctgcttcccaggctgcccctgccaggcctgcagcctccccagccagggctgctctctgctgtccccattcagtgccctggcccctgcattcatgccccccacaccccctcaggccctgtgcctggactttggggctggcagctgaagccttgagatcctgggccagctgccggcacacagctaggcagactctcccaccaggtgcccctgcccaggcctcctaatcgggggcagacaggcagggagggtgtggctgggctgggctgggcggggcggcctggggcaggggtgtggcccctaaatgtccccaacctcagagggacctagagtcctgagcctccaktagcttctctgggcctggcagaggtaagggggaggcaaccctggagtgtctggaggcccatggctggctgaaccctggatgccttttcttccgcgtccccatgaatgaaagctgtctgggccttcattctgcagacagggacaaacagctccatgctgtttgtcctcccagtgcagccgtgctgggagggtctgggggagcttcctacaaggagagactcctgctgctttggaaaactgagaaaaaataggggtctaaccctctcctcccattttacaagtggggaaatgaggcgtgaaaggagaggcgtctgggttactccgtgggtctggggtccagggaagggcctgtatgggggagggagctgggaggggacggtgtctggctctacccctgtggggtggggaggtggggctcccctgtatcacaggacatcccccctgagaggtccctcatatgtctgggtcctgtgggtgggggactaactgcgcaatgtagttaggtgctcaataaacggagttgccgctgaggtctgggctggggtcttgttcctgggatcgggaggggctggacgcctgtgtgttctctcctgacgatcgctggcggcagcctctgggctggtcctaccagggctcaaaattcccggcaccactggccttggggatctgggggcggcccctctgcagacaacagagtgacgggggcgggaccgggctggggctggggccttcctggaatcccgcagggcctggggacctgttcacttggggaggctgggagccaggcggggtccgggttccacgaaggccaggtccagtcagtttctcaggtgaggaaaccgagctgacgcggggctggcggcccggaggcaggctcgggaggtccgggcctggggactgggcgggcacgctgcgccgcggaacgctcgggtcgggcgggcgggcgggcagcccgggcgcctttgggggccggaccgtcgcgcggcaacgcgcggagccggcggaagtggggctcgggtcccgcggcggggctggaggcagcgagcgccgtcgtctgcccgggcccgcccatcggggtccccaaccccatccggaccccgccgcccgagcgcgcggccccggaagcacccggtgagcagggggggtgggcggcgcgcggcgggacctcgggcagcgcccctgcggctccgggcctgggctgggggctccgcactcccgcccgcggcgccgctgctttctcctcccagaagtggggccgcccccgggcccgcgccgacctgggcccctgtggaccctgtgcaagggcggtcggcggcccgggcctggctgtgggcccttcgcagttgtcccggtttgcaggaaagggcaaaaaacggaatcgtaggctcttcccaaatgagaggggaaggccctgcttgaggaaggcaagcaagtttgtttgtttgtttgttttgagacggggtctcaccatgttgcccaggctgaactcgtgtttgtttttcattatttatttattttgagagggagtctcgctctgtcgcccaggctggagtgcaatggcgcgatctcgggtcactgcaaccgctgcctcccgggttccagcgattctcctgcctcagcctccccagtagctgggattacaggtgcccaccaccacgcccggctaatttctgtatttttagtagagacttggtttcacccccatcgaggctggtcttaagctcctgacctcaagtgatccgcycgcctcggcctcccaaagtgctgggattacaggcgtgagccaccgcgccaggttggtgtttatttttcaaacaaggcgctgggaaacgcaaattctccagagctcttgtggagcggtggcagggaggggcggctcagccagagatggccctggcccgtcctaactgggctggggtgcccccattccctcattcacggggaggagagggaagtcttagtcttactactttatatggtcgacctccctacctgcctggtctgggaatggcttctcaagagcactcgggctcattcttagcagaggaagctcttctggctagcctggcgcccgtgtgtgtgtgtgtgtgtgtgtgtgtgtgtgtgtgtgtgtgtgtgtgtgtgtgtgtgtgtgtgtgtctggctagcctgtgtgtgtgtgtctggctagcctgtgtgtgtgtgtgtctggctagcctgtgtgtgtgtgtgtctggctagcctgtgtgtgtgtgtgtctgtctggctagcctggtgcccgtgtgtgtgtgtatgtgtgtgtgtgtgtgtctggctagcctggcgcccgtggctagcctggtgcccgtgtgtgtgtgtatgtatgtgtctggctagcctggctcccgtggctagcctggtgcctgtgtgtgtgtgtgtgtatgtgtctggctagcctggtgcccgtggctagcctggtgcccgtgtgtgtgtgtgggggggggggctagccttgtgtgtgtgtgtctggctagcctgtgtgtgtctggctagcgtgtgtgtgtgtgtctggctagcctgtgtgtgtgtgtgtggctagcctggcgcccgtgtgtgtgtgtgtgtgtgtgtgtctggctagcctggcacccgtggctagcctggtgcccgtgtgtgtgtgtgtgtgtctggctagcctggcacccgtggctagcctggcgcccgtgtgtgtgtgtgtgtgtgtctggctagcctgtgtgtgtctggttagcctgtgtgtgtgtgtgtgtgtctggctagcctgtgtgtgtgtgtgtggctagcctggcgcccgtgtgtgtgtgtgtgtctggctagcctggcaaccatggctagcctggtgcccgtgtgtgtgtgtgtgtctggctagcctgagacccgaggctagcctggtgcccgtgtgtgtgtgtctggctagcctgtgtgtgtctggttaacctgagtgtgtgtgtgtgtgtgtgtgtgtgtgtgtgtctggctagcctggcgcctgtgtgtgtgtgtgtctggctagcctggtgcccgtgtgtgtgtgtgtgtgtgtgtgtgtgtgtggctagcctggcgcccatgtgtgtgtgtgtgtgtgtgtgtttcctcagtctttaaagatgctcacgttgctttctcctgtcccatacctcctctgctatcgatcgcttctctttcatcttcctctggctgtgtgatcccagcagctgctagtgcaggcttctttgtgccgccgaccgtcccagaggctgaggtgggagtgtgatgggcgtttgccccacagtacgttgagttttctctcactactcgacagagaagagtagcttctgccctcccatctccttcggtagacacaaggcactttttttttttaaggtaaactttgtagatgaagcacaaagaatacacacaaagaaagcgcacagatcgtgagcacgtagctcggtgaatttacccaaagtgagcccaccgcagaaccagctccccctagaacatctgtttactgttagacccattgtgtttcttttccgacgatatctgtgggcagttttccttagtccctgtgaaagctcttccccagcagggcgtgatgggtccctgggctgagctggtgtgaaaggtgggctgtactgggtggtcccctatggtggtcacacagccagacacgctgggcccctygcaggcagaatcactttgtcccwctcacgatgtccttggtgcctcacgtcagctggcctccaggcatccacccgccgcctgccctctctgaccactgaggaaatgggcatttgrggagttctgcagcctgacccagaaggtcccttttcagctagaacccaccgccttgagtgactggatcctccagccccagtgcgggctgcctgcaggggaggagagcagctgcaccaggggcctcttaagccccaggcatttccgtgtgaggcctcttccagagcccctccaagcttcgggagaggacttacaggtcacaccaccccgacgtgtgcatcctgctctgttcccycgtccctraggatgtggtgggctctgagacctccaggcatcctggtctgttccctcatccctaagggcgtggtgggctctgagacctccaggcatcccactctgttccctcgtccctaagggcgtggtgggcactgggacctccaggcgtcccgctctgttccctcgtccctaaggatgtggtgggcactgggacctccaggcrtcccgctctgttccctcgtccctaaggatgtggtgggcactgcgacctccaggcgtcccgctctgttccctcgtccctaagggcgtggtgggcgctgggacctccagacccaggctcaggccaagctatgtccctccctcgagtgtggctccagcgtggggggtctctgctcagggtggccgctccactcttcgtgcaggcgagatggggctttctgtgtctgaggaaggcgagcggcccagccagccggccagtagtgcccccaccgctagggagtcctcctgccctgtggggccccgccagggaaggcatcagtggagraggagccccagctggctgcayggctccgcaggggcctgtgagaaagggggaggagaggcccagggcctgggaaccgcggtagctcaggtggcttcctactcaacagccaccttggaaggctggtgtccctcagcctgagagtgcaggatgcagttyctccacacctccgggacctgtaagcctctctctccccgtttctaggcacccatgtcgttggagaaatatatcctggagagaaaatgctccctgagggagccctgccctggggtggctgtggggatgtcagggagggccaggcactgccgggtgccaccgtgggcgggggtcagagtggaggccgaagccctgtgtgccctgagcaacgaggcaggtccttcctgcccccagggaggggcttgtgggaggcagggaccttctggggggctgcccgccgtgcgcacgaggtagtttccacarcccagcagcacatcattttacattttcatctttattcttgcttaatacgtgaatcatggtttgtcaaggtttcarttggcgtgaccttgctaatgagattgtacagttctcctcgtgctacacctttaagcacacctctctaatcaggtttcttaaaactaagaagcctggagttcggttcggccccacagccgcgtcaggtggtgccgaggaggccgtgccctgggccggcctggaaatgggagggcaggcctggtggctgcatgtgcgtcctgcctcgtgcgggtggggctgagctgggcctggggtggacttggggccagcactctggctgccccttggagaagcatggcccacgcgaggcggcagccaaggagccctacggcgtccaccaccgaacttgaagctgaggtgccccgacctggggccctgtggctgcacctgtcaggccgtctgtgcaacatcccgcagcccacggtgggggggcagcagcagctctgagccgagcctctcctcttctcttccagcctcccggcatggtgctcaaggccttcttccccacgtgctgcgtctcgrcggacagcgggctgctggtgggacggtgggtgccggagcagagcagcgccgtggtcctggcggtcctgcactttcccttcatccccatccaggtcaagcagctcctggcccaggtgcggcaggccagccaggtgggcgtggccgtgctgggcacctggtgccactgccggcaggagcccgaggagagcctgggccgcttcctggagagcctgggtgctgtcttcccccatgagccctggctgcggctgtgccgggagagaggcggcacgttctggagctgcgaggccacccaccggcaagcgcccactgcccccggtgcccctggtgaggaccaggtcatgctcatcttctatgaccagcgccaggtgttgctgtcacagctacacctrcccaccgtcctgcccgaccgccaggctggagccaccactgccagcacggggggcctggctgccgtcttcgacacggtagcacgcagtgaggtgctcttccgcagtgaccgctttgatgagggccccgtgcggctgagccactggcagtcggagggcgtggaggccagcatcctcgcggagctggccaggcgagcctcgggacccatttgyctgctgttggccagcctgctgtcgctggtctcagctgtcagtgcctgccggtaggtgtcccgggacaggcaggtggcaaagagtggggtcccatgagtgctggcccatccctttgtctgcagtgggcacagaggcccagatgcgctcttcctgggcccgggccccctcccactcctgcagcccgggctttggccccatcctgctctcccaaccctcgcctctcagagggtgtccctcacccctggggtagagccaggtctctgggcagcctcagggattgccaggggccctcccagaaggtgtagagggtgaacctcagtggcttaggtccctgaaagagaaatcagaaggtgagcacagacatgactactgctgcctgggggtgctcctgagggcacacaggcccgctggcctccctgtagccctgcctgtgcccccagcaggcctctggacactgcagcgctcatgggctgtgggggtgtcatccacttgctggccccgtgtgcctgggggagtggtctacaggccctgcttctctccacaatcacaggtgctgctggccaagggtcagttgaagcccaagggccctgaggggcacgggggtagccccgagctgtggctgagaacagagggcccccttccacaggggacctcatctgcctggcggaggygccycatggggagcagctaggggtcacctgcagttgccccctgccttagacccgggggtgcatactctggaagcctggggtgagaagctaggccagcccaggagacccygggcagctttctgggccctgtcggcggggcgaggccctgggcccgtgggagttgctgctggctggcaggcgcttcttggcaccggctctgggagcatgtggtgaccaggtggcccggggtcagcacctgcgaggaggccaggctccgtgttagtcacgtgcactgtgaggtgggcgcgttgagcgctgcctaccaccacctgggccaccgagggcccctcccacctgccccctgtcctgctgagctcaggagtgtggcctgggtgtttgtggtcccctgcacagtgggggacggtgggaggaggatctggagagggacacatcactcctctccactcccacgcagagtgttcaagctctggcccctgtccttcctcgggagcaaactctccacgtgcgaacagctccggcaccggctggagcacctcacgctaatcttcagtacacggaaggcggagaaccctgcycagctgatgaggtgtgggcctgccctggtctctgcagggctgggtgcgtgccctctggccccttctccatccccctctgcaccacgctgacccctccggccaggcaggcctcctcctgcggccccaggctgtgctggccaccctcatgccggccgggccggacctcccttccaggaaggccaacacggtggcctctgtgctgctggacgtggccctgggcctcatgctgctgtcctggctccacgggagaagccgcatcgggcatctggccgacgccctcgttcctgtggctgacgtgagtggactggggtggagcccggtgtcccgggtgggcgtggggacccctcctgggcagcagagccttcccgggccagagccaccgccccmcaaagccagttctaccttctccatgctctggagacacggccctcccctgaaccagaagcaggaactccaggggcgctggggcctgggcagggcaggcctcgcaggtacacccccctttccttctgaaggggctgtgtgcaggagccagccgggctgaggctctggggagcccgcctctccctgtgggcccagcgtcctggtatctcccttgtggtccctgagatcagcgttgccctcctggctctctggggccctctgcagagccagggtcatgaaacctttcctgtccagggaggcccatgtgcagcccagctgggacttcctgccctgcccctgtgctgattctgtaactcctgtgctgagagccagaggcacagcttgtctcccatctcccaccttccctgcatggtctgtgccccgtttccagccgggtgcagccccctcctctgcagatctagtgcatttccatgctgcctctgggccttcagcttctctgtcttcctccctcagcaccaaagccccgtctcttccattaggagcttgtcttcctgctgggggtggtacctgactctttggcccaccctcgggcctctgtggaggcctccttgaggcctgactgggtgggtcttgtgtgggctgcaggtgtgcactgggcctgcttgtggccaggccaggcctctgggggcagcatcaggcacgtctgtgtggctgtgggggtgcagggagctccagcccagaaggaaggaggggcggggctggggaaggggctcggcagctttgcctgtggtcgtccgcacctgccaccggcctactttgtcctagacctcccttttgcaaaagtgctcagaaatataaatatttaatttaaaaatgaaagtctcttcctgctgccaagctcttatcctttaaatattaaataagctctatttataaagaatgttcttttctcagccrggggtggtggctcaygcctgtaatcccagcactttgggaggccaaggcgggcggatcatgaggtcaggagatcgagaccatcctggctaacacagtgaaatcccgtctctactaaaaatacaaaaaattagccaggtatggtggtgggcacctgtagtcccagctaattgggaggctgaggcaagagaatggcgtgaacccgggaggcagagcttgcagtgagccgagatctcaccactgcactccagcctgggcgacaaaacaagactccgtctcagaaaaaaaaaaaaaaaaaagtgttcttttctccttcttgccagtcctgctgtggctgaggccttggcccaggcttggaaggggcctgcgcaatgggcaagtgggggccaaggtgtcactcactgtctccttagtggggaggctgaggctcccttggggtctgcccgctggggcacagcctctggatgctgagtttcttcctgggcggccaagaccctgcttccctgtttgctcttgggggtgcctgtgccctcaacttgacgccatcctccctctggggacctgtcctcctgcctggtcgctgtggccctgatgggcttggcactgtctcgctcacctgtggycatcccgggcagcccccagcctctgcgatggggtggggcctctggaggggactgtgtcagctgtgggcttccctgcagggctggagccgaatcagggtctgccaggcctcagtgcgtccacgtgtttggggccgagggctccagtgggtcctgtggccgaggtagtgagaggggaggaagatggtagaggtgggtgcaggcagggggccrcgcggatgccctgtgggcccggccatgtcacccaggcctgcagagagaggcctccagaccagcctcctcagaccccaatcccggagccatctgtgaaggggagcccgtgtgctgtccacgctaggacgcggtagaccctggaggagggaaggctggccaaggtgggagcccrtcacgaaagagcctggggaratgcaggtgctgagcctggctgcccccgccccagcgtggcccctgtgtccctgcagcacgtggccgaggagctccagcatctgctgcagtggctgatgggtgctcccgccgggctcaagatgaaccgtgcactggaccaggtgctgggccgcttcttcctctaccacatccacctgtggatcagtgagtgcagggcaggcgggggccccagggaccccagagcttgctgaagagggtagggacccagccagaccccgccccctgtgcccccaactctgctccccagcgtcctgtgtgtgtgaggcctgctgtgctcagctgagggctggggcctgggcacctcccgagggctgaccccaccctgccaggctacacgcacctcatgtcctgtgtgtgtgagggttgtgctgggccgagggctggggtctgagcgcctcctgagggcctaccccaccctgccaggctacatccacctcatgtcccccttcgtggagcacatcctttggcacgtgggcctctcggcctgcctgggcctgacggtggccctgtccctcctctcggacattatcgccctcctcaccttccacatctactgcttttacgtctatggagccaggtgggcgtgggcttccccctccccaccgccccctgggaggtgcagaggctccggctgggcgggcgttcgagtggggcgggggcggggcggggcggggcggggccgggcccgacagcactgcgtcctgtaggctgtactgcctgaagatccatggcctgtcctcactgtggcgtctgttccgggggaagaagtggaacgttctgcgccagcgcgtggactcctgttcctatgacctggaccaggtatggggcagggttcgtggctggaggggctgactgcctccggcctgtgcccgctgggccagcgcggtgcttgggcaccacaagggggcagcctgctcccgtcctgcagctgaggccgcgcacaggccctgggaatagataagtctgcggtgtgggctgcacgtggggctctgaagcagcgcagagcttccctgggccacagagaagagacagacacacagccccgaaggtggtgcaggcacaggccctagaggtgccccgggcccagagactagagatgccccgggcccggagactagaggtgccccgggcccggagactagaggtgccccgggcccggagactagaggtgccccgggcccggagactagaggtgccccgggcccggagacttgaggtgccccgggcccggagactagaggtgccccgggcccggagactagaggtgccccgggcccggagactagaggtgccccgggcccggagactagaggtgccccgggcccggagacttgaggtgccccgggcccggagactagaggtgccccgggcccggagactagaggtgccccgggcccggagacttgaggtgccccgggcccggagactagaggtgcccgggctcggagactagagttgcccgggcccgtctgctgctcacacttgccgcagccgctggatgctgccatgcagagcatgttcttggtgactgtgtggccacgcaccgtcttgggtggtctggcccccacctgtctccctgcgagtcccctagtccgtggggtgtgggtggacagccstcctgctactgggactgcttctgagcaggccatcccgagttccctcaggaagccgcaaggtccygactgcagctccgggatgggggagggcacagtgctgggccgtccctgggcgcggggtcctgctgatgcccggtgtgctggccsctccctacagctgttcatcgggactctgctcttcaccatcctgctcttcctcctgcctaccacagccctgtactacctggtgttcaccctggtgagctgagcacccacaggctgggcctggctgcagtgctctgtgtggcttctgccagcgctgcctgggagcagtcagctgtggggcgggctgtctcctgctgyaggccacgtgggtggcctttcaggaccctctgggcagkgagtgctgcgctctggagtgggcgaggccctatcctggccagtaagacaccctcactgccctggagcacgcagctgggtgcgtggtggaaggaccccacggcaggtggggtcacgcaagaggcctcccctggtgcctggcactggggcagacagtgggaggtgagcagaaccacctccagcacctgcttgattcccaggcctcgatcccctctgcatgtgaggctgtggggaggcacctctgacctggtgagagggccgrgtgctccgcctccagctttgctccagagcaaggcccaatggcagrctccgtgccctgctcagggtggggtccctgctctccccaggaccctgcagcctctgggcccccttcatcgtggcccaggatggggtsggactgctctgcccccaggcgcgtctggccgggccggtcctaaatgctcctctgccacagctccggctcctggtggtcgccgtgcagggcctgatccatctgctsgtggacctcatcaactccctgccgctgtactcactgggtcttcggctctgccggccctacaggctggcgggtaagtgctgygtattgggcagctggccctgggtaggtggaggggaaccacacctgtgggccctgcagaagcaaggacagcatgggccactgtgcctccagcctggaagccgtggtatgcatgcgcaagcgggcagggaggacagggcctcctagtcccagaggtctgcaggaccagctgcctccagggaggtggagagagactcagagactcacctgccgcgcaggttcagaaccctggagacctgaggccacaggcctttgttcttctgccttgggattttctgggcttgggagtctgaactgcaggccaggggccaagcgcggcaaagtcagaggcactaggagccagcagggcggccaccatccagtaagtgccccgtccgctgtgccggaaaaccccgtccactcaacagcacagcctgcgcccgtccctcactggggctcttccctgcttgccggacacctggcttctttcagtggagtctgcaggaggcttttttttttttgagacggagtctcactttgtcgcccaggctggagtgcaatggcgcaatctcggctcactgtaatctctgcctcctgggttcaagcgattctcctgcctcagcctcccgagtagctaggattacaggtgtgtgccaccacgcccagctaattttttgtattttagtagagatgggggtttcaccattttggccacgctggtctcgaactcctgacctcgtgatcctcccacctcagcctcccaaagtgctgggattacaggcacgagccaccgtgcccggcttttttttttttttttttttgagatggagtcttgctctttttgcccaggctggagtgcaatggtgtgatctcagctcactgcaaccttcgcctccctggttgaagcgattctcctgcctcagcctcccaagtagctgagattacaggcacacgccatcacacccggctaatttttgtatttttagtacgtatggggtttcaccatgttggccaggctggtcttgaactcctgacctcatgatccgcccacctcccaaaatgctgggattacaggcgtgagccaccgtgcctggctgcaggaggctttgatgcyggcctggcagccagctccaggagttgggcgacggagggggcrgggagagcttcgtgggtggccayggccagcagcacccgggtgcccctcagagaggaaggtacctscagcctctgctcatgtgwggggccagcccccacgcgtcccctcgycagccgcttgctatccttgcagctggcgtgaagttccgtgtcctccggcacgaggccrgcaggcccctccgcctcctgatgcaggtgaggccccttgtggccaggacgcccctacgctgctgcccctgttctgggacggtggggtcagctgggtgtagtgtctgggtggcaccacgccagcctgcgatgaggtacagggagggcccagtggagctgagggggaaggcccacgcgggaccccctcccccttacccccagggcctgaggacactggtgtggtcctgtggatggggcccattctgccctgtgtcggaggcgcccttggctggctggggctgccctgggccccacagggctcaagttctgggtggaacagaaccgactgagtgagtcctggggtggggtgtgcgtccctgtggcacggcccctcagagttgggcagccccgaggggagatgcagcttctgcctccccscagcgctcccttctggctgcaggctcacytgcctccytgggaactgggactggcttctcccacaggcragggaatgtctgagacagcactggccctgcctcacaactgcccgcccccaccctctctctgcagacggggttggagctcagaccaccccactgaccgctgcccttgtccttccagataaacccactgccctacagccgcgtggtgcacacctaccgcctccccagctgtggctgccaccccaagcactcctggggcgccctgtgccgcaagctgttccttggggagctcatctacccctggaggcagagaggggacaagcaggactgagggaactgctggctcgcctggcaccaccacacggccacagccagccatctgctctgccagggtggcaccagctcagctggcgcatgtccygtgctttgtggacgctgctgtgtgctcctgaacacggcaggccctgctatcacaccttgggcttggaggtcattgggagtgagcagatgtgggggtggccagccaggctggccgcactccatcactggcactgcctgccttgggacccgcttcccacctgctgcggtcaccatggtggcgagcacagcaaccccaggtgtccagagcactgccccatgcccaccctgyrtacccaggtccagagggtccgtccaccacagcagccccaggtggagggctggtctccctgggggctccccagtggctctgccctggctgtgggggtggagggaccttgccaggatgaacccyccagtcccaggcaccctctagctccctcagccgaacagcaccctgcatctgggggattgaagcagtcgctgacccccgtccccagcgggcccgggccctcactccctgaaccacacggggtttatttgcggatgttccctggagaggtcgctttgtgaagaaaccatcagcaggctgtgagcatcgccaggctgctgtgggggcgggagcagcctcagtgtcaagggccygcccactgacccagccgtacctattcgtccacggtgccccgtagcagcaggtcctgcrgccaaatctgtctcccttcatgggcctcccagggaaggaggaagccctgctgtgcagacacctctgtggccccccaggrgtgtgagyggcctggggagggggccgtggcactgaggccgaaagtgcctgccagacggcacggtctgggtgcgggtgttccctgtgagcccgagtccgcttcaggaggggagcctgcaggtgccggctggtgaggggatgacgcgctgtgggtgggaggaggcagcgcccatytcagcagcaccaggactgcctgggactccctggcaacccagcaccggggaagccgtcagctgctgtgacaataaaacctgccccgtgtctggagcgcaggctcggtcccgggtccatgtgcagcgcgggtccagggaagctctggggggggggtgtgtggacgctactcgagggacttgggctgcctcacgtgggtctgccctgcagagtctacaccggcctcctgctggaggccctgacgacggctgatgggacgggctcacaggccctgggcccttgaggactttggtgtaggcaggtgaacccgggccgcccaccctgggggccgcccaccctggggtcgtggccttgcctcgacatagatggtgcaggggtgtaggcctccaggggtggggcgagcagctcctgctctgaatctgtggactccatgtggggtgggcccctcgtgggtcctggcccagtacagcctgcgactgccacagctgctaagaatggtctctgtcgcctgcagtgctgggggcccagctggcgggccccacagcccgttcccagcccgaagtgtacaggcctccatccaacctggacttccaggcaaccagaggcactcagggcccaccaaccccctacctgtgtcccctgcctccccccagctgcccacctggcccaccacccctcccatctgtactctcccccactcaccctccagttgcctacctggcctaccctgctcctaccagctgcccacctggcctgccacccctcccacctgtgtcccctgtcccccaaagctgcccacctcgccccccaccctttccacctgtacccccaactccccctccagctgcccaccaagtccaccaacacccccaacctgtacctcccgctccccccagctgcccaccgggtccaccaacacccccaacctgtacctcccgctccccccagctgcccaccgggtccaccaacacccccaacctgtgcctcccgctccccccagctgcccaccgggtccaccaacacccccaacctgtgcctcccgctccccccagctgcccaccgggtccaccaacacccccaacctgtgcctcccgctccccccagctgcccaccgggtccaccaacacccccaacctgtgcctcccgctccccccagctgcccaccgggtccaccaacacccccaacctgtgcctcccgctccccccagctgcccaccgggtccaccaacacccccaacctgtgcctcccgctccccccagctgcccaccgggtccaccaacacccccaacctgtgcctcccgctccccccagctgcccaccgggtccaccaacacccccaacctgtacctcccactccccccagctgctcactgggctgccacgcctcctggggcttccaccaggtcaaggtcttgacacagctcagtccactgctctgtgatggccatgtcatgggtcgtgcctggcagcggtcaccccctctgctgggcactgggctgactgcctatcccgagggccagctaggtttggcgccagagctggccaatggaacaccgtcaccccagccactcgcagccaccaagaggtgccgcctgcacctgcaggctccgtctgtccttgctgcacagcccctgcctggagacagcctacacctgtggggtgcccctcatccctccaccagagctctggtcccccctgccttgccgacccagacagggcaatgggctggagcttttccaaggcctgcccaggaccatttatggaccctcagggcaccctcagaagcagacaccttccctttcagagttggggccgcccacagagaagggtctcaccagtacttcacagattcagacttacagaaatgctgtgagaataacacagatgcttccagcacccttcacctacatccccccacgaccacatgccatgtgtatgttttcacattttttctttttttttttttttgagagcgggtctctattttccaggctggagtgcagccttaaccttcctgggctcaggtgattctcccacctcagcctcctgactatctgggattacaggcacccaccaccacgcctggctcatttttgtacttttagtagagatggggtttcaccgtgttactcaggctggtctcaaactcttgggctcaagccatgtgcctgcgtcggcctcccaaagtggtgggattacaagtgtgagccaccgggcccagccagcacattctttatgtttttctgcaccatttgagtcagctgcccattttggctctggaattttcagcgtgcatttcctcagaacaaggcagccagtgcggtgctcaaacccggggcttttgcagggatgccgtccaagccaccgaccccattccagcgtgtcccacgtgtcatgggccagtctccaaagcctctgggggcttagggatggagcccgttactcaggagtgtccctggctgggtctgctggtgaccctcatgatgagatgccactcatgcttgtggcagcagcagagggcaccacccagggtggcacacagagcccacctgttcatcccagtgatgccaacgtgactacttggtcgaggtcttgtctgcaggattttccgctgcaaagctacattcccttgtcattaatttgtccacagaaatgggaccatgttgacgctccatccctcactgccctcatccactgcacgctgtgtccaccaaggtgattggctctgtccactcatgggatgtgagtgaggcctccccttggcagcaggccaggactgggggggtccctgagtagctgaaacttgtaggtgctccctgggcacagggcttcaggggccaaggcttgtctgccccactgggcaactgtccacccccttagcaggactttgaggacatcccggcggctgctgggctccccgggggcagggtggacaccccaaactgctccctttgtctcccaagcccctcacttggacagaggctccgcttagtgtcctggcccgtctctgccatggccattgagtgtggggtgtggcagaagggggctgtcagggtctccaccagacactgctcaggcctccgagatgggcccagaaataccctgactgctcaacaagtgggtgcccaggtggtggctcaccccaaacttctgggtggaggtctcttcccacactccactgtctttggctgccctgcccctggcctgagatctctcagctgcagggatggtgtcctgcccctgcccaggcctggcttggccatggtggaccccaggacaccctgcgtaagtgcacgcagctgcccctcggtccacaaggcctggatgccagaggatggcacccctctgtccatccctcccttcactgggcctgctgccccagagtccgtccctcccttcactgggcctgctgccccagagtccgtccctcccttcactgggcctgctgccctagacccatctgggttccctgggacacttttctgctcggaggctgggaggtcagagggcacagcagctttccaaggatctcaccctatggaaaggttcctgaacccaggaacccaggacagggctgtgtccacaggctgtggtgggcagctccagtgggagaaacctgacttcttcatcagccaggggatgaccctttcttgtcccaggaggtgggaactaggcagcagtggcccacggctgggtctggagagcgttttactttgtttttcttttttaaaaaagtttatttttgtgaagaccataagaacatttttaattgtttatttttgaggcacttttttttttttttttttcctgagacaagagtctcactctgtagcccaggctggagtgcagtggcacaatctcagctcactgcaacctccgtttcccgagtttaagcaattcttctgcctcagcctcctaagtagctgggattacaggcacgtaccaacatgcctggctcatttttgtattttcagtggagagggggttatcacgatgttggccaagctggtcctgacctcaggtgatccacccacctcagcctcccaaagtgctgggattacaggcatgacccaccgtgcccggcctcagaaagcgtttctgatttatgttctcaggaaaggaggagacggctgctcaccactatccaccccccgcttccaggcagtctcagaaaccgaggaggaaacatcacatctttggtgcttcccgtccctggagtgaggggcctcagggacttcacagccagggctcaagtctgggcacaatgacctctgagcagaagaggctctccctgacccgccaggttgtttccgggttaatgcctggggaacttggcaaggcgccatctctacaaaaaatacaaaaggtagccgggcatggtggcgcctgtagtcccagctactcgggaggctgaggctggaggatcgcttgtgccggggaggtagaggctgcagtgagccgagatcgcgctactgcactgcagcctgggcgacaaagggagaccctgtttcaaaaaagaaaaaactggtgcgtcgatgtggtcgccgcttagtcaggccatgtcttcagctctgggggacgggaggtcactggaggtgtggggctgcccgtcctggcgtccctctgtgtaagcagcacctgctcccggaggcacagccctggtcggggcccctctggaggagggttcttgccgggctctgctcctcgccggcggggcagacgtgacgggctccgcacccggtctggagagggctgcgctgggtcggcgctgacgttactgcttttacttacgactgtaacagcgctactgaacgcagagcacgtatcacaaagctcacccgttccgagtgagtaacttcaccgagagaggcaggaccatccccacgacggtaggaccttctcgtcaccccagaaagaaccacgtgcccactcaacccccgaccccacgccggggcccgcggacgcagccgcctcgctcgcccacgcacctgcggcagccgggcccggcagggacgagggctcggcggcgcccccgggaagagcgcggtccgggccctgggtccccgtccaggaggcgccgctgccgcagtgagcacgtcgggccgggtcttgagctcgcgccggccgcgctccccgcgtcccgagctgtggcggccgcgtccccgggcggaaggctcacgctcggtgacgccgcgctgtcccagaacctcagcgactttgcagactcactggtgacccaacggtgcgccccgccgccgccgggcggaagtcccgcccctgccccggagaggaagttccgcctcatcgagcgccgattggccgcaccgccttagagaggacgcgcccggggccaccccgccgctccctccgagggttctgcggaagcaggcggcacagcctgcgaggggctttcgtttcccggactcagccgcatcgcctcggctcgggcgcgcctgcatcctgccgcccgtccgcgcgttgaaggggcggatacaaacaacgtggacttccgagcccctgattggcgagcgtgtaggaaaggggcggggttagcagagccgtgatggacatgcaagcgacccaatggcgccggcgacggggcgggcgaggacaacggcgttgtgggccgggggcggggcggccggcggctctgggatttctctgggaggcagccgcagggaagggaatgatcttggtgaacttataatcgaaccaatggttccgggaaagcaggaggcgagtggccaatggcgacggcgatgaggcaggcgtccgctgtctccgcaacgccgtgtgggaaaggcgggggaggggcggtcatgacagacgtgcagacaggccaatggctgagggaaggagggcggcgggcgacctctggtgactacgggaaggcagggcggggtggtgaagaggcggtgcgaccggaggtctggcggcgccgtgtggaacgccgtgagggcggggaagtcgtgacggacgggcgggtgggccaatgggctcgggagggcgggcgaagggtggccaatggcggcggcgcggccgggggtggggcggcgcggcggccctggtggtgcgggaagcggcggggcggcggcgaggctgaggtgcgcccgggcgcggg

SEQ ID NO: 95056 - DNA, 14767 bp, Homo sapiens
gcgggtcgccagcagccagcacaggccgcaaacggcggtccgcagagcggaccaacggagccgaccctcgcaggcttggagccggacgcggcggggcagagcccccgaggctgcagctcgccggaacccgcgggagggcagccgggctgggcggagcgcacagcgccacggaccgaccgcgcaggctctgccggccacttccggtgtcgcgcggcggctcccggcaggaggcagagggcacaccgccagccccaggccaggctgcgagggccgcggacccgagccgggaaggaccttgggcggacgagccgcgcgtcccgcagccatggagcaggacgacccggtcgaggcgctgacggagctgcgcgagcggcggctgggcgcgctggagctgctgcaggcggcggccggctcgggcttggcagcctacgcggtgtgggcgctgctgctccagcccggcttccggcgcgtgccgctgcggctgcaggtgcggggcggggccaggccgggcaggggagctcggctgccgctcagggtctcaaggtctgggcgtggccggggtgagctccgccccgccgtgtggtagttcgggccgggctgcgggcggggcgggagcggccagtggactctcgccgccacccggtccaggtgccctacgtcggcgcgagcgcgcggcaggtggagcacgtgttgtcgctgctgcgaggacgccccggaaaaacggtggatctgggctctggcgacggcaggatcgtaagtgcctgcgtctgggtcttcgccgccccacaccgcccacctgctggcgggcgcccctgcccacatcctggttcccacactctcggtgcccacaggtgctggcggcccacaggtgcggcctccgcccggccgtgggctacgagctgaacccctggctggtggcgctggcgcggctgcacgcctggagggccggctgtgccggcagcgtctgctatcgccgcaaggatctctggaaggtaacctggggatccctggccacccgctgacagcccaaggtgcggctgacacctgcgagggctgggggccgggactcggaagctgcgatgacccggtgcccaccaggcctctccccggccggggcgacttctcttccggcaggtgagcctgagggactgccgcaacgtgtctgtgttcctggcccctagcgtggtaggtgcggggttgccagccccgctgggaagccccagccacaccccagggtgtttgctgctctgaggcctgggcctgcctggtgggtgctaggcttggggctaggggggtgagcgcggctgttttctaccggccccgcccccgccccctctactctgctgttctctccctcagctcccgctgctggaggacaagctgcggacagagctgcctgctggggcccgcgtggtgtctgggcgcttcccactccccacctggcagcctgtgaccgcggttggcgagggcctggaccgagtatgggcttatgatgttcctgagggtgggcaggctggggaggccgcctcctcgcggatacccatccaggctgcccccggacctagttctgcccccatcccggggggccttatttctcaggccagctgagtattagacacgataaagactctgtgggttctatcctgactcatgttttatggggggctgggtgggagggttctgtgctggctgaggagctctgctctgctctgctccttgggagacggcctagtggctgccggtccttggatgctggggcttggctggaggcacagcccccactttccaggggtcccctgcacctgccagcttcctcagcctcaggatttcgtgcttgtacctgctcagaggaaccatgcttaagtgacttgcccagctgtggacaggtctgcttttagcgcctgaggcagccatcatccttcattccaaccagaccagggccctggggtcacacccagctccctctgcccacctgcccaggtgctggtccacgtactcctgtagctcagaaagttgctcttcagccatcgtggcccggaccagcagctgtgcccgctcccgttccagctctgcctggcatggggatgtaagccatgagctggggcatggcgtgaggatgggcctgggccagcccttgcctcctacctgggtgctgcgggagaagtcccggagcttctggtggatctgggcccaggatgcagcgtccaggcccctgtgaggggagaggaaaggaggagtggttttgagagctggcatggtgacacagggacagacgtgaccgtgctgagtcaggttcccagagccgggaggggacacctgggagtgagtgagggaggcatgggccccccccgtgctcctgtggcgccccccccaggccttggagccatccgtgtatagggacagcccgggcccagggggtctgctggctgctgggggagggctaaaccacaaggccagcccagacagtgactccagcatcaacagggatgccacccccacacgggtgtgccctaaaccccaggaaatggtccttggggagccctgcccattgtacagctgggaacatggaggcccagaggcaagggctggcccggtcaccaggcgccctgctcccacccctcgcgtcctccaggtctcagcggaaacctccctcaggtgtgctctccctgatcctccgtgttcaaggccagctccacctgcagcagcccctcttctctttcctgtgattatcagtgtcgccgggacccacggagggaccccagggtggggatgtgccactgagtgcattgctgtgaccagaccctgtctggcgggggcttggtggagcaactgggggccccagggtgcaggcgttgtgctctctgctcatcccccacaggcctcccccacacccatgagggcactcactgtggctctgatgttcccccctgggaggctccaccgggtctcttttttggggatgagagcagtgccccaggcccgccgtgctacagaggtttgtggtggggacgtttcagttggctgaacaaggcaagcccctcagaggcccggggctgaggtctctgttgagcccaggatgaggcctggggccagtgtggggcagtgggtgggtggggggcacccgggcctggagcttctgggggtctctagcctcacctggtcctcccgatggctgaagtcagtgaccaggggcacgggcaatggttccaggtccaagctggctatgtcaaaaatagcttgggggttcccaggtgccctgtcagggtaggctagtgtctgtctggggccactcctgctgcacaccaagcctttgaggcacagaggcttagagacccacagatgcctgacacctcccatcccagcggggcccacctgtaggcaaccagtagctcttcatgcctgcggctcagatccaccagcctcttgtggtagctgcgggcagcccgggccagctgctgctcacggctgcggtgcgctgcccggatgtcctccagagtcgcctccaggaatgtccggagggccgtggtggctggcgcttggcctgcaccatctgcgtgctcctggaggcggcgggctgggtccgcatggggcccaccccccatcttttccaaccatccccccaccccagcaggctgagcagtgccggggccctggggtctccctgaagctatccagcacacccaggccaggcttgggctccctaggcctcagggtgctcctgcagggctcaccactgcctgccaggcgcagtgttgcagccgtaggacgtactcatccttcagtttcttgagctgcagctgcagccgggcattttcagcctctgcctgacggagctggccttggcagctgcacagcacctggggtggaagcagccctccacctgtgccctgagagtggaccccggctgagcttctggggcccccaccctccaggtctccaagcagtcagggcagagcctcaccacagcctgtgtggccagtcgctgcccggctgccctggcctcctctcgggctccctgcagctgccggcccagggttgccctgaagacacgggggtgaggctcagcaggcccacgatcaggggttctctctgctccaggatggggccccaggtgagatggccactcacacacgcgtcaccagtgcctgctgccgggcctcctgatgctccagcgcccacttcacttccccctgcagctgtggggcacacagggctggctggatgagaccctaggcttggggtctctggtgctgccctctcccctgagctaggtggctgcacactcacgccgctccccagcctgtgctgctcattctcggggttcatggtgttcttgggctgcacctgaatggaagggagggcagggaaagctaaggggtgggtgagccccagtttcactgaggcccctgctgaggcttccctctggcctttcccagccaggctctccatatgctcatggtaacctggaatctgtggtcatcagagtgtccaggcacctgggctttgtgtctgagctcttgggctgctgcccggggatgcctggggtcagactccactgggactgcacagccctggctggtgccatctcctcgcagctccagctccagtacccggctctccagccgaaggatctgtgggacaactggcatgagcaggtgcacctgcccgcgggccacctggggtaggtgaacattcacccggtgcacgctcaggggcgcgcagcactcagaggcaggctgagacccacagatgccatgtgcgtgtgcatgcccatgcagggcacgtgtcctgggcctgcaccccccgtcccccatgcactgaggctggttcacacggctgctcacctcactcttcagctggaagatttcagcctcatgctgctcatgtaggtggtgggttgtgatctgaatgtcgaccagctccttggagatctgtgggtggccaggtgagaggtggcgtctgtgggccctgctggcaccctccctcctcacgagcacgctggggccccacacccacctgcagctgctgctccttattgagcgctagatctggtgggacctctgcttccaagctggtggcccacactgcggtgcccccaggagctcctggcagccagtccttggctcgtagcacaacctggggaggtaccgccacccattccccaggtgggtcccaggctgggctgtggccccactcccatgcagtcaccagtcccgcctccctgcctggctgagctgtaaaagtccctctcctggctgaaattaggcccagggtgcaggaacctgcaccctcctggcctttgggggaacgggcagacttcaaccccatggcaggagcggcaagtcccagaggactcacattctccacccgccgagagggaggtccaggcctggggcctgtggtggctgcgtgctccataggctagggaaccctggccagctccgagcccggtgctgcctccacgcccggcttccccatggctgctgctgccactggcactgctaagtgcgttgccaaggcctctgttggtcccaggtgactcccagggcaccgcccacaggggccggccagaccggtggttgctgaggagggaggatagctcttcctctctccatgcctccgtttccccatctggggaatgcggcccagcgccccctgcacataccctgtgcagatggaaccaggtgcgtgaaagcgcccagcctgggcgcagcggacgagcacgcggaacggagcggcagcccgcccgcaggatgccctgagctacactcgctggacaccttctgtgtacctagcagtgctggctgagccccgggacgggggaagtatatctctgcacctctggcctgagaagaggggcgcagacgtccccatcaggggccggagaactcggaaacgactggctcagccggggcgtcgggagggcttcctggaggaggtgccagcgccgggcgcggcggggtcggagcgtgcgcgtggcgccccaccgggcacgcgcaccgccggcgggccttgtggtctcatcgcgcgcaggatccgggccgggcgggggcgggggcggggcgcgtccgcggaggggggcggttggcggctcccgagcccagcgccgcgctcagtccggaccccgtgaccggcggccgaggccccgcctccgtcagtctgtccttcgggycctcagcrcagccgtgccggtgaggcgggcggcgggggaacgcggctgtcccgggtcaggggtcttgcggcggcagggcggggggccgaggggcggggcctgggaggaaggcgtggcctttggggactggggctcggactgggggcggagccggggctggttggggaccggccgggttccgctcctgctggagcccggtgcgtggaattccacgcgagtgccggggagttcctggggagccgggcttctcttttggcccccagcgtgttgaccgagcccgcttcgcacagcccttcctagggtgtggagagcgggccccgccctgaaggggcaccgtgggctggggggcctgttttggagcaggcaccggtggccgagctccgtgaccatgaaggtcaaggtcatccccgtgctcgaggacaactacatgtacctggtcatcgaggagctcacgcgcgaggcggtggccgtggacgtggctgtgcccaagagggtgagggcaggccgcgggccgcagggacccggccgtgtcccccgagagcctccccgacccccctggtaggagcgagcccccacgtgctctgctctccggaagtcattggcggctggggttccttgtttatcttggggctccctgaagttacggcacctctggcctccgccctttcgctgctgcctggcggtccctgcacgcgctgggcgcagtcaccgcccgctgggtccccgctccccggcgctccccggggctctggccggcctggggcagtgagcgcggcggatcccgatatggagggagtgggccaccgggaccgtctgtgttaccgtcactcccgtccctttcagctgctggagatcgtgggccgggagggggtgtctctgaccgctgtgctgaccacccaccaycactggtgagcgccggcggggcgcggggaggcacgaggacgccgccttgtcccaacccgacctaacccggcccccgcccgcccgcccgcagggaccacgcgcggggaaacccggagctggcgcggcttcgtccsgggctggcggtgctgggcgcggacgagcgcatcttctcgctgacgcgcaggctggcgcacggcgaggagctgcgggtgagcgcgcgctcccgggaggggcggggagggcgccccgggtccacccgccctcacaggtccgcctgctcctccgccgcagttcggggccatccacgtgcgttgcctcctgacgcccggccacaccgccggccacatgagctacttcctgtgggaggacgattgcccggacccacccgccctgttctcgggtacccgcagcgcggagcgcgcccaccccgcctcccgccggccccgccccatctgctctgacccgccctcccccgccaggcgacgcgctgtcggtggccggctgcggctcgtgcctggagggcagcgcccagcagatgtaccagagcctggccgagctgggtaccctgccccccgagacggtgagcgggcctgggccctcccctcttctcccgtgggcacagcccccacgctccgcaccctcactgtgctaggggtgcagagtgaatgcccacctgagggcagaccgggcaggggaggccaggcccccggcgcaagcactttccccgcttcctggccgcgtgcgcgctcaccgagcgctcttcctccagaaggtgttctgcggccacgagcacacgcttagcaacctggagtttgcccagaaagtggagccctgcaacgaccacgtgagagccaagctgtcctgggctaaggcacggcccctttcccgccgcggcaagagggtggggggggagggaacaggcttcggggtggggggggctctcagacaaggcctaatggtgaccggggcctgtggtcactccagaagagggatgaggatgacgtgcccactgtgccgtcgactctgggcgaggagcgcctctacaaccccttcctgcgggtggcgtgagtatggctgttgtcccggggcctccaccgttacgtggacccttaggaaggcatctggggactgcgtgttgggctgagtgagcatctctggcttgggggaggctgctcattaagtgcctgcctgcccgcccacccctcggcgccatgctcccgcgtgggcagcgggccctgcgcctcactgcacccctccctgcagagaggagccggtgcgcaagttcacgggcaaggcggtccccgccgacgtcctggaggcgctatgcaaggagcgggcgcgcttcgaacaggcgggcgagccgcggcagccacaggcgcgggccctccttgcgctgcagtgggggctcctsagtgcagccccacacgactgagccacccagaccctcacagggctggggcctgcgtccctcctcgtgacctcggccagctggacccacatgagggccacctctggaaccttcttcgaggccctggccagccatctgcccagcctcggagggtgggcaacctggtgcttcccgggtggacacacaggaccactcagtggggcctgtgtgggcgccgagacctgggtgtctgggaagtggggcacacggggcctccsaactatgaataaagctttgaaaggccgttgtcagtgttggcagatgtgccaggagaggagctgttttcgtaggcgtgttttaggaggggtgcgtttattagacaaacgctgggagacaggcctggtggggacctggctgggggatgatgcagcccgcgatggctgctgcttcgtacttggcttgccccggaccacagcctcgtaacggtaacccctgctttccaggggcctggcacccccccctgccagggtccacacgcagggttgtggcgggaccacccctgcaggtccagctctgtctcccaccttttgcacagagcttcaagggaagcctccagaagtcaggggtgagaacccgtcttgctctgcctcaggcaaccccgggacaggctgaagcccctcacgcacttgggtgcccgaccagcagcagcaagggcagcacctgtgggcctcggcccagggccaacggaacaggctctgggacctcagggaaccttctgctgcctgggccaccccaccccacctgggcagagccagtgggaacccagaggcacccaactggaggtgacgaggcggctgcgggtcctggctagtcctagctcctactcgggtcccagcacaccctgcagctcactcagaattttgggggaagccctggggtcttggggcatgtggttctgctgtcacacatggacacggcctcctgggagtcctggtcctgcagcccctaccaccggatgcccaggccagtgctggccttctccacggcgtggtactgcgtatgcagcaagcgacctgcacactccgagtccgtgccctgcagccagtgtgtgtacagctcctgaaccccaggcgcgtcctcgggcgcctcagcccggaccatgccgtacagtctctccacgtgctggaggagctctctgctgggcctgtctggggcctggagctggcccccgccgttcaggcagcctatgggagagcagacgggacaggggtcacagcctgcgccccagccaagcttcctgaccaccagggagcagggaggtgaccgggccccctctgtgccccacttcctcccactcccagcctggtggatggtggcccacagctctgctcccagaaggggtcctcgtgtcctgtcccttgcaggagctacctgaggggcaggccatgacctccacgtagtggtaggggcagcgccctcgtttgagcctctgcaccaggttctggatgttgcggaagccgtacgccattgcgaagtgcagcagcacctggccctccttctccagtgtcacctcctggaagtctttgttcctggggggcacaggcggggtttgtctacatggcacacccaccaggctcctgcctgcctggaaggggaggcctgctgggcttcaggggatgaccgggtacctcccagggctctctccctctctcctgggcagagggaaggacaagaacggagagagagggtggaaggctcacttccttgagtccagcaggggacctcacctccagcctcgggctgtctgtgaaacaggcctccctccccagggatgtctgtgaggccctggccctccctcctgggatgtggtcgcgtgcctgcgccaggcacccatcacctttgcccatgctggcctctcgggctcagggtcaccatcccccacaatgggccgactgaggcctggagtgcttaggtgccttcacaccctgagcccgccaggagggccctgcctggccccagggtcccctccaaaccctgcaggctgccctccacccagcccacctctgtgggaggaccccaggggaggcagcagcccgaggaaggctgggggctgtgtggccgctctgcccagagatctggcccatcccactgacctcaggggtttgtaggtaacctcagccacatggattccaaagagctctcgggccgcgtgccggaacacgtgctccaggtagccccccgagccccctccccgatggctggtgggctcctctgcagaggcaccgctgcacctggcaaggagggaggggcctcagcacagctggggctgctgcctgccaacctcccgagcagggcctctgtccctcacacatgagcgtttgcatttccaggtgggagacaagtcacagacacagaggaacagctcctgtgtcaccagccatcacaggggcccagccacttcttgtttttttttttgagacggagtcttgctctgtcgcccaggctggagtgcagtggcgtgatcttggctcactgcaagctccgcctcctgggttcaagcaattctcatgcctcaacctcccaagtagctgggattacagggcctggcatggattaccaccatgtctggctaaattttgtatttttagtagagatgaggtttcaccatgttggccgagctggtctcgaactcctgacctcaggtgatctgcccaccttggcctcccaaagtgctggggtgacaggcgtgagctactgcgcctggctatccagccacttctgtggacgccaagatgggctgcggggaggcaagcccagagcagggggatgctatcctcagaggcagcgttagaagctaaaataacagttcttggtggcagacatacgtacaggctgtccagaggggctggttccaggtcggggagggagacgccctcttcctccagcaacctgaaaacttctcctgcaaagaagccacagcgcagacactctttagcggagatcccagcaacaaagtcagagaacatccaagccacctgcatccccagcagtctgcactttggccccagaaggccccaaatgtccaccctagcccgtggtggggaggccaggcccggtcactcctgaagcccctctggaggctgcctggtcctgcccagggaggtgtgccagcggccaggccactctgctcacccagtgtccatctgtccatcctcttaggcagtctgcttttcttttttttttgagacggagtctcactctgccgcccaggctggagtgcaatggtacgatctcggctcactacgacctctgccccccgggatcaagtgactctcctgcctcagcctcccgagtagctgggattacaggagcaccaccactactcccggctaattttcgtatttttagtagacatggggtttcatcatctcggccaggctggtcttgaactcctgacctcgtgatccacccacctctgcctcccaaagtgctgggattacaggcgtgagccaccatgcccggccacagtttgcttttctgcctcacatttgggagactgtggggctgctcgactcaggaatggggtgactcatgggagctgaagaggctgcattcgagaatctctgcccacctccaaagactcatttcagagccaacaaggaggtattactgagcgccacctggctgcaggtccccaagacaggccagctgcaaatgggcccacctggctccaaggggagagacgaaggtacgtgcacgcatgcgagcccccacactccagccagggcccccacaggcaggatcctgggcagtcgccacctgtgcccagggctcaggaatcagaccaggaggcttgagggctcagggccgcacggcgtgaccgcacctgttgtgaggacacagtccacatcccgtgtctggtgctcctggttgaaaaagtcgggtctggaggcttccagctttttgtcatagcagggcatcactgtgacgtggtagatcttgtcaggggtcaagtgctacaaggagaaacaaacacttgtctccccaatcccagcagtaaggtggctgagacgggacctggaactcagccatcctgcagccaggccggaccccgagggacagtgagcctcactccatttcccagcaagcctcctgccggctctgcggatgtgtccctggacaggacgggccctggctgtgacagaaaatgacactgacccattcccagtgtgcctgcgctccctaacagccaagtccagcggaggagaagtggccttcccacggctcgggccgtctcactgcacagcagccggggaaacggatgtcacgggggaaccaaccagctccagccccgggtgaaaatccgcgtgcagtcaggcaagaggtgccgcaggggacatgggcgctcgaggcccaggcaccaccggggccgccctcgccctctcccgccccctgctggctgagtgtcttcaggcttctatcccgctgggcctcaggtgggggtcgtgctgggcatcctcgtggacctggtggccggaggggtgggctccaggcccggactgcccagggcctcctgctccctcagcctcaggcctggctgcctctgggtgagcagtgagcacctctggatcagaacgaagccctctgctgcagaagaggaagggcctgaaccaggagggaacaagggtggaggtgtgctggggaaggccgcacagcacagcgaggactctgtttcctgcagcctcatggcaagaggccagcaaagtcacttctggccgctccccagcctgagtctggggctggcccaacgccgttacctgctgctgggcgaagaagtccttgaccagggagcccatgacctgctgcggggaccgggcggtgctgatgtgggggaggatgaagctgccgtgagtcttctcggcatagcagatccagcctgaggtgacagggggcacacggggctggcgggggcgcacggcggcccccgcacccacaggcagcagcacgacattctgggggcgggcccgctcatacaggagatcatgatgacattaaagagtgctcattcctgttctccccaccaccacgcggagctcggcgtgcaggcgacaccgcctagggacctgaggtgactgcgcgtggctcccacgggagggcagcctcttctccagaaaaggccatttgtgccaacatttccaacccgtcccgcaaaacctgcttgcgtctccaccccccatgcccccgccttgtcatttgtgtccatatcacctcacgtttcaactgcacttgaacttgactctcccaccacccgcaccatgagcacacctgggcaggcagaggccagcaggggcagcgcctgtctgcagtcggcctgtcctcggaatcgccgcacaaactctcgctggctctccaggaggctgaagtgccttgagaaggcggtgtcgaagacgaagtgcacccctggaaggtgaaggtgggtgcctggttaaccccatgcgggacgcccacacgagcacacgccggcgtgtggaccaccatggtgctgccagggcacgtgtgtcgcacctgcttgccgtgccaaagccccggccccaccgtggggacctcctaaagccacgttgcgccaaagccccagccccactgtggggacctcctaaagccacgttgcctcggcatcccctgtgaacccaggccttggtttcccaccccagaggcagccacccagcagctcagtcctccaccctcccagctcttcagcgtggctggtccagggaattgccacgtgcgctgctcccggtgaccctccctagggcacagctggacgcagcctgctggactggcccctcggaccctgactgtgcagacctaccatagtggccacccctcacacacagcaggactcctggaacacgccagccagctccaagcccagccattagaactgctcagtaaacctgcctgatcgtgccctggacccagcagaggcacccgcgtgtgggtccctctctctctgcctgacttgtcattcctccctcgcgtaacccgtggtcggaggactcgctgtgccccacttgcccgtcatcatcatctctaagtaaaaatctttgaacttgcttcctattctggtggggacgaaatccacaccttccatctggagaaccatgggctgccccaggccaggttttccctgggacaccaggtcaggctcccagtgccagagcactgctcaggcaccaactggatatgggtcagacaggagccatggggcacctgccagtgtcaccaggtttccagtgtgagggacc

SEQ ID NO: 95057 - DNA, 20120 bp, Homo sapiens
ttactggctttgatgcctttcacaagttgccacaggctgagggattgcagagcgagaaaggagaagccaaattgtctcagcctttaatttgttctaaatcagattctgattgcaactgttatggggacacagttgtagattatctgcctaggccttgtgacttggatgagacaatctctaaactttactgagcatgtgcttcttatgtatattgttgtggcctgaaaaacatgacctataaggcgaatgtttgaattcaaaatgtattgattgttactcgtgtttcccagtcttctaggagtaagaattggtcagataagtgccaatgatgagaatctctgaaaagctgagaaaataaactgtctgccttaaaagggaatttggtgatttttctgatccaactcccgctttgtgcaaataggtaaattcaggcctgtagaggagcggcattctccatgttccacagttctattgagttgttggtgatggtctgcagtgtgtgctggtgatgtgaggcatatttattctttcttggggagcagtaaggatctgagtcatagactgcagaatttccaggtgtgagggcatctggtttggaatggtgtgggtcactcaaattcctgtgtgtgggcaaggacacagtgctctctccccaacgtccttccggatccattaaagcaggagtaataggaacaccatctaggggagtgcacattatttctctcaccacctccccaccccagcctccaagaagcagagttcttcctggagcatgttggaggaggaaagcttggcataaacaagagacccttcaggaagtctgcgtgtcagggccagctgcctcagtgaaggctcaggtttagggccagagccagcttcaaccataggtgagtcccaaacttcatcatgtttggggaagatcagaaagttaagaacacgtgagaatgaaaattaaatgccaaaggacatttagtgatctctctagaatttgcttccatttccaaacacatacattatgaataattgagccttgagggtgaagcaactagcggatttgaaattgaaactcaagtttatggtctacatttacactattgtgaatctttggccaagtcgcctttcctttctgaacttacttttccattgcgaatttgagctgaagatgcccatgctacctctgtaactggctgattgtgagggctaaatgaaattatggatgtgaaagaggctcgtaaactataaattctgtataaacttaagtaatagtaacttaaaatggcagacttggagtagatcctatgcttcatgcttacaaaactagagtaagaaaaatcctggaggcctgaatggagatgccagatgccaagggagattttctaattcacggaaaatagtcaagtaaaaccaaagggtggacagagttctctaagttagacttgggtggtttcagaggctatggtttgaatctgaataaagaggtgtactgtccctgagaaagaatcaaacctatttcctttctaatcaaaggaactaaaaacaaaaaacttgatgttgactttcaggtaggattaagtcattaccagaaactaggacagggagtctgaaagccctcatttcaatttgtaaactgccactcactaactacgtgaccttgggcagaaaacttattctcataagaatacgacctcaaggaaaaattggagtctggttgagaaaactaggcagcaattgagacattgatttttcccacccaggtgtcccaccacgtttaagatcatgaactgcttgtaattataggatttttaaagtcaggaagtgacagaccttatagcttaatttaggcctggattggcttttcagccttaatctatggctcaggctacaaacattttcacctaaaatcttgataggtaggccgggcgtggtggctcacacctataatcccagcactctgggaggccgaggcaagtggatcacctgaagtcaggagtttgagaccagcctggccaacatagtgaaaccctgtctctactaaaaatacaaaaaattagccaggcatggtggtggacacctgtaattccagctactcaggaggctgaggcaagagaatctcttgaacccgggaggcagaggttgcagtgagccgagatcaagccattgcacttcagcttgggtaacaaaagcaaaactgtgtctcaaaaaaaaaaaaaaatcttgataggtaaaatttgataaaattgtatttcctgtctttcagtgggaattccttctcctgtcaaattacttatatgtatgtataatttgcgtaatgtatataatttggaccaggggaggtgggatctcaatgttctcagcaccattgacctccaaggtcaaaaatctaaatccaaggaggtgtgttttgaagaatggaaagactgtagctgtctgagagatgcacatagggagctactgggagtgaaaactagaaggaggttaagagcacatcaggagagcttcgaataccttgctggagattctggatttgatgctataataaactggttagcatcgctggctctttttagggggaaagatatcagataggtgtttagagtttccagtggcaatagggtaaaggaaaaactgtagaaaggaagagtctggaagagagaagacaagtaggagatgatttcagcattccagaaaagaggcaacagggatttgatatgtggctctggctgggaggcagctactatgtgagacaatcaggggatgatgacaagaagtccctccatgtggcctcctgctgagcatgagctccctgaacagagatcttgcctccagggaaactgaaacaatggaacaaggggcttgagaaggccatttgatctgaccattgaggcatagtttatgatgaaagtttctcttctgctctagaagttagttattgtgtgacaagcaaagataaagtggtgaggaaagtaaggaatttataatagcaagggaggagcagccatctctaaacacaggctttgggtaaatcagattttctatttgagcacctgtttgttcatctgttgaattaactctgggtgtttttcttgggctgggtccagtggtaagtttaaactaatctctttttttcccctaaaattagccctatgaagttcatattattctagcagttttacagatgagggccagaggcacagagagcagcttgcccaaagtcacataacttgggaaggaatgaggtttgatattttgatctccacagttctttgaactgtgatagaggggagacgggcaggcgagtcagcatctggggccaggaggtaccacaaagcaggaaacctgaagggcttggggtgttttgtggcagggtgaggcattgcatgggctcctccccttagattagagggctcttagattaaagggctctaagaagagatcagaaatctgagataaccaaaagcttctgttttccaagagagctcttgaatgcccagactccccgagactggtggaaaattaaacccagtgagacttcaagaattaaacctcacttagacttcagttacaaggaggtggaggcaggattttgtgtgaacctggaagaggcagggctggtggagggggctggttggaaacaaacttagaactggagaggaagaatttatcatttcctaaacatgaaagttcagcaaagctgggctggcagtgccaatcttatgggaggaggggagatgtgtgggaagagcagtgagggaaacaaccctgagccttttcactaatccacagatttttcagcatttctttatctcattagagcccattaagttcctgaattcactcctttcttgtagtttcaaagcattagaaacagccaacgcaccaacactttccagtctgtaatatctgttcctttgccactccttctctctaaaaggtaggaaaatgccagtggattggggacaaaaaaatttttttaattaatgtgagagaatccctgcacagcctaatgacgacaaatgccataaatttaagagtataattcaaccctttgaaactcaggtccaaatagggggaaaaaatgagtaactaattttttttaattttaaagagctaataatctaatgaggaatatataaattgttcaagaatacaaataatatgcatattaaacatattaaatacacttatgatagtgaggggaaggaaagtggagtttgggaagcaaaggatataaataataaataaaacaagagaggggacttgcaaggacaaatgattgtgaacttaggagcatgattaattaaatattagtgctaggggtccaaaaattaaaactgtatggtagacaaaagggaagaatgtcttggtccatctcctgtgaagtcagcagtgattaactatgttatttatgtgagaaacccagaaattcccggggctccaggcctgcattcatcaattcatatagtctaaaattttagccaagactactgagaggtcattggaaactgttgctgaatgaatggggcttgtataccagttgaaaggcaaagcaactttatttttagagggacttgtgtctcatttccatgattcttcttgggctctgggcttccaggctattaagagtagtacttgccactatctattcacaatagcaaagacatggaatcaacctaaatgcccaccaataatagactagataaaatatggtacatatgcaccatggaatactatgcagtcataaaaaaaaacaagatcatgtcctttgcagggacatggatggagctagagggcattatccttagcaaactaatgaaggaacagaaaaccaaataccacatgttctcacttataagtggaggataaatgatgagagcacctggacacatagaggggaacaacacacactggggcctattagagggtggagggtggaaggagggaggggatcaggaaaaataactactgggcactaggcttaatacctgggtgatgaaataatttgtagaacaaacccctatgacacaagtttacctatataacacacctgcacatgtacccctgaacttaaaataaaagttaaaaaaaatagaaaaaaaagaggaatgcttgcaatttttgtaaatatattattttttaaaagttatttacttttttaaagcactgcattcagaatgtcagattattgtccagaaagttggcaacattagtattcgccattcccccacccatcgtgtaagagactcctataccagacggagcccaggctgggaatcaccattccttttaacttttgccaatctgataagtgtggaatgtgtcttttcgtatttatacttctttgattattggtgagagagaacactgtatcctaccacagatgccatttgattttctgcctcatgcccatttttttctgttggtctggtagttttttcttactgatatataagcacttgaaatcatttctaaggatttgtattaatttgctgtccttcgcatacattgtgactatttcccctcctcgagccagtttcctcctaactctttttgagagatcctagatggccggcccattctttgatttatttttaagctcaaataatattagaaataacatttgaaatgtctagaccaacccttttgcagtgactttactgggaggttgcatcagcatctagacacttccatacattgaggaaaaacagacagccgtgtttaaggacctcagagggcttgctatcacccatttataattttcccagaacttatgagtcccaggtcctcattgcagtggtaagcgctgagtgctcacgggggtgtgtgtgggacaggatgtggtttgagttctgtgatcctcaccccgacctcatgcgtcgggaatccttgcagccctgtgactggcctgtgggggcttgggctaagtccctgccaagataccaaaagactgcagaggtgggcaaagacctcaggcccccagactagcaatctacaaacactagtcatgactacacagttaagggtcgtccatctgcttccccttctcctagcctgctttgtgcaaacaagtcccaagcaggagaagatgaaggtgagtgagcttcagagagggcatggtagttactcttctgtcctacttctagaccctgccctccactccttcttgtaagactccaactcctgctttcttcttctttgccagttcccctaaaccttgcttttttttctccttgaatcttcttcattcctatggatgggtattccttgcgttgaatatgactagggaagaaagggtctccatatgactagggaagaaagggtctccataccttcttcaggtggaggtcccctggagacctctctggccacatcagtctctgcttcagagctgggtctgaggctgggacagcgatgggctttagagtaggtggggactggrgtttggaggagaagctgagtggacttgtctcagacacagctcagcaacaaccccttgaagaggaggaaaaaacgaatgtggaagttttaaggatggataaartcagagagttatcagagaaacataaaacatgaaaaaaaaaatcagagccctaaaacaactggatttggagtcaggcatcttggattctggcctcagttctatgcccaattcatggctcgttaccttattgataagacacatgtgtctggcagcagaaggggcagtttaggaaaggataataatgaatgcgataacttggaggcagaaaataatcatgaagttaggtaaaggcaaactttcatttacataatgggttaccacttttgactttggacaaattaacctctgttatctcattgtaaatttatgggtaacagtaactaccttatgggtgggtgaataacaattattatgcatataatacattctacaaaatgcagttctaataacatctccccatccctcgcctctaaaattaactagataacatcctgggtgaacttctattttgagaattgatatggtttttatgttacctgtggtgcttaattgagtgtggagactctgggctgcagaatttgcttaataaaagctgcgtctagagataattgagacacgttatatggacttcaataaatttgaaacagcagtcaatatcagaagtaaactggactaaaggaagtcttcaaattgagagtctctctaagcttttgcatactggtacccaacatgactgtgagtgattgtcattgcagtagcaaaagaaaaaaaaaaggcaaattcttgcaaatgtttaacttgaaactaggtaacatggagatagaaacagatacttttacacaatattctctttatagatccctcaattttgctggtgcatgtatatatgtataaatttagggaaaggtgtaaaaacctgcatagaaaaatatctttttcctcaagagtaagaagtgagtagctacaacctagtatgctggtgataaaatcagtgggataacaggactagaaaaaagttgtgttttgttttgctttgttttgcattactccttctctgaatggggggcagatgatgttcaaccaaaatccttactagactactgcatttccaggaagtctagtttaatcctagtttgtctggacattccttatcaaataatgcccttctctcttttctccagccagttcctttccacctttttctcaccggatggtttggacatagagcttccttttcatattcctgtcatatatattctgtattccatgagcaatttgtggcagcttccccagtataagaaaagggatcagcatgtgctggtgagcactgtggcatcggtacacttggggtactgcatgaacactgtaagggtagagacagaggaggagtaagatgagacctgccttgtagaggaatttaataaaagaacatgcaatgagaatttcaggcagggctaatttatattaagtggaacttaacaaatgttgcatggaagtctgctcaaatattaatatgttcatgagatttgagaaggaatgggataggtggaatggaatatgaaagtggatattagacacctagagcacaatgggctgatgagctgggtgatgctgcccaacagatttcagggactcacttgcagatggactttagggttctccatctcctttcttgagagctaccaaaagctgggrtttcagagtattggcttacatgaccaccatgttagtaagagagtgacaggagaaatttattcaaggtggggataatattagattctagaatgttaaacatggaagcccacttggagttctagtaagaatctagataaatatcttcattttactcatggggaaactgaaggccagggatgggaattgcccaggttcacaaaggaatttaacaatggagctggcttctgattcccagggcagtgttctttctactctacctgctgatgagtggagtaagaggtcagaagacctggggaaagataagcaactaagatatcctaaaaatagttcagcaatttaaaaccctcccttctcagagagtccagacaggaggccttcaatccagagccaaggagtagcctgttttttacagaagcatgtaaggcaagtgtgcttttctcttcggccccacttacttccagctcctaccatcccagcttatgaatcaatatccttttccattatccgtgtatttcctggtatctcacagctttcaaaataataggaaacttgattcttatgtgtgtgtgtggaggggggagtgtacatagtaagtgtgtatatatatgtgtatatatatatatgtgtgtatatatatatatatatatatatatatatatggtacaagagatgttttgatacagacatgcaatgtgttataatcacattatggaaaatggggtatccatcccctcaaggatttctcctttgtgctacaaacaatccaattatatgcttttagttattttaaaatgtacaattaagttattattgactatagtcaccctgttgtgctatcaaatactaggtcttatttattctttctaactatcttttttttttctcattaatcatcccaacctcccttccaccctcctagtatctttcccagcctctggtaaccatccttctactctctatctccgtgagttcaattgttttgatttttagatcccacaaataagtgagaacatgcaatgcttgtctttctctgcctggcttatgagacttgattttttatttccaagttacaagaaccaagtttcagtcttgtcattgacactttagacaactcttatttgttttctagatcttggttagaacataactattctttgacttctttgaaagattacacagatgccaggaattattgttaccagtattatcacttaaaaaaaatcttccagatggattgccacaaagacgagaaaggcaccatctatgactatgaggccatcrcacttaataagaatgaatatgtttccttcaagcagtatgtgggcaagcacatcctcttcgtcaacgtggccacctactgtggtctgacagcgcaatatcctggtaagagaattcatagttacttctctttgggactaaattttccagctgatcatattctaaattatacttggaattatattttaattataattatgtaccaaaataaatactcataatcaagtgacttcatcctccatatcagaagtcagcaagcttgggtggacaggccaaatttggtcagcctggctttgttaacaaagttttattggaatgcagccgtccccgttcatttacacatcacctatggctgctttcatgctgtaaaatagaggttagtagttgtaggagtagtgatgatggaaaccatgtggcccacaaagtctgaaatatttcctatctggccctttacagaaaaaatgtgctaaccccctccccatgccctgcctckgctttttcctgagatttccaggggaatcaatatatacttgagaactaggagcctctcagaagattccagaagtcttcttgataaatacaggacagaagacccatgtttttgagacttttgcaaggttttacaggtaacttacaatgacaagaaaaaggagttttatacctggaactgcatttgattagagtgagggctggcggatgaggctgtaatagaagcaaatactccctctccaacctcaacccctttttaggatgtagtttttcctccctttttgtacattattcagggaagaattttctcatattttagggcatgtggtttaaaaatcagtgaataacaatcaggatggattataccagagacaaatgtacttcttatatttgaagtaataagaccttcattttttgtttttaattatgttttgaataagcattatattcacaagtctcaaagttcaaaagaaaaaaactttagaaccaaaggtttccaccttcttcccctcccttcagtagaccaatattatcttgtttacagaatacatagatattcttgtttctgctcccccctccccagctgataacacacaataaatactatttgctgccttgattttttaattaataaaatacatttgagttcagatcatttcctcattctttcttaagactgaataatatttattggaccacaatttattttcccagtttatagggactttaagaatcgatttattcagtttccaccctgcaaataacagataacagaaggacatagggaggggtactgaggaaccctgtgaaaacaggaaggcaatctctgttttttaaaaaggcctagaggaggtaccagttggctgagctgaatctgagtgggactggttagtgtttgtcaagggactaaagrcatctggctcagaaagggttaacaaagaagatgattataaaagtctgagcagacaagttggaaaacttcctggtagtggacgaaggcagctgaagcttgtttttcagcatattactgaggatttttagtaagaatgcatcttcagcatcttaaggactgttgaaaaatgttaggattgttgatttcagatttctctgtttgtctttgcctttgtcagttttacttccactccactcagggtgagccaggctgcacagaggagagaagctcagtcctggctaacatggcgaaaccccgtctctactaaaaatacagaaatattagctgggcatggtagcaagtgcctgtagtcccagctactcgggagtctaaggcaggagaatcacttggatctgggagacggaggttgcagtgagccgagatcgcgccactgcactccagcctgggcgacagagtgagaatctgtctcaaaaaaaaaaaaaaaaaaraaaagaaaagaaaagaaaagaaaagaaaagaaaagaaaagtcacctgttgaacttttgaataataaagamgactaagccccatttcagaggaacagaaaactctctgaaatgggacctgggcatccctatttttaggaaagggccttcagctgattctgatgtgctgcaggtatggaaaacactgcaccatgacaaagggcttttgagcgcacgtctgaagatccggcctctaacttcagctatgctactaacagcccttctgatgcagagctgtttccctccctgggcctctgtttccttctctgtaaaatgggtaaccccagggaatcatccttgcacaaggcagaacctctacctagaccaaaattgttcctcctctaactgcagaactaaatgcasyccaggaggagctgaagccctatggtctagttgtgttgggctttccctgcaaccaatttggaaagcaagaaccaggagataacaaagagattcttcctgggctcaagtacgtgtcttcttgaaatccaataggaggcgcctgtgtacctttcctcagtctccagaggcccttccagctcaggaactttctggggaggtatggattaataggctcaggggcattacaagcagagtttaactttggcctaccgtgatgagcgtctggcagtttccagactctctctccatccctggctgagacttggatggactrtggaggacagaagggatggaggaaaagagacaagtcatgggatagagagaaataaagtgagtcagagagcccaaagtcaaaacatggccatattcctccccacccacaacgatacttccctctttctcccctttctcatgacttcaaatcctagtgtcccattataatctttacttgcatatcctggagcttcctgggaacattatggcttgttgcaggtatgtccgtccagggggaggatttgtacctagtttccagctttttgagaaaggggatgtgaatggtgaaaaagaacagaaagtcttcagtttcttgaaggtgagtaaattcctggcataagcctcctcctcttttcyaatattgctaacatagagttggtgtggcagaaatggatccaagggctcatgcccagaggtgggattggtctttgtggagaaaaatctccagatcagcattccacattgcacatgctgatctggagattaatctgtgagtatctatggggctctaactctgtgtggtgaagaaagttgtgtggaatggcaacttttactaggaccaccctctttkgctcattgacattcattcattaattcattccaggtacacttgatgaatgcccgctacttataaagcaatctaaataataaggatataaagatgaataaggcatagtctgtactcttgatgagtttataatggagagagagttagaaaccattagctatgtagctggggtggtggttcatgcctataatcccagcactttggaagactgaggcaggacaggagaattgcttgaggccaggagttcaagactagcctgagcaacatagtgagaccctgtctctacaaaacaaatcaaaaaattagctgggtgtggtggcacgtacctgtagtctcaactactcgggaggctgaggccagaggattgcttgagctccggagctggaggctgaagtgagctatgattgtgccactgcattccacactaggcaaccaagcaagacactgtctcaaaaaaacaaaaacaaaaaaagtaacaaaccaacaggtatgatacagtgtagtaggtaccttttatgaaacactgatttttagacatagagaatgccagagctgaaacmaccctaaagattaccaaagtgaattgttcctaaatgctggactgtgaaccaagaccagtccatgttaagactttatatatcctcaataaattgaagacaatagaacagtgtatcatgcctctgcaccccagcctgggcgacacagcgagactctgtctcaaaaacaaaaacaaaaaagaacagtgtgggaagttttttataaactcaactcgtctaacttataggacttccctttattcacaaattatgacccacacgcagtttattcttccaatggtctttttaaattaagtgacaaaatgatggtgttttaaaaatttttgttatttgacaaaatattagtaattcagtgttggtcccaaaagacaattattgaaatattagtggcccatggaaccctaagacctggaaaaccacattccaatmcaagctatttactttgaagaaaaggaaaccaaaagcataaaaggtaacatgtcttatccatggcagcaaaattttgttatggggctatggggagaaaccgaaagagagcagattttgctataatatctataatattcttggtagttggcatagtggtgattcaagaatttatggagttttttaggaatatcaggaagttaaaatatctaggtataggagggggtggattacctgtgggtaaaaatagcctggatcatccaggagcagaaataacattgtttytcttttccatctctctggtttagcactcctgtcctcatccctctgagattttgggcacattcaaatctatatcctgggaccctgtaaaggtccatgacatccgttggaactttgaaaagttcctggtggggcctgatggaatccctgtcatgcgctggtcccaccgggctacggtcagctcagtcaagacagacatcctggcgtacttgaagcaattcaaaaccaaataggaaggtggagttaagggcaggagcaaccctacttctcacctaatgacttgctctccccacccctccaaaaaaaaggaatacccatcttctcaccacactctcttcctgcatgggctccacctgagtaaatcaccgccacatactgccagaattcccactctccacaaactagatttatatttggaaggctactgctcttttgcctctcaagagtatgtgggtgaagactgaaacaaatggaaacctaaaatccccagacctctgttacaggttgaatcattcatatccaccagagggaaatcatccttccacgacaatggttcagtcggccatcacatcctgaagaacattcctagacattctgactcttccatctctctctaccctggaggtgtagaaatagcaatggggtcacagtcacacaatttaggttccacttcataacattttttgtctcctaggacaaacgtgtatcatcagtttccaactgttttggctcagttttcatccatgacacctccccctaccagccattctcctgtgggagcaagaacattgcttcaaaagaagagagggcatctccatgcttgtgggacccaaaacctatctctggccctacaaaagttttcctaattgtctgatctttagtgcattcaggttatggcacctggagaggaatgccctttatcttttgaaggatgggatttcccatctcaaccctggattcctcaccttcagaacgagccctgccactgtctccaataaaatgttttctgcagcatcgacaatctctatggtggttttaaaatcctgtctggtgcttgaactcattttatctccctcctccttattactctgtcacaaatgatgtattgcccacatgacctgagccccccagacagaaagatttatgtttggaaggttgtcacctaatgcctctcagttgtcattcctcttcaggaattgcctcagcctaagtttttcccctttccagggcagcctgtatccagttactcatccctgagaggcatagaggccaaaccctgactgctcaacttagcacaactttgaagggccatactagctctagacatgcacaaggggtaggccggtggcattttgtgcttgcactgcaccccagtttttccctctgacaaattctgctcctcttctttgccaccccccccaaccctccacactgattgtcagttaatgccctagtaaactttctgaatgcaaatatccatcttagagtctactgtctagagaatccaaccagtaattattggtaccaaatatgatctgagaaagaagatactaagaggagatttttgaagctgaattattcaccgtctggttgatgatgagaagatgggtggagcacaaacaactactggcacaagtagcagtgcggttgtcaaaacttttgccaaacctgaactggcatggtaaactggtggaagaatatgcactagcagacatgaagttttaggtgcttgagaaacatgaggggaatggtaattataacgtaatagaattggatggtcgttgccagaggaaattgatgttttggagagagataattaaagactgaggatgatatattattaaattaaggctaactgtgaaagtgtttctccatgggatgtataaaggacctctcctatctgcaacttaacagcagcaaaaccgaaagttcaggctcaagacttaatcataggaatagtatgtacaactctaaaagaagttagcttccagctgtcacggtggttcacttctgtaatcccagcacttttggaggcagaggcgggaggatctcttgggtccaggagttcaaaatcagcctgggtaacatagggaaagcccatctctgcaaaataagaaacagaaccaggcatagaggcacacacacccatgatcccagctgctagggaggctgaggtaagaggaccacttcggcccagaagtcaaggctgctgcagtgagctgagatctcaacatggagacatctggtttgatgtattagaatatccaaatctccaaattttccaggacccccaaaacttttagaagtggcccatcccttcttattgagggttagcatatccttcttgcttgaaaacaatgcagatgactctgtctggccaaatattatgtgcctctgctcccactcagaatctgcctcatgtcaaactaggttctcagagttcgtgaagaaggggagtgcaacctaaagttagataaggagacttcactgatatgggagcgctctccctgaatacagaatttttacactctgtcaagaaaccaacacactgttcggatggctcctattcggaaaaaaagaaaaatgtctctctctcaatgtggtagaaacaccagaactgtttcagcaggtggtagaaataggggatcaaaagttcagaaaagtgggcaggttcaagtggtttaccatgcagtgctgggaaccccactagataactgtacatcacaggaaggccaaaggacattcagtttgaaaaaacaaaaaaggaatgtgctggtgagaggggccattttgttatgttgttcaattactttaacaaaaattttaaaaatatttaatctttctctgttaaaccttcatagaaaaagcccgacatgaaatataacaaatgtaaacaatggatttctcaagatatgagactttggcaaatttttaaataattatattactgtttttctgcatttacttagcctgcgttgcatctatacgtcgaaaacagtgatttttgtaaaggaaatattcgctctctgagtgtttccgagtagcaaagtattttaacattattagatttaaaatcagcgagtgtctggatgggagtgggaggttggcatttcatgtaaagcagcaaatagtgtagccgaacgcagagtggagagacaggaagtagaatggcgaaaatgaaaagcccgcgggattccgaaacaatggaaaatgctctcgctggttttgtgcaggcggaatacgcgcttcttggtggaaacttcactccgaatgtagtgattgacacgtctattttacatgcagccatcttagcttcctgcttttggtgaaccgatgtgactttcattcaaatgtttttaaattattgtctgactttagagaagccgtgggaaaatctgagcagaaattcaaggtaccggtgacgtcaaccctgagtccctagggcatctctgagttggaaggaaaagggctccggatcagctaattccagggttctcttgattgttgcttttcatcccattcgtggaagtcctgtattagaaggtgcctaaagttcatattatttaataccttaaaaaacaatgtttaaagagttcatcgtcaatctgtaagagcatcttctcttatacctttccaaatccttattatttctgtggctccagtggcgcaatcggttagcgcgcggtacttataagacagtgcacctgtgagcaatgccgaggttgtgagttcaagcctcacctggagcagttttactattctccgacctgtagaaattcaaaaacagggagagcttattgcgcctgagatttctttcagcgatgtatgtactcagatttagactgcactcagaaccctcgcgtgatttgacttaaaattccctggttaaggtcatgggtgataaacgtcgtcacacggtcctttttgatgcttgcctttgtccaatacctcggcaacaagtgtatgacagtcgctaaaacagctcttcacagtattcatttcaataagaaactgaccgggtgtggtgactcacacctataatcacagcactttgagaggctgaggagagctggtctcttgagcccggaggtcaagaccaggcatgggcaacatgatgaaaccttgtctctacaaaaaaatgcaatttagccaggcgtggtggcgcgtgcctgtggttcctgggtgacagagtgagaccctgtctcaaacaaagaaacctgaccttcacagtctcaggcccagatagatcaggcatatataaaaattcataactagtacttctgtgtgacttttcaactctgtgaaacaaggacgatcttaggtttttaaaatcactgtattagtgggaattttcttgtctctgaatctgctttccctacctcagtttcttcattcctctgggattcttaatgagcctatgatgtctgcagttatgacagagacacaggtattgagtctcaaaaaataaaccaaaccattacagcctccgagctgagcaggaagcctacatgtgggccactaatctcaccctctggatcttaaacatctgtgacatcctggagacacaatacagctctccctcttcacagatttatgactgcccatgtgcaaatgctcagcactacctgttcttttctagctgctgctgcattttgaaatgtttacattctccctggtcccatcctgagctgcccaccaggtaaaagtgggttcaaaacaagacctacagaccaacttgaattaacacttgtttaaaaaaaaaagtgatagtggataatttacttaaacaagatgtacaatgaacatatcaataggagggctattcaccgtgttgtttgataataaattaacaattgattaacagctgcaagttcctcccatccctgtatgcatatccctctgtaatgtgtgtgcgtatgtgtgtttgttttgttttgttttttcaagacagggttttgctctgtcccccaggctggagtgcagtggtgcaatcttggctcattgcaacctccacctcctgggttcaagcgattcttgtgcctcagctgctcaagtagctgggattacaagcatgcgccaccatgcatggctaatgtttgtatttttatagtagtagagtcagggtttcgccatattgcccaggctgttcttgaactcctgagctcaagtggtccgcctgcctcagcctcccaaagtgctgcgattacaggcgtgagccagcacaccaggtctgtaatgtgatttggcagcagctttcatcaagaggccaagtctgtttccctccctgttgtatgtgagttgactttgtgatttgctttgaccaacagaattctgtgaaatgatgtagaaatggtggtgtaggagttctaaaattaggcctcaagaaaccttgtcactcacctcttagaaccttcataccaagttggtacaagatgctggaaacctcatcaagcatcttaggtggaagaccacatggagaaagagtctcagctatctcagccatcccaggcagtccagctgacaccccacacatgttagtgggaccatcttggaccatccaatctcagtcaagctgccagatgactacagtcatatgagtgacccaagacaaaatcaacaaaagaattgcccagctaaacacagctccaatcattgacctgaagaattataaacagaagaaacaattgttgttttaagccactaaatttgagtaaggtttgttacacagatataaatgatggatataagcactaagcacagttctgagcacaaagtaagagcctagggtaagttaggagtttatgacttttggggatcttctcattgccccaagaagtgggtcttctctcctcttgccacaacacggaaactccagaattgtttggaatcctgggttgttcaaattgatccttggagtaagcttctgactccttgtgtccttgcaccaagctcagagttcctgctctgaaagacctagagcttccagatctctagagtgagttgaggtatgaatggatagaggtgtcctacagtccttgcctgattttgtaaactaaactgcagagtccacagtcctttctagctgcattttcctagtgctggctgttcttttggtaggtgtgctgatttgccttgtcacccgtgacaaggagaaaagggtttgatatccatattgagagacatttgaatatttatttttaaataattgtagtagtttagagatgccagacagtc

SEQ ID NO: 95058 - DNA, 68888 bp, Homo sapiens
  misc_feature (1)...(68888): n = A,T,C or G
aatgttgaggctgctggtggcattttggagactatgaaagatacacaaacatggaaacaagatagtggtgacctggagcaataaactctacttgtgtagctgaggatgatcttgtacagagtcctggcaagaaggtagagacgacaggtcattcttagatggagtaaaggactgctaattttcagacttcagtttgattcagaaactgtgtccctatcagcagacagccatgcctggggagcaccagccccctgccatgcacttagataatggagggagggttttgtggtcacatgtggtaggccccaagcttcagattcccactcatgactctctttcactccagtctggtgacgagttagggactctaagctcaaggacccaaggttccccgaaacagactcagcccagtcctactcctgagccctcttcttgttgtctcctgacctggtgcccaggacaccccccctccccacttcctgccataatcctgagtgcacgcactctgtgatgaggcctagctgtcacatgcactaattttcaaagtgctcagatttggttctcttctttctagaaacccatttcagaaaaaaggaaccagatcttaacagtaaggagactgctgtgccaattgtcagactccagtttgcttaggtctgattgactacacagattaaaatcctgggaaggaattaggctcaaactggagtggaggggtggtgggggaaaggcttatactctcattatgccacagcatcagggtaggctgcaatgcccttccacacgtggtgccctgaaaatgtccctggttattcttctttcagccatcatgtacttctgaggtacctatttctatcctagtgtcaggccatatgccatgatttctgtccactcaattagcagaaggccccagggcactttggtttgaaaactggctatatctgatgaggctttgctaatgtgctctcagaagcagagtccttctcttattgcctcctgtggggagatttggacctctgtagcagagaagactgtaaaggtcgtagagaaactgggttttcggaggctgccatgcccatcttgtatacatgtatgcattgtgcaaccattattcagaagggagcataagtcagggcatgggaacagagaccccaaacagatattggcttccaaaaatgctcaaataaccccatcccccagtgcattaggagtcagagtattgttggaggtaacctgaagctctggtccaagtgctttcctaggtgttcaaaggtctgaatgagtggagcatcaggccgattggaggagaggagctgacagcacaggatgtctgtccctggtgtgaagctggaggagagactggtggtattccttggggtggggtgagggtgacagtggggktgagagctagagggggtgaggggtcgggrgggtggttgtattggcagaagactagttaggtggtattcttgttgaactgaggcaatggaagggttagattaaatcagtggtcttcacaggaggtgtagaatgttccattgaaatgtaaaagaaaaattaaaacttttatttttactttttttttagtctaaaaataaaaagctaaccttcaccaatgtttactattatacattttaccctcactcaactcatgcattgggtgtccatgtcatgcatcatatcagaggcaagtcagggaagagaggaggttctacaacatgggggatggagaaggggaccacagcaccctccctggcccacctgctttcaaaatctattgctaggtcttaagaactatttgtgtcctggcagtggatagacatattatcagttttcactaaactcttctcacaaaagagacaagtggtttgaagacattcctcaaaggaacccatagactgaaaataatatgaacaatgtaagcaaaagcaaactcagaaaatggcaaagttgacgatttcttactactaatatgatatccattatgatgattagtcagctcagtagtagtcagctctgacaactaagttcaaatttataaaaaagactacttgaaacagggatttacaccaccatatgttggcccttgaggtattagctaataataatataaacatgaaatcatgatcagcaagacatgtaaatgctataaactcagggcaagaagacaaacctctacgatttttttttcagggattttccaagtcatgcaatacttagttgtgtactttttaaaaattattttttggccgggcgcggtggctcatgcctgtaatcccagcacctttggaggctgaggtgggcggatcacctgaggtcaggagttgcagaccagcctggccaacatggtaaaaccctgtccctactaaaaatacaaaaaaaattagccgggcatagtggcgcatgcctgtaatcccagctacttgggaggctgaggcaggagaatcacttgaacccgggaagcagaggttgcagtgagctgagatcataccactgcactccagcgcctgggcgactcagtgagattctgtctcaaaaaaaaaaaaaaatagtgctcagaaatctcttttgaggcttcttatttaatagtaaaagacaaaatatcagtcaacatcactggaaaaaacagctgttgtatttgccatggttaaagtgactgagttaatacagagagaagatggtagtacataaaaatgtattctgttggaagacacacagactttaagtttgaagaataagttttaaaacacatggtgtgttgtggaagttggctatatggttggatgcaagttgctaacatgtttcaccttgagtatttgctatgctttttgataatgacattcataaagaaatattttttgtgatctactaaaggaaagatagatatgttcacaacagtgaacaacttagtaaaacatgctgtggtttttatgggtgaaagtaaaccactgagggagtggctgccctctctggaatacaaaatgaagggtggttggtgttttgtatgaccagcaagacatgtaaatgctataaactcagcaagacatgtaaatgtctcgttctaccacttgtctcttttgtgagaagagtttagtgaaaaccagaaaacgtaatctgtctatctactgcccaggatacaaatagttcataaggcctagtaatatactttgaaggcaagggtgtcatggtcccattctctgtcccccgtgttgcacaacctcctctcatccctgactatgcctctgatatgacacatggcatggacacctgatgcatgagttgagtaagggttccatgtagttaacattggtgaatgttaattttttttatttttagactaaaaaatatgtagaaataaatgttttaatttttcttttacatttcaatggatcattctacacattctactttgaagactactgatttaatgttacccttccattgcctcagttcaacatgaacaccacctcactagtcttctgccaatgcaaccacttccgctacccctcaccccctccacctctcactgccactgtcaccctcacccaaccccaagcagtagcagcaccaccaatctctcctccaaaactggggggtggttcgtgttctggtccatgaggactacatgtgaaattcagcaatcacattattcatttacaaagtacaacaagaagttgaagcaagaagatcatgaaatactatgggatgtcaataatatggttaattaaaaaattaaaatatagcagaatctttatagcactttgtattgagatgtggaatgagactaaaaatctttcttatgattccaaggtttactgattatctcaaggcaaacaacttgaacgctgtgaatttaaagatgagtttccttaacaaagaacaagtgctccaaatttgctgacctccgatgtgctggcctgagattgtcacaagtgtgatacatagcagaaagaaacacacatatacacacacatacacacacacacacacacacacacacacagtatccttttgggtaaaggtgatatttcagcaatgaactgacgtaacaaatgtgctttagaagaattgtgttatagggaaggcactttgaaaattgacgtttggaactgtttccattatcatgtgattttcatgccaaaacgaagcgtgctagtgtcacctatactctcatagccacaatctgcaaaatgtagaagcatacttctaaatccattttacaatattgcaaatgcagaatttcaagtgttttaaaagtcccatttgttaaaatgatttgcaagaacagctgaggaaaacatcattgaaaatgttgatttcatagacaaagaagagttttcacatttgcaaaattgatagatcaaatttaaacagtaagaactatgatttaataagtgcaaagatacagttcttctattcaggtctatttaatctttgtgagatatcttttttttttttttttaaagaatagccattaagaccaagtatggacattaactgaacttacaagtacactttctggtctcataaagtattaaactaagatttatttaaatcatttttaatgatttaatcactaaatcactaacagattagtggaatcactaaacagattattgctaataactttaaaatgaaaggaaaaaggtatattgtaccactcataaaaatgaagcaatttaaaattattgtttcatctttaccacatcctttaatttttttagtgttctttataatatgtaactcattaacgcagtctcatgtgcaaaacgtttatgaatacacgaattgcgagtatcagaccaatcagactatggggtagaaggaatacaacttggtgcttacatgagacaactctgtgaaagtggttgacacagtgaggacacacagtgggtgctcactaatgaagtttcctctccgagcttggtgacttactcgttgagagaggaaagggagaccgagtcaagaatggctcccaactgtggccccgtggtggtgccgaccccggtatcattcactgagactggaaacacagaagcaggttctggcgttttcctgggaagcaactaggtagtttgggtctggaccgcttccgccggcctaggaagatctagaggagatgttccctaggcagttagattcaccatcttcagcagctcgggggcattctgggctggagatgaaattcaagagccatcatccggcaggaggttgttaaaaccatgggagtggctgagatgcccagagtgggccttggagtgggagagcgggctggcacggtgggaccctggggtgggaccacagagaaaagccaggccgcggaggccgagaagctgtaggtacccaggtatgtgaaaaatctggaggtgggggccgcgggtgccaactctggaaactgcactccaagcgtttcaggaaggaagacgtggtcagcaggctcagatgccaggaagaggtgagcgagggargctgcacggcacccagtggctttggcaactaggaggtcattcaggactttgaggggcrggtgaaggcagagcgaggagggttggagagggagcgtgtgcacgtggtgtgtgtgtgtgtgtgtgtgtgtgtgtgtgtgtgtgtgtaggtgatccaagtgaccagaaggacgcctggaagagtggacggttggcgagggagtgtgtgtgtgtgtgtgtgtgtgtgtgtgtgtgtatccaagtgaccagaaggacgcctggaagaaaccaatgcttgcgggttgctgcaactacagggagcaagtcacctgtgcggggccgagacccccagagtctcgcgctgggaaaagttgtgcggggaggggaggacgtcgggcaagcccgggcggcacggggagcggtgtggaagcccggcggggccagcgcagttgaggtctggggagcccggctggcatctgctccgggctgcggcgcgggccccgcggagcccaggaggcggcgggtgcttccggccaagggccctggcggccgccgcgcccctgctgctctcaagtttcccgttggcggcgcggcccgggcgcttcaggtagcctctcggctctctctgctccgctccgcgcccaggtagggcaccgacgggggctgcacgcggctggccggcttcctccctgctgaggcggccctccctcctcccgcggggccctcctggccggggatccgcagcgctgcgccctctgaacgcccggcccccgcgcctgctgcggggcgcggcctggccgggccctggccccggctggcctcagtgcccagcagccccgctccgctctgcccagcgcgtcccctttgctccagccctgcggccgtccctttcggccggcggcatggccctgtcgtccgaacccggtgagtgcgcgcgaggctgcgctgctgaccttgggccagccccgcggaccctgcggcccaggcgggaatcagcagcgccctggggtctgaaccgcggcttccgccttccctgctcgcagaggcggtggcgctgactccggtccgatcccttgccctgtcccctgttcctgtccctgtccctacccctgcctctgcggtggcccgagccccagcggcctcaggtgagcgggcagcatcccgattccctggcggcctagaatggaatcgcaaggtttagagaaattaagggacctgggacttgccaccctgggcaaagttcctaggtgcttgaggactggctggatgtggacagctgaggtggacttctacctggaggcgagggatgcactggatgatagggtgatgaggtcgtttgaggccttcatccttacctctttggctctctcccggcaagggaggtgtacagccttgggctctggcagtctgctttctgcccttgatcttctggtagctgctttgccagcagagctgctaatggctgttgtaggctggcagaggtccctggggagagttttgagaggccttggagtaggagaggcttgctaactagggtatcatttccccaaactgtatgtggctgaaagcttgatggcgacacatcagcaaaggagctgggtgaaagcaggcagcacaaggagggattttagcatggtcttgagcccctgttggctttccctcaggatgcagtgaccaacatttggccatcttcatggaaaagctgcctgcagctggaacctgcagaggagaaattctttccctggctgtgcagcactaaggccgagtgttagtggagccattgagccagacagacagagcctctgtcacttcacacctctaggagtgttgacagcaggtctggggtagttggcctggcctggctgcagcttcatggggcctggcttgctctgaggatgatggtatggggctgccctctctaggaataatgacacctgcataggtggtggctgggagactctttgacctctcagtcccatccttagctcagcctctgtcttctaaggttctcctagctctcagctaggtcaagaagctctttgagagatgaggttttttgtagttgtttttttttgcctctacactgactggmtcactcttcaaatggcctcaaaatctgtctcaggtcttgaaaatgtcatgggcagataacatgtagccttcgggttaacagggagataccctttctcccctaaagctgcccattggcctccatgattcttycaccaagtataataatctcttagttcttctgtatgctggttgcatatctaggacaacagacaattgctttgggcttttgatttgtaaggaactgactggggcatgggaggatgagctcatggctggagtcctggctgtgtacagtcaccgagaagtaccattcataggggagaaggatgttcctcctcctgatctggcttcacatttaaatatgttttccttcttcctgcacccaggtaatagaaacttgggagagtgccaggcacatggtggtgctcaataaataaggttgaataaaaggattcagtgtctagataaaacttcatgttcattttcctagttcttctctctcgtatctgatatcataatgatgatgacaatgatgttggcagataatgcttataaaacacatactctatgccaggtaccagtctaaacacttcacttatgctcattgtcatggcaacctatgagattggctttttattatccacacttcatagggaataaaaccgagccacagaaaagttatttaacttgcccaaggtcatacaactaagtggtggaacaggattcaaatgcagggagtctagctggagttttttttgttgttgtttgtttgtttgaaatggagtctcactctgtcacccaggctggagtgcagtggcacaatctcagctcactgcaacctccacctcccgggttcaagcgattctcctgcctcagcttcccaagtagctgggattacaggcgcccgctaccatgccaggctaatttttgtgtttttagtagagatggggtttccccatgttggccaggctggtctcaaaactcctgacctcaagtggtctggccgcctcggcctcccaaagcgctgggattacaggcgtgagccaccacactcagcctgagtctacgtttttagccatacactctactcattcctgagattgccataggtggattgatctattataaatagctagttcacttgttcattgttttatgcattcattcattcaacaaatacttgctgaatgtcgaccatatttcaggtatggggatacaactgtgaatgagacaggcgagatttgtcatggagctggtatttagcaagtgaatcccctttgtccaactccttgtgtgagtcacacacacctcacaaatgagaagaaaaatgaacccctctatgcaagctcatgcctggcttttggggaggagagtgatatctttctttttctttttctttttttttttcttgagataaagtcttgctctgtcgccaggctggagtgcagtgcagtggtgcaatgtcagctcactgcaacttctgcctcctgggttcaagtgattcccctgcctcagcctctcaagtaggtgggactacaggtgcgcaccaccatgcccagctaattttttgtgttttagtagagatggggtttcaccacgttggctaggatggtctcaatctcctgacctkrtgatccacctgcctcgggctcccaaagtgctgggattacaggcatgagccaccatgcccggccgatatctttcttgatgagacataatttgattccrtcctctcctgtcttttagagtttgtaaggggtgcttaagtgataaaaggggatgcagtctagtctcgggcaggagaagcgggccctgtatctggttatcataaattgtcttgatgtttgttcgaaagggaaataaggctttgagcttgggatcagtgctcttcagtccacagagacatcttggctgcaagaagcagcaacaagttaggctcaaggtggaattgtgaggtcctgagaagagcttgctcttctgggacagaactgtatttttcttctaaactgcccatgttctggrgagtcttccckccttttggcttcagcaggacccttggtcattgttacaacctgtgtcatcttagtggagctgctgctggtttctgtctgaacccgatgcaatgggtctcatacctgtaaactgggctccaggaaggcagctttctctaagttggaaaatgaagactcaaggtggagggtgtttcccaaagccsataccacaagatrttaataggtgtttttttcctatgacagcagttctaggatggtcaaataagtgcgtygggttaaacaaagttaagcagctttctttactgcaggacttctcaggtgttgaatttgctagtagaaactgtgcatgaatacccataagggactacaggatgcagtgttttccaagccttctgacctttcatgttctgcagactgcactttgaaaaatgcttgtttagactaaggctagctgggatccggttaaaggtgcagaataaaattccctgaacgtgtcggacttaaatccttgggctggaatcctcccactgcagtccccactctacctcccctttccccaaaacactagcagaaaaagtcatctgcccctcctccttctggcagaatagtactaagggcttggatttttttctcatactgtaagttcatttaattgtttaatgaataaatattaccctccctctaggttgcttgtagcctgctggttgcactgtttatgaaacagctgtgaggacaggtgggccgtaatctctgggtagctaaagcccagcagcagcccgaggatcatgtgtcaaccctgtaatactgctctgtgcacacaggaattatgatgtgagctcagtaagacacaacctcacgattggacatgcggaggtgactcaggcccaagtcagggttacagctagcctcccggtaaacaactgacccatccttcctgrgctcttctycccaggatttcaacagcaccacagaaatagccattttgctcatggttatttcccaggaccacasgatttgcctaagtcactgggaggctatgtgtctgttctgagccttcccactctcctaaagggcagatgaagatcagagctttgcaccctgtgatgccattttaatcaaccctgcttggttttagaggattgctccygtgggtcacttgaggcaggctccaccttccccaggaggagtggcagagtccagccagcgctcggagctggaggcccacgtgggagcagtgagcggctgtaagcaggggagggtttggggtgggctccggtgggtcagttggggtgtactccttttctgtgtgtgtggatgggggtgggggttctggtaaagcttatcaggcttcgcagtcacctgtgatgtgggcttcyttctgggaagaaaggaaggagtgggatggggctgtcagcttttcatcctagcctgcccctgtcctctgtccgcctctgtgctgaggcagttcctgctccctgagtctctgtcctttcctgggaaaggtggaagcagttcatggtctttccctttcagaggaggaggggatggaggggattgtattagcaactgggattgaagctccccctggcagttatggggtgcccttgggagggctgctttaggggggctttctgagaagaggcaggtcgggctgtacctgagaccaatccccttgataaaatgcagccaggcctgaagcacgttcagaacggaagcagcaaaggtgatgatatcgctcgttgctactcagctttcaggaggaggctgggcgttagagggaggctgtggcttatctcctgcagctgggcaggacggctgagtttactgttgtaaagaggaagccgccgctttagtttcctcttgtgagggctgtgaagagggccaggacactgcattcaggataccacagccattttgttttggataactgggattacctggggacttcagggctcttggaaattttccactcatatttcatattcacgagagaatttccagcccaggcttttcctgctctggctcactgctgctcacagatatgcaaaacagagacctcctactccagccggcagacaggacccagccagctgcacgcacgcactgactcagctgagcctcctgggtggcaggcagcacctcacccgggtgcatcacttgagtggcatcttcaggaccagtcatggagccaggctcaggtctgtgtcggggcttctgcaaggggagtctggcaagagtaggaaccagcttccttcgtataacgaggggatttcagtggcactgggcttcctttctggagggactgtggcaccatgaaaagttactgtttgttgaaactggcagtgttttagaactttctaactttgggacacttcttcaagttcatcagagcgtgttgcatgtaacagtgagataagctgtatcattggctgactgatgctggtgaattcacagctaagcctcccaagcctgctggyttcagctgacaaagggttggaagccaggcgtgaacatgcagctggagctgaagctctgcttggcatctgcagagtgagctttccttgtcaggcctggcctggcaggtgtctggagggtctgagaggagagacactctggagggacgrgttggcaggtgggagctgtctgccaaggacatccagaaggcagcagatgtgggggcagctgctaaggcctgcagcaccccaagtgggttacttggtccatactaagatatggaattaattattttgttgtggwtgctgttgtttcttgcttttttttttttttttttgagagaaggtcttgctctgtcacccaggctggagtacggtggtgccatcatggctcactgcagcctgcacctccaggactcgagcaattctcccaactcagccttccaaatagctgagaccacaggtgcatgccaccacacctggctgtttttttttctattttttgtagagatgaggttctgacatattgcaccaggctgatctcgaactcctggcctcaagcgatcctcttcagcctcccaaaytgcttggattataggcatgagccactgcacccggtcttggaatgaattatctaccaactatttaagacactggtagtagttctgcggaagatttttatgggttctgtaaaacaaaaagggttctgtatgttaatgttactctatgatccttgattttaatgagccttatgaatgtgagttgaggggctgtggaatgcaacatctcccaataactgaccacaggacctgttttaccagcaacaggtatcaatttcttatggcatccagtttgggaaaggttgatttaagctaaagagaaaggaagatatgttatagaaagctgtgtcctgaaaagtatttttagttgattagagcaagctaaaaatgctttgtgcgctggtatgatggctcacacctataatcctagaccctgggaggccaaggcaggcggatcacttgagaccaggagttcaagaccagcctggccaacatggtgaaaccccatctctactaaaaatacaaaaattagccaggcatagtggtgtgtgcctgtggtcccagctactcgggaggctgaggtgggagaatcaccggagcctgtgaggtcgaggctgcagtaagctgtgattgtgccactgcactccagcctgggcaactgagaccctgtctctcaatcaatcaatgaataaatgcatgcttcatgagcaaacatggcaggatctggcataagagccctcagacatcaaggacttccctcccacccaaatacccattgccaagggagcctggttgggggtgtctgggtcaggcctgtgtgtgtctgagggcatgaaggaggtaggaaggtgctgctggtggtggatggcttctgtccagggtaggagctaacacagagataggtctgaatggtgaaactccctttggcctggcctctcaatagtgtgggttaggctgatcttgaactcttagcctcaagtgatccttcctcctcagcctcccaaattgcctggacaacatggcaaaacctcatctctaaaaaaaaaaaaaaaaaaaaaaaaattagccaggtatggtgatgctccctccctcccttcggcaattaaggagggagccctaattgccaaaacctgccagaaaaagaagtttgttttcctatttttctctcttttcatagagtcttaagtctactcattttctttctattctctttgtatttgttaaaaatggcattataatagcattcatcatcaaaataaaatatcctctcacacacaggcagccctgccacctggtcattttgactgcgtgaatctcttgcaggtcttgcccataaagggatgcattttcctttcactgtaaataaagcatgggtatggttctatgtattaattttttcatttactgtatttttatttttttatgtgattgcaccatcctcataatcataattctgattacttaacatctttttcaagtgagtatgctctaatttaggcattttaaagctatttatgtaaataatgcaggtaaatatccttgtgcttttcattcttaggattctttttttgaaagaaatttgtagaagtaaagttgcttagtcaaatggtatggtgctttatggcatttgcggccttttgcctgggctgttgggttgcatrtcttcttctgagatgcgatgtgaggttttgggatggtgcccttgattggtggccttggaataaggggggaggtgaggatccagtttcgtttcagcctgatggagcctcctgggtctggttctttgtgctgttccagactttctctcccctgtcacctcctttgatggcctccagcttcccccctctctgctatcaagacatggaaatccccacaggcagctctgttcctcttcctttttgcagaggccaggcctcgctgtcttgatgtctgctccccagacagttgtgtgttgacaggctgttccccaccagctccctcccactcctctcatcagrgagtggcaggtccttgggtctcagagttaagggagccacagacctcactctgattgcctgttgctagcctgctttcttccttcctgtctgtgtcatgacttagtcccacatgccactcagactcagagcagcaagccctcctcaggcaccggaaatctctctggtacctagaattatgccacttagagctgagagggccttagagaccacttagttcaatccctttatctcacagatgagaacattgtgaggccggagaatgactgtcccaagatggcctagtgtgttcccctcccctgtagctgcacttctccctgctggacagcagcagggctctgtctcatctccattcttgtctgtctggtccacaaaaccrcttctctctttaaaccaactttaaagaaactgtggtcataggtagatgggaaactcctcttccagagctgctcccarcgagggtggcttgtcgaaaagggtgcagtattaatccattccacaagtgttatgctgsggactgtgaggagcccctgcccggacacatacgtggacaaagagaagcagcacagcatggtgggtgaggggacagaggcaggaaccaggtgcctgggttcagatccctgagctgaggatcagagaggaaagggatgagagagaaaggctgagaacagcacaaatctctgctgacttattaaaagtgtgaccctgggcatgttagctctctatgccttcattttctcatctgtcaagtgggaataataagattaactgagttaataagtatgaagttctttgcagagtatatatatgtrtgtrtacatatataaaatatatattatatataatatatatwatatataatatatattttatatatatatatatattttatttttaaaattgagaygaggtctcaccctgtctcccaggctggagtgcagtagtacgatcataactcactgcagcctcaacctccctggctcaagagatcctcctgcctcagcctccctagcagctgggattacaggcatgcatcaccatacctggctaattctttaaatcttttttagggatgaggttttgccatgttgtccaggctggtctcaaacttctgggctcaagcagtcctcttgccttgacctcccaaagtgctggtattacaggcgtgagccaccacacccggccccagagtatacttttttttttttttgaggcagagtcccactctgttacccaggttggagtgaagtggctcaatcttggctcattgcaaccttcacctcctaggtttaagcaattctcttgcctcagcctcctgagcagctgggattacaggtgcctgccaccacgcctggctaatttttttgtatttttagtagagacgtggttttgccatgttggccaggatggtctcaaactcctgayctcaggtgrtctgcccgcctcagcctcccaaaatgctaggattacaggcgtgagccaatgcgcctggccagagtgtacatattaagtgctatacaagtaattgcaaaaaaggaaagaaataaggaaatgaagaaagcaagcaagcaagaatgaaacccaaccaaccaagcaggtggttgaggccagtgactgttagtaaggaatcagtatgcgaggaggtggatagagaaagcttctttgagggagtgagttttcagctgggtaaagagtgttctaaaacctttattttatttgctgtgtcttgttaggaggttccagagggtttggaactgcaatagcagattctttctcttcagcaaaaggccttgatttatgtaatgaagaatgcagctttggatttcccagggctctgctgtaatcttgtgcgaccttagctgttaaagcctctgtgaagtgggggagtgaggtttgattattgttgcagctataacagtatcctcatagtctggaggagggagagctgaactctctcttgtcccttctcaaacatgggaacaaagtcaggagggcagggctgccaggtgctgcagattccctgagtttgggaaaatggaagcccacctagttgaacagttcattctttgaattttgaacacttgctttctcctgacacctaagtggccctacatgcttcacatccagttacttattgagctaattttgaaattggcatgctgggtttggtctggggcattcctaagtagacagctgaccccaagtaccaggtgggcctgrccctcacttcagtgccttctcttccccggtgctggtgactcagggcatcctgcaattcatgcttgttctttctttgctagctgagatgccgcggcagtttcccaagctgaacatctctgaagtggatgagcaagtccggctcctggcggagaaggtgtttgctaaagtgctccgagaagaggacagcaaagatgccctgtccctgttcactgtcccagaggactgccccatcgggcaaaaggaagccaaggagagggagctgcagaaggagctggcagagcagaagtctgtggagaccgcaaaaaggtttgttcccaaggcatggttttcgtgtacatagagtcatgcagacccaggcaggctgtgggtgtgtgtcctgatatgaggcacctcatggggactggtatgtccctagagctgtgttggttccttaaccaagaccacttaactcacctcttatttattgagggatgtctcggtgcctctgttgcactgaaaagatcaaaacccactttgctgctgatgtgaaaaaatacacaccatttccaaatggcatttctcttttctttttggaaatttgaggatttcttaggagacagcaattgtatttcttctcatcacttgacaagcattttgcattactaatgaacacagcttactatttgccgggtgctgtgctgggactggagatgttataatgaacaagatagatagagtccctgggtctagacaataattaagtaactggacaaattaacttaaaaattacaagttataataagtgctgtatcagtcagggtccaactagaagatcagaaaccaatgaagtattagaattttaatgcagggaattggttacacaggtggtagagagctgagaaaccaaacaggggagagagaggcggctcagagattagacacagtaaggagcagctactacccaggacaggagtgacaaggaaagcagtagtgtttctggagccaaggtggagtcgccctggggaaggtggaactgtggtggactttccagtggaaactggagccaaggggaagaggtggcagctgcagagatgcctcccaaggcagagatggaggcaggcaatacctcgtttgaccctttctgcaccttccaggttctcccagtggctgccatgggccaaacctagccagaatcctgctggcacacttgggaaacacaggagaggatgaggaatggatctgagggcaaacaggcccaggagcagcgcaagtgctatgaaagagatgaataaggatgagatggggttaggggagagaaaggccgggaaagagagagaaaaaatccttttttagactgggaagtcagggaaggcctctccaaggagatgacatcttagcggatgcttcagggtataaagaagctagctatgtggccttccagatagaagaatcagctagggcaaaggccccccagtttcttccagaaggcccatgtggttagaggtctgttaaaggaagaagtgctgtgaccagggctggaggacttgtggggcccagatcagactggccttgtgctccctgataagaagtttggattggagtctaagtgaaatgagaagccctcatcctttcacagtttatctcaccctgggctttatcagattttctgcctgcccggtaccctgcaaacatcaatagttgacatggtagacctttgagccctctccgacctagtctgtgatcacactagatactgcctcagttttaaaggcaagtcttttcctttcttggttgtgtagaagctcgcattttcttaactcgtttggaaagaagtaaaaagttgactactggtgtaaaggcaagaacagagcttcaccactcataagaccagtgctttccttccttgaaaggatggtgagcccataaaggcaggagtcactggtgccattggttaacctctgagtgccagccttgtgttggataaggtggggtggccccagccccagcagtgtgctcatccctggagggtcaagaagagtatgactgtagagaccctcattcacactccgtgggtggaacagaagggctgacttcatcaagtgaatggtctgcagggccttctgtgtgttatgaattgagcatttgagacccttaacaatgagaggaaaagaaatcctggcattttttattactaggaacaataagtttctggaaccagtttccactacagagtgacactgggcctgacatctgctgaagcgactgtgctcttctcaatgcccagactcagggcaaaatggaagctttcttactctaagtcttaatggtgctctgtggtttccagaaattcccctgcaaacttctctccaaaaactttgttctgtccttgcctaggttatggtgtcttagtttgcatctgtctgcgccatttgactagaagctccttgaggactggatccattgtggaacttagttggtgggcagtggatgtctggcagaggaagacatcctgcctccccattgccaccatggacactacatcagggtggctgcaacttcttggacctctgtgttctgccactcactgtcatgctctgtgactttggggaaattaggaaacctctctgggcctcagcctcgtcctcatctataaagtggagatgctaacagctaccttcatggggtgttgtgaggaatgagggaatccacaggtaaaaggcttcggacagtgtctggttatagtgcatcccgagtaaatataagtgatttctctgacttcctgctgctgagacagggaacaatagcagctcctgccattgaatacttactatgggctaagtactagcctgtgtaggttggattcattctttaattctcacatcgagcttatcaaatggatattcttagtattctgattttgcagattagggaacgaaggctcagagaagttgaatttactttcacaaagacacatagtgagtaaatgacagagcaagaactagagcccatatcttttgaatctagaccccacacttcaaccataaggctatcccctcttcaggtaggggtggagtcttcggttccctggtctgtagaccctggaatgacactaggtgctgctccctagaatgtaattgttgcttctaaatgaaatggagggaaactggtcaaagctcccgctctgtccatcggcttctttcctgaaaaaaagcytggtccctggactgtcagatgccccagcatcctcctctggggtctgcccatacccaattttgtcttttagtttctcttctcactagaggtgcctttatatgtaaatgttcgaaagttaacattttcatggaggacaccctctccccagctccctctttgtctgtggcacctcccatcccatctcctatttattcttactttacacagaattctataatctggctatattgtttcttatcccgtggcagatttaaagaagcaaattagaagcagggagagagacttctacaggcagggtcacagaggtgatgtgtggtgattataagcctgggctttggggtcagacctattgggttcaagtggcagccctgtcacttactactgaatggccttggtcaaagctcttgactgcctgagctggtttcctaaactgcaaaatgagaataataaaaggacataccttgtgagaattaaatgagcgaatacacaaaaaatccttagcgcagtgcttggagcaccattaatgttcctgttttgttattgttgttattagacagtcaacagtgagagaggaaacaaaataattatgaaaagcaggcacaagaatttgaagcacagtagtttagggataacacacctctgagatcataactggataatacagtgatgatcctgggtcattgagaaaactttaaattatgttcagcatgctttgaggaagaatgcaggaattatgtatttttttaagaagccagataaaaattgatttttaaaaaattaggatatagttaaggctggcaagatggccaattaggaacatctccggtctgcagctcccagtgagatcgatgcagaagggggtgatttctgcatttccaactgaggtactggttcatctcactggggctagttggacagcgggtgcagcccaaggagggtgagccaaagcaaggtgaggcgttgcctcacctgagaagcacaagggatgggggaattatcttccttacccaagggaagccttgagggactgagcctgaggaactgtgcactctggcccagatactgtgcttttcccatggtccttgcaacctgcagaccaggagactgcctctggtgcctacaccaccagggccctgggtttcaagcacaaaacagggcggccattcaggcagacactgaactagctgcaggagtttttttttttttttttttttctgtaccccagtggcgcctggagygccagcaagacagaatcattcactcccctggaaagggggctaaagccagggagccaagtggtctggcttggcaggtcccagccccatggagcccagcaaactaagatccactggtggccaggcgcagtggctcatgcctgtaatcccagcacttagggaggccaaggcgagtggatcacctgacgtcaggagttcaagaccagcctggccaacatggtgaaacctcatctctactaaaaatacaaagattagccgggcgtggtggggggcacctgtaatcccagttacttgggaggttgaggcaggagaatcgcttgaacccaggagaaggaggttgcagtgatctgagatcgcaccattgcactgagcttgggtgacaagagcaaaactccgtctcaaagaaaaaaaaaaaagatccactggctcaaaattctcactgccagcacagcagcagtctgagatcaatctgggacactcaagcttcgtagggggagggtcgttggccattgctgaggcttgagtaggaggttttaccctcacagtgtaaacaaagccaccaggaagttcaaactaggtggaacccacygcagctcagcaaagccgctgtggccagactgcctctctagatttcttctctctgggcagggcatctctgaaaaaaaggcagcagccccaatcagggacttatagataaaacccccatctccctgggacagagcacctgggggaaggggcagctgtgggcacagcttcagcagacataaatgtccctgcctgacagctctgaagagaccagcagtcctcccagcacagcgttcaagctctgctaagggtgagactgcctcctcaagtgggtccctaacccccgtgtatcctgactgggagacacctcccagtaggggccgacaggcatctcatacaggagagctctggctggcatcaggcaagtgcccctctgggatgaagcttccagaggaaagaacaggcagcagtctttgctgttctgcagcctccactagtgacacccagccaaacagggtctggagtggacctccagcaaactctagcagaggggtctgattgttaggaggaaatctaacaaacagaaaggaatagcacatctaatcagagaccacatccgaaaatcaccagcatcaaagaccaaagatagataaatccacgaagatggggatgtaaaccagtgcaaaaaggctgaaaattccaaaaaccagaatgcctcttctcctccaaatgatcacaactccttgccagcaagggaaaaaaactggacagagaatgagtttgaccaattgacagaagtaggcttcagaaggtgggtaataacaaacgcctctgagctaaaggaacatgttctaacccaatgcaaggaagataagaaccttgaaaaaaggatagatgaattgctaactagaaaaaccagtttagagaagaacataaatgacctgatggagcagaaaaacacagcacgagaacattgtgaagcattcacaagtatgaatagctgaatcaatcaaacggaagaaaggatatcagagattgaagaccaacttaatgaaataaaataagaagacaagataagaggaaaaaaaatgaaaaggaatgaacaaagcctccaagaaatatgggactatgtgcaaagaccaaacctacgtttgatggatgtacctgaaagtgacggggagaatcgaaacaagtggaaaacactcttcaggatattatccaggaaaacttccccaacctagcaagacaagccaacattcaaattcaggaaatacagagaacaccacaaagatattcctcgagaagagcaaccccaagacacataatcgtcagatgccccaaggttgaaatgaaggaaaaaatgttaagggcagccagagagaaaggtcaggctacccacaaagagaagcccatcagactaacagcagatctctctgcagaaaccctacaagccagaagagagtgggggccaatattcaacattcttgaagaaaagaattttcaacccagaatttcatatgcagccaaacaaagcttcataagcaaaggagaaataaaatcctttacagacaagcaaatgctgagagattttgtcaccaccaggcctgccttacaagagctcctgaaggaagcactaaacctggaagggagcaaccggtaccagccactgcaaaaacataccaaattgtaaagactatcaacacttcgaagaaactgcatcaactaatgggcaaaacaaccagctagcatcatgatgacaggatcaaattcacacgtaacaatattagccttaaatgtaaacgggctaaatgccccaattaaaacacacagactggcaaattggatgaagagtcaagacccaacagtgtgctgtattcaggagactcatctcaagtgcaaagacagacataggctcaaaataaagggatggaggaatatttaccaagcaaatggaaagaaaaaaaaaaaagcagaagttgcaagtttaacctctgataaaacagactttaaaccaacaaagatcaaaagagacaaggaagggcattacataatggtaaagggatcaatgcaacaagaagagctaactgtcctaaatatatatgcacccaacacaggagcacccagattcataaagcaagtcttagagacctacaaagagacttagactcccacacaataataatgggagactttaacaccccattgtgaatattagacagatcaacgagacaaaattaacaaggatattcaggacttgaactcagctctggaacaagctccaacccaaatcaacagaatatacattcttctcagcacctcatcacacttactttaaaattgaccacataattggaagtaaaacactcctcagcaaacgcaaaagaatggaaatcataacaaacagtctctcagaccacagtgcaatcaaattagaactcaggattaagaaactcactcaaaaccacacaactacatggaaacygaaaaatctgctcctgaatgactactgggtaaataaggaaatgaaggcagaaataaagatgttctttgaaaccagtgagaacaaagacacaacgtaccagaatctctgggacacatttaaagcagtgtgtagtgggaaatttatagcactaaatgtccacaagagaaagcaggaaagatctaaaatcaacaccctaacatcacaattaaaagagctagagaagcaagagcaaacaaattcaaaagctagcagaagacaagaaataactaagatcagagcagaaccgaaggagatagagacatgaaaaactcttcaaaaactcaatgaatccaggagctgttttttttttgaaaagatcaatgaaataaatagactgctagcaagactaacaaagagaaaaagagagaagaatcaaatagacacaataaaaaataataaacggggtatcaccactgatcccacagaaatacagactaccatcggagaatactataaacacctctatgcaaataaattagaaaatctagaagaattggataaattcctggacgcatacactctcccaagtctaaaccaggaagaagttgaatccctgaatagaccaataacaagttatgaaattgaggcagtaatgaatagcctaccaaccaaaaaaagcccagaaccagacagattcacagccaaattctaccagaggtacaaagaggagctggtaccattccttctgaaactattcccaacaatagtttggagctggtaccattccttctgaaactattccaaactcattttatgaggccagcatcatcctgatgccaaaacatggcagagacacaacagagaaaatttcaggccaatatccctgatgaacatcgatgtaaaagtcttcggccgggcgcggtggctcacgcctgtaatcccagcactttgggaggccgaggygggcagatcacgaggtcaggagatcgagaccatcccggctaaaaacggtgaaaccccgtctctactaaaaatacaaaaaattagccgggcgtagtggcgggcgcctgtagtcccagctacttgggaggctgaggcaggagaatggcgtgaacccgggaggcggagcttgcagtgagccgagatcccgccactgcactccagcctgggcgacagagcgagactccgtctcaaaaaaaaaaaaaaaaaagtcctcaataatatactggcaaaccaaatccagcagcacatcaaaaagcttatccaccacgatcaagttggcttcatacctgggatgcaaggctggttcaacatatgcaaatcaatcagcgtaatccatcgcataaacagaaccaatgacgaaaaccacatgattatctgaatagatgcagaaaagtccttcaatataattcaacaccccttcatgctaaaaactctcaataaattaggtattgatggaacgtatctcaaaataaaaagagctatttatgaaaaacccacaggcaatatcatactgaatgggcaaaaactggaagcattccctttgaaaactggcgcaagacaagtatgccctctctcaccactcctattcaacatagtattggaagttctggcaggggcaatcaggcaagagaaagaaataaagactattcaaacaggaaaagaggaagtcaaattgtctctgtttgtggatgacatgattgtatatttagaaaaccccaccatctcagccccaaatctccttaagctgataagcaacttcagcaaagtctcaggataaaaaatcaatgtgcaaaaatcacaagcattcctgtatactaataacagacaaacagccaaatcatgagtgaactcccattcacaattgccactaggagaataaaatagctaggaatccaacttacaagggatgtgaaggacctcttcaaggagaattacaaaccactgctcaaggaaataagaaaggacaaaaacaaatggaaaaacattccatgctcatggataggaagaatcaatatcatgaaaatggccatactgcccaaagtaatttataggttcagtgctatccccatcaagctaccattgactttcttcacagaattaraaaaaaactactttaaatttcatatggaaccaaaaaagagcctgtwtagccaaracaattctaagcaaraaraacaaagctggaggcatcacgctacctgacttcaaactatactacaaggctacagtaaacaaaacagcctggtactggtaccaaaacagatatatagaccaatggaacagaacagaggcctcagaaataacaccacacatctacaatcatctgatctttgacaaacctggcacaaacaagcaatggggaaaggattccctatttaataaatggtgttgggaaaactggctagccatatgcaaaaaactgaaactggactccttacaccttatacaaaaattaactcaagatggattaaagacttaaatgtaagacctaaaccataaaaaccctagaagaaaacctaggacattcaggacataggcatgggcaaagacttcatgtataaaacatcaaaagccatggcaacaaaagccaaaattgagaaatgggatctaattaaactaaagagcttctgcacagcaaaagaaactaccatcagagtgaataggcaaccttcagaacaggagaaaattttttcaatctatccatctgacaaagggctaatgtccagaatctacaaagaacttaaacaaatttacaagaaaacaaccccatcaaaaagtgggcaaaggatatgaacagacacttctcaaaagaagacatttatgcagccaacaaacatatgaaaaaatgctcatcatcactggtcattagagaaatgcaaatgaaaaccacaatgagataccatctcacgccagttagaatggcgatcattaaaaagtcaggaaacaacagatgctggagaggatgtggagaaataggaatgcttttacactgttggtgggagtgtaaattagttcaaccattgtggaagacagtgtggctattcctcaagaatctagaactagaaataccatttgacccagcaatcccattactgggtatatacccaaaggattataaatcattctataaagacacatgcacacgtatgtttattgcagcactatccacaatagcaaagacttggaacccacccaaatgtccatcaatgatagactggataaagaaaatatggcacatatacaccatggaatactatgcagccataaaaaagatgggttcatgtcctttgcagggacatggatgaagctagaaaccatcattctcagcaaactaacacaagaagagaaaaccaaacatcgcatgttctcactcataagtaggagttgaacaatgagaacacatggacacagggaggagaacatcacacactggggcctgttggggggtgaggggctaggggagggatagcattcggagaaatacctaatgtaggtgtcaggttgatgggtgcagcaaaccaccatggcatgtgtatacctatgtaacaaacctgcacattctttacatgtaccccagaacttaaagtataattaaaaaaagaaaaaaattaggatatagagggaaaaattttattagttgaaaaatttggctatctaggacagccgcttccctagaatgttttgagtgaaattgagaaacatatgtgctttatgaattgagcatagcacagctaragtgttgctaagtcacttcattttatgaaacttgtgaaaataagaatggggaactttttaaacattcaggatcattgacaaaggagcttcatttgaaatagtcaatctatccccttttaaagttagggagagattgggctgggcgcggtggctcacacctgtaatcccagcactttgggaggctgaggcgggtggatcacctgaagtcaggagttggagaccagcctggccaacatgtagaaaccctgtctttactaaaaatataaaggttagctgggtgtggtggcacatgtctgtaatcccagcaactccggaggctgaggcaggagaattgcttgaacctgagagtcaaaggtttcagaaagccaagatcaccccactgctctccagcctggctgagggagggagactctgtcttgaaaaagaaaaagttagggagattgggaagccgaggtgggtggatcacttgaggccaggagtttgagaccagcctggccaacatggcaaaaccctgtctgtacaaaaaatacaaaaattagctgggcatggtggtgtgcgcctatggttccagctttttggtaggctgaggcacgagaattgcttgaacccaggagctggaggttgcagtgagctgagatcgtacccctccattccagcttgggcggcagagcaagaccctgtgtcaaaaaaaagtaaaaataaaaataaagttagggagagagattgtaacacttaagttaacagatagtacagattgcacttcattttcatctccaggtctttagggaggaagggcagctgggaaggattgaggaagggagaagcgaaggtgagtggcaggagatgagtggagattacagtaggccaggaggggttgtggggaagggaggatggagaaagaaggggcaggtttccagaggagctcagggagagacagagggtggggctgtgagttttcacacctgattggctgcaaagtgttagaatcaaagttacacccacctggccaggatgctggtcatctggctgcatatgcggagtgagtgatctctgtgcgcccctgctctctctgtagggacccctgttatagtgcccatcgtgcagcatatttctccagataggctgggacctctggtctcaagtacagggaaggtgtcagcycctcttagttccctccttagatgggggtcccaattccaggtgagccaatgcaggggcagcgtgagcagcagcagtgtgagcctatggaagtggaggatgcctgtcccgcctgatggcattcagattcccagtgtttgcaaaactctgtgctggtttgtgacttctgattccaacctttattttagcgtaacaattctcatgtggaggggctgccagaatgagctgagtgtgcgtgggggaggagttcaaaccagcctccatgttctgaaatgtcccccctctgaccccattgctccactgctcccacccctagtctggattaagtgtctcctctggggtcccaaaatatccagggcatctcattacaccaaccacactgtatgataatctgtggaactgtctgggttcatctcagccatcacagtcggcccctggaggcgggagttatatcttatctactcctctacacccagggcctggcacacagtagtttattgaatgaagtggggtccacgtgtggcccccagctcatagtacacatatgagagcctggtgaaaggttggctccagtgcccctccctgcctagtagtcatctggacagaccacacagggcagtgggcttcagatggcccctggtaagatgctggctattctctaggagagcaaggtgggcctgaagggctcctcactttagcatttgagtgctatatagggaaggccctgggagcctgattccccagagcggaggagggctggggagtggagcagagtaagggaggggacttagtgactgtcaggggcaaccaagggccatagagcaggtggagcaccagacaggtgctgggaggtaagatgctgtaacaacagcccaggtgacctgatcaactctttgtcttgtgggcctggttagcaagaatgtccttgtgcgtcaagaggataaatctatttcagggatgacaaaactgctcctggccctttgagccctcaggcttggcctggagctggtgtcctcacagccccacactctgctggctccttggcaggagtgtgcttctgccaggtgcaagtgtgggtgggggaaggagggggtgtgccagctgtagcccagcaaatgctggcgccccaggggctagtgcaaggtgcagcaggtgagatagtggacagacagaccttggcccatcagaaggaagtgctttctaacaggggcaccagatcagttttgttcatacacacactcatagacacactcactcactgtattagtttgcactgctataaagaaatacctgagactggtaatttataaaataatgaggtataattggctcatagttctgcaggctgtacaggaagcatggcagcatctgcttctgaggaagcctcakggaactttgactcatggtgaaggcaaagcaggagcaggcgtcttacatggtgggagcaggagcaagaggcagcgagagtgggtaggggaaggtgctacacacttttaaatgcccagatctccatgaaaactctcactagaacagcaccaaggagatggtgctagaccattcatgaaggatccacccccatgatccaatcacctcccaccagcccctacctccaacaccggggattaacatttgacatgagatttgggcagagacatggatgcaaaccatgtcgcacaccctctgacacttacgcccacacgcccactcactcagctccaaccctctacctttactggctgggcctcggttgtatagaatggatgctagatatgggcctaggggaggtagaatttctaaaacggcccctgcagatgtccctccttaatctccagatgcagtgaataagatgagttatcactcctgtgatgatgttatggaatatggcacagtwgaccttaagataggggggttattggtaggcctgatttaatcccatgagcccgtaaaaatagagagctttctgagtgtaggaggggagggcagagagattcaaagcaacagcacaatgaccactcctggttttggagatgaagggggctatgtgcagggattggagtgaggtcaataggagttgagagtgacccctggtcaaagccagcaagcagcctgggactccagccttgtgggcactagacctgaattctgccaacaaccggaatgaacttggaagtgaattmcttcccagaaactccagacaagagtacagtgtggctaacatcttgattttggcctcttgataccctgagcatagagcccagccaagcccacccagacttctcacctatagaactgtgagctaataaatagctgttgttttaagccatcaagtttgtggcaatttgttctgcagcaatagaaaacaaatccasggtcatccttgggctccatatagcttttccaatttcctgagatacaagctgtggttaacttccagttcttccaagctcaaggggagtgagccctgaggagttagcctatctgtggttaaacctatcccttgtgcctacagagtctgagctcctggcccgcagatgctcatatgtgacaatctggagctcaactgaagaccaaggttgtcgccataatggatatccccaggaaggagaattctttgggcaccagtttgtgggtactagcttcctcactggggcagaagaacattcctaggacaagcctggtaggctgttggcttaggcagcctcccagcatttgggctgtagtgttttttttttgtgtgtgtgtgtgtgtggtttttttttaaactttcttagctgttgctcaccttagatgtcacctgttgcttcttgttggtaggaccagacctcaggcagccttggctgaggcatttggaggtgaggttgcatggaaataaaaacagtgagctggaaggcatgtgtgagtgacacagaaaccagaatctcatgcgtcccagctgaggtcagaatgtgttggggagcccaaagtaatggctcttcctctgggtgtgggcattcaaaagatgccaaagggagaacctcatcctcaaggtgaatccgcctctgaggagtgactgacaaggtggcatccctggggcaggatgcttggctgagctccatttgatggaggacagaccagagaaagctgaggctgggggctcccagggctcaggttgagtttcccgaagcagtccagtgcatcacttagcaagcaggaccaggggcaaggggaaggtaaattcctgaaaaggagccacctctgtcttgcaggttaaaatagccttgtcccaaagatgtgataacacagggtaggcaggtgagaaccagagggccatggcaagcactgggtgtgtaaacacgggaggagaactgtggttcttgaaaactcggcagtgaggatacctggccacaggccaagaggaagagagctgcttctgggtaagccctgaaacttatttggggatcaactgatttcttcaggcctgtaggtatcacactagtacctggagaggaggagggctctagtgggtcacagttgtcactgagtccttgctggtggctgtggttgtggtagaataaatactcaggaagctactgggcccatggcacaaggtagggcaggtggtcagttggtttctggcatttgacactgtgggatggcaccgtggggaggccgggttccactgggggcagacagaaacatgaggtaggagaagagtgctgatggcctcaccttaatgctgggtaatttttctgcagaagagacttgcagtgacataatctgatgtctgtttcatgaatgaggaaggtagagtcatcacaaatcagccttgcaaataagcrtgggcttgtggcattttaaaccaaccttgggcccaagagccagtgtaatcatcttttggtgccaaggcaacaggtccagagggacctgaatttggtgccgatcaatccctctccccaaacagaggtacatatctgtgcctgctctagcagcggcagtcaggatggtacacggcgggctagaggagggagcagcagggctggaggctgggtggagcagccactgtgccatgtgccgtgtgactttgtgccagccctttcccatctctgggaaagtgtctgtgagaagtaggctgatcttgcagatctccttggcacccagtaggtctgctgccagccatggggcctatgatgcctgtaagcttggatggcggtcgctagtccacggtcctgagcactgtctcgactcctttgtaaaacaaggagattggattcattgagcatccctctctcttctggctccaatgccccaaatgtctaactgtgtgaaatgcagtgtgattgtctctctgtgaccctattcctggtcctttctgagaccgttcatatgttgggactgagagtttgtgttatctgaagccagcatgctgtccacactgtggggaaagcctgcatgatttgctattgtcctcccctctagtgccctgtggttttagagcccctgccatgtggtctgccatttgtctctctgtctcctagggcatttgcctgctttaatcttctgtgggctgtgcaaacagccctgagcagtgcatggtgaccacaggtaggggtgtctggagggccgtgttctatctcaggcagacatgtgtaagaggaaggcatgaataattagaaacttcttaatggtagggccagcaccagtgattaatcatagcaaaattctcctgccacrcacacagcaaagagtctttatcactcaccccaattagcttctgatgtctcccacttttccytgtccttggctcttagaaagaaaagtttcaagatgattcggtcccagtccctgtctctgcaaatgccgccacagcaagattggaagggccccccggcagccagtccggccatgtctcccacaacccctgtggtcactggagccacttccctgcccacgccagcaccctatgccatgcctgagttccagcgggtcaccatcagcggagattactgtgccggggtaaggcrtctgtgagagtgttgaatgtgccttgcatgcaaaggccaggggccccaygggccacagggtcgtgcctccctctggagcctggccctgtccgtggatgtctgggagaaggtgaagaggaggcacaggagacaaggagggccctmgcagaggttgtggggtgtgggtgtggtgtctcggtggctgcctgttccccgtgaggagggtcccggggtgcaggctggcacactgtgtctgtgactcgtaagttccacatgttctctaagtccagaaagctggaattggtccctgtagcctgttgagaaaggtgccagcttgggcctttcagtgttgccaaatgtttagtagattcaaagccatggtactgagtggtttgtgtgaaattagttgttgctaaatcatctcttcttatatgtaggttcaatacccttaaatataggctagatcccttcaaccaggaagagagaatcttgtttagaaattgagcaaattggtttacactaagtcaattaacgcagtcactgaaaatgtgctaatttcacctgattggatgatgcattttttatgcatgtctgcttcttggagagaaatatcactgagttagtgccagggttaagtttggctccatctccctggccccaactcactacttaacgcctcagttggcttcattagtctctttttaacagtagctgtagaaaatatggtgaatctgagaaagcaatgcagcttattgctcttcctrtaaaatttcccctagctttcaaaaatttttttggttatgtgtaatggagaacacttgcagatggtacaaaatttaaaagatacaaaaatggtatcaattattcagccacccattctcctcctcagaggcaaccactggttttagtttcttatgtattctcacatatatggtctatgtacctacaattatttatgcatacatagtttatttacttatttttacaaaaatggtagtttacaatatacattatactgcatcttgcattttccacttaasaatacatcttaaagataatgccatatcaatatataaagaacttctttgtccttttaaaaaatatgtacatagtattcctttatgaggatatatcatagcttattttaattaagttcccatggatgggagtttaggttgggttggaaacaatgcaggccttgtctggagatcagcatcctgaccatgagtctttggtgttcacccaacctgaggcaggtgggcagggcattggaaagcaagagtcgaggtgggtcggccaccagctgaatgggaggatgtcagcctgtagcatataatagcttctttctcccagtctcctggctggcacagagtagtgcatggagcacctgaactgggcaactggtcctcagaaagctaagtgtctgtgagaggcaggctgatcttgcagatctccttggcacgcagtaggtctgctgtcagccatggggcctgtgatgcctgtaagcttggccggtggccacgggtccacaggggtcctgagcatcctctctgatgtccttagccatggcatgagccccttgtcatgctgagtccattggttccccagagaaagaatttggcttcgttgttggcagggacatatttttgtctaggatgtcggtgtctgctcacctattcctgccgctctcagaagccatccactggaagatgtaaaaggaattaacataccttatggggacatttggaggcaggaaaggagaatctaccatcgtaacaaaaagtcttgctttttgtatttagtatttactaaatactacttcttagtagtatttagtaaaagtataaaaacatgcataggaaaaatatattcagacttcttccctctgaggatggggtagggaggagagtagagttttagctgtatctgtgatgatttatttctttaaacctgtgagaaatttgaaagaattatgctaaatattattgtcagctctagaaggtaggttatattatctttggtgcctgtctgtatgtttaaaatattacaaaattaaaaatgatgattttattaaagcagaggagatcactttcaggccccagccctccccactctgggctatgccagcatatggtgcctccctctgctgttccccttgccctgcattgtgtctgtctggccacttgtctccccaagcatatttctgcgattcccatccttcccaaacagactaagattaatgagcctgttggaaggcgggaatttatctcattcatctttgaatatgaggctgctctggtaaagcagaacatccttagactttgggactcaatcaggttagagtctgaaatttgactctgtagcttcctggcaagtgatttatcctctctgggcctcagttttcccatttgcaaaatgggttgctgtaaggagcaaaatgaaatctatggaaaggtctggcacataacacatgacaatggggcttgttgcctggatgagttgggtgattaacagagttaatcagaagtgtggggttggcaaagaagcaggctgagcatgcagaatttgcttttgcttcttgttttgtttcgccatctgaaggacacatgaattttctcaactgaaaatgacggtgctcatcgccttcagggataggactcaggctttgtccctccatgggcctggtacaaaaacagacttttggcttaattagctgcatgtgaggccggcttctgggtgtgcaggctggagcacttgtctgtcttccaacgaccctaactcctcctgtgtctcctgtgttgggggtctccaagaccactccaggttggatgattcaccaggaggactcacaggactcagcatatagctgtacttacagctttgatttattacagtgaaaggatacagagcaaatcagcaaagggagcgatacatggaggatacgaggtgcaagcttccaaggtcctctcccagcagagtcatcagaacataccaaatacctccagcatcacattgtgacagcacatgtgggaagtgttgtttaccagggaagctcattagagattcggtgcccagggttttcactggggctggtcacatgtctgcatagcacatctcaaattccaggctccagaaggaaagcaggtrtccaacataaaccatattgtttgtacaartagtttaggtrcaatgaaccactcttattggtcaaggagtggtgagaaccctcctgaaatctaggttcccagataccaggcaagggccaatcttgcaagcacatctttccaaggatggcagtctcaggcctgctgcatgaaccctttcctgcctgcctcccttctgcagatcactttggaggactatgagcaggcagccaagagtctggccaaggccctaatgatccgggagaagtatgcgcggctcgcctaccaccgcttcccgcggatcacatcccagtacctgggtcatccgygggcggatactgcacctccrgaagagggccttccaggtatggagctctggctggaggttgggtcccaagtgtgggcagaccgagagctagtcagggcttttttctggctcggtctatttcccctgatagtattttaaaatgacagtgttctttcattggcttctcccacactgatgtttgatggttcccccaaggattgattctatgtgtactgtatgcctagcctgtgcagagctgaactgttgaagtcaagacagagatgtgaaagacaktccttgttcttgggagtccaccagggagacagggagtctcatgtgggaattttttttttctttttttttgagatgggtcttgctctgttgctcaggctggcatgcagtggtgcaatcatggctcactgcagcctcaatctcctgggctcaagcaatcctaccacctcagcctctcaagtagctgggatcaaaggcacacaccgccacacccagctaattaaaaaaatattatgttttgtagagatgggggtcttaccatgttgcccaggctggtcttaaactcctgggctcaagtgatcctcctgccttggcctcccaaagtgctgggattatagatgtgagtcactgcgcctggcctcatgtggcatatttaaaagaacacaatcacacagtaaatgccaaattggtggtagggtggatcggggtgggagtaggaacagagggcatgttccctgggaagacatgtaggctctggtgtcaaacacacctgcatttgtatctgggctctgtcaatttcttgggattttgggaaagatatttctctaagcctcactttgtaaaatgtaatctgtaaatggaaatgcaaataatacctatctcccagggctgtcgtgaggattaaacmggagaatgcatgtgaagtacttagttcagttctggcatctagtgagtgttcaataaatggtagctacatttatgctgccgagttcagggaaggggaggtcggagagggctrggtggtttcctcatgaagccttgccatgaagaacctaggagcagtagaggcagtgatgaggacagtaggaaaccccactcctgaaagttggtggtgggggacacataagggcctggtggtctccatcaatgcctgggaccctggctgcctctgggggtagctggtggtgccaagttgccccagtctctggcttccttgaatttcaagtcctgtactttgagcatctggggccctaggtaaatctcagccctttgggcctatttccctatctgagggaagtgggtcctaccaccccagttttggcaaagacagacagaaatgactgtcaaatgtgtactttacatggacagaggacccctgggttctgggcatgagtatggggaagaggagcaacttccgaacatgcaggctgtagcttcaccygggccttgaactgcctgcmtctcacagaccactgsattgcattagggcctcctgagctggcctgtggccgtgcctgatggggcattcccctctccagctctgcctgcatcagcccctctgtggctcctcacatgtgctctagggatggtctgttccttccaagcacagatggaggatgcccaggcaggtcactctgccttggcagcttcctttgatgcagatcttgaggtttgctcctgcctatgctggcagctggacagctgatcctggatggtgctggctgagctgcatggagttgaagcctccagctctactgatatttagcatcaatacactccttggccagggacagagtttatcaagagtcaggaaaactaattatgagaataataagaataatatcctataattcattatttktagtgcattactgtttatgaagaattttcctatacacactattgcaaccctcacagcagcgtgttaaggcagggggtgttatcttcagaggagataggctcagagaggtaaaggagtttgctgaaagtctcacagcagggaaattgcatagaggagttttctacctcctgttggctaattctaaccttaacctatagtggttgggggcagatggctttatcattggcattctctgctctgggggagacaagttccctatcctttgctcctttggggagggagtggcttctttatctagcccctcacctggcctgggctcgggacagttattcccactgggcagtccaggtgcaatctgtttttttcctgggagaagacaccgctgctctttttaatattcctggaatctctgaagtgccgaggaaaatgaagcccatttcrgttaaattttaaaaaattgttgaagtgctagccatgtgccagggactgttctagacactcagcagtgaacagcacaaattaaagtctctgcctgcatggagtttctattggagtggagaagacatcatatctgagataaagaagtgacatggtttgacatggtggtaagtgctgacgagacaaaaggaagcagggaagagcatatgagatgcggggccgkcgcrgggttggattttgggcaggaaggccagcgcaggcctcygtgtcttttgagcccatgtgtgctcacaaggtcaggggcactttgccatccctcaatcctgttttgcagacttccaccctcctccactgcccmaggaagacccctactgcctggatgatgcaccccccaacctggattacttggtccayatgcaggggggcatcctctttgtgtatgataacaagaagatgctggagcaccaggagccgcacagcctaccctaccccgacctggagacctacacggtggacatgagccacatcctggctctcatcaccgatggccccacgtaagctagyttctccgcggctgcctgtctttgcacaggtgctgttctgtaggaaggagatgagaaaggcctcacccctctgccctgsggtcccctgtacttaaagcatcccagaaagagygcggtttctcctttcctcagtgctttgcgggtttctgcaacagttttccttcataagctggcatagcctttgacttggtactccctgtccccccttttgtttttgaggcaccatcttgctctgttgcccaggctggggtgcagtggtgmgatcttggttcactgcaacctctgcctcctgggttgaagtgattctcttgcctcagcgtcctgagtagctgggactacaggcaygtgccaccatggctaattttttatatttttagtagagacaggggttttgccatgttgcctaggctggtctcaaactccagagctcaggtagtgcacccaactcagcctcccaaagtgctgagattacaagtgtaagccactgtgaccggcctccctgtcccttctgcgtgcatagtgtggagcctctgcttgctggtagctacctgggtgcctctgaatggctgtcatccctctccccaggcaggacagcagccttgcagagagttaccagcccagagcataactatttggtgaggagtgatgaagacattgcttcaggccttgagttttctgggtttctggaggggagcatgcagggagcctggggaactttgctcatgggcatgrtgcaccatgatgctcgtgggcttggctccagctaacctggtgggcagccatctttctgaatttggcccctcacttcttggtgggcacttaggctgatcagtaatacctggactctgtgagcctcagagtggctgtgctgggagtgggagtctgggtgagaggaggtgctagtcactcctgaggaccttctctcttgttttctgggaatcttgtgatgccagtctcsaaagtagcatagtgagcccaatgtggatgggcagcatgattcttagtcctccctgatctgagggcagaactaaggcatgggaagggcaggggyggttcctcagaggctgtcctcagccaggtgtgcaagtagtggctgtcccatctgggaggctgtgaggatcctgcctagggagagagactgagtgagatggcctttaaactcccttccgactctgaggctgtcctgtgctccgtccactctggggcttgtctgggcagatggatgactgtgctgttgcagtgccggcagatgctcttatggaagtctacgtgattagatgccaaggaagctgctgtttgttttgggggcctgaggaagcagggtagcgtgaattgtggtcgaaggttccatgcggctgtggatgcaggtgtgtggctaggcacctaggctgtgtgtgggctggcagttggccacagcagtgagcacccccatccccaaaggcctttgctggctgataaatcatgggccccttctctgagttggtgggaatctgggggcatcagtccttacagagatttctgtctcggtaacaaatatccctacagtcccaatccgcccatgatgcaaaatatcctcctcttgtcgtgaagcctcagagttgagagatccttgggccgtggccattaggtcagggggctggttcctctgcaacccaaggtgggcaggtcatgccttatagtttgactgtgttatcaatcctctgggcaacaaactccttcttcaaggaatgacaagtggctgaggatagaaaagaggaaggaaaggaggagatgaaggagggagacttccactgagcatcyactctgcttggastcaggccctttcccaggcataaaccagtttaacccttacttcagccttgggtgttaccacctgatatttactcatgggaaatggaggcttgcggttaattccctaaacacataaacaagaagtcaaaacacctgtatgaggtcccagagctggccygctactgccccatctcctgactctccactgactttatagagtctgtggatatgactcaacagttcagcagggtctgtagaaagccagaacctcctcattccgccctgctccgtcctgacccttccagccagggttggcccctgcagatgctggaggcctccaaactggagagctcgatgcgactcaactatggtctctccccatctccaacttgcaggaaaacctattgtcaccggcgactgaactttctggaatccaagttcagccttcatgagatgttaaacgaaatgtccgagttcaaagagttgaagagtaacccccaccgggacttctataacgtgagaaaggtgcgttaggggcgagtgttcacagcygcctcacccggtccccctcccagcccatgggatgccctgagccagtctgaggcttgtcccctgtgagaacttcagggctccttgctaagggcggccttcgtggccagaggggtatgaagcatatgtgcagaaggaagatgggtgagctgcatttgtgtcaggctgggcctcagacagcacttgaatcactctaggtggaaacatttgtccgcattgtatatctgttgggatgtgccctcttccttggaaaatagsgcacagcctattaattggtcataaaagttgagcacagcctacttttaaggtaggggatgtattagagtcatcaaagaaagacacagctgttaagatctctttggtcccctccttgtgtccatgtgttctcattgttcagctcccttataagtgagaacatgcggtgtttggttttctcttcctgtgttagtttgctgaggatgatgscttccagctgggcttaatacctaggtgacgggttgataggtgcagcaaaccaccatggcacacgtttacctatgtaacaaacctgcacatcctgcacatgtatcctggaacttaaagcaaaataaataagtgaataaaataaaatttaaattccctgaaaaaaaaaaaagatctctctggagatgggagtttgtggttttgcatccttcgggatcatgtggatttaaagaaaagcctctgatatgctcagatctctgcctctcttctcccaccaaggggatggcagccttgtccggggctcctggcagtctccgcctgcaggggccgcaactgcggtaggagcgaaggttaaatgatcatggccctagcctttccattctcttttgctgaagcgctgtgcagtgaggcacagggtcagtgctaggcagggggtgtttgatggtgagcaagagtcacttcctgtcaaccaggtggctttgagggagaggccagaactgagctgacttagagtgagtaggagcttgccaggcagagggtgtggtaggggaatggaagtggtggcattccaggtagaggcacgtgatgtgcaaatgtcaggagggagggatggtatgagagagtcgagagagtcagaacagtgtgttgrcrtaactgcaagcagtgyggtgtggttggagctcaggcattgggagcggggagcagcgggttgtggggagagtaaggctgcagagatgtggggaggtcctggatcmtgcaggkgctgtgggtttcccacagaaggcagggaggtgggccggggtgtggtggcgagctgggagagaagctcctgggggaagagtcgggatcaggctttgcttggaggagggatggcyaaagctgggtggagtcacagtggggttgccatctccacaggagctctgtcccagctgggaacctcttggggacttcttctttttggggtcagctttgataagggagggtaggccaggggaggatgtggctcctctgggaaagcccagctccagcctccctgaccccctggctgggagcatatcagcaatgcagatggaagaccctacctggaggccctaagaccacttctgttacacgccaggggtccaacacagactcccacttggatgggatcaagagctttaagaagtgagagtttggcttcagctcatgtgccctgagaggcttacagaagtgttttggggatttccaggcagaagtgaaaggtgttttagacaccacttacgtgggcaccctggcattttcaccttcaagcaccatttgttccttctctgtgaggcttaggcgttcagacaggtggatgcctccatcactgtgtgaactcctctcagccctgcccaaagaacttcacacgcctagcacatgcccaggcccgtgttcaaagaaacgccttgcccagcccgatgcagccctgccctgagcatacgtgaatgctctgggcttacctgcttcctgctgcctggggccaaggtgtcctcactggctgtgctggcactgacactgttttcttctaaggtggggccccagtgggtgttcctgggtctaccagctgccctctggccacaacatgagaaacagtcctggcgtggggctagggtaacaaatcagagcctatccccagggttctcctgcagtcttggggttaatgttttctctggacagagatgaccttgatatctatgacccagtggcctgttcttaggcaccayagtcagtccataaacatgggcgcaggtctgctatgagtcaggtctgtgcccgcccctgggtgctgcctacttgatagcactctgtctctcttttttttttttgagatgaagttttgctcttgttgcccaggctggagtgcagtggtacaatctcagctcactgcaacctcagcctcctgggttcaagtgattctcctgcctcagcctcccgagtagctgggattataggtgcctggcaccactcctggctaatttttgtatttttagtagagatggggttttgccatattgcccaggctggccccgaactctcagcctcaggtgatctgcctgccttggcctcccaaagtgctgagattacaggcgtgggtcaccacacctggccttgatagcactctcatagcctctactatggggaggagagctgctttctaaaatccagaatgggctggatgatggcctccgtatgtctaaagtggctattggtgtccctggggcagacaagggctgtggtctgaggcaggagctgcgacgtggccgtggatctgtgtgggtggtatctgtgaaggcacctgtcacactacagcaggtgaagggctgagacaccccgaggcccagccagcaggactgtgtgactgagacacttgttttctatgcagaagcaagacagaagagctgagtgtgtttgctgcttgggaattgggtagaagtaggtgacatccactgtggtttaagtgtcatattaagaatagcaaataggttttaccttctgtgccaaacctgaccaattaggggccacccctaaagcttagtgaaaagagtgctgtgttcgattattgatgcctgccatgggtatggaaatggtcaatgttggcttaggtcccaggtctggaaactctgctctttctttacatctgaggtcttaggtgaacacggggaatgcacttggatcctctggtgaactgaaaacactgacctccaatgaccttcaattattttgttcctaaaataatcamccttgagttctgaagtttggatggggtgcttcctggattgtccagttgttttcctcatttatcttgtgactcatgggggtaaggacaggctgacccccctgtggtgtgtcattggtaagccagaggacaggaccagaaagcccagaatcygctgagtcatgctgaggtcattgtaccaagctgtgtccagctgagctgagccaggctgaccttcttttgtgcatcccaygtgagcccagcctcatctctgaggagcctgggctttggggatgttttagttttctgctttgctttgtttccccagtgtccagtggtctgtctttctggtaagaatggcaagattaatggcaggaaggatgctgatgagtgagtgctgtggctaacgacatgggctggctggcataatgctcacagaggtccagtggatcaaatatctggtttggcattacttggagatgctcagccagccrtggacagcattccctgccctgaggtcagccgcctcctcaccccagcccgggctgagcgcccagtcggccgcagcagtagctccagagtgtggtctaatggctgtcagcagcctggccttgaggctgctgtcgtcctcccccggagctcccataggtcccttgtgctcagggagggggagtcagtttacccatagtgacttgaggccatccctcagcttagctggggcttcatttccttagggcttgtggttgtcctatgagtgaagcacagtgaaaaggcagactggggatgaggggttggggagatgggtaggatccaggcaatattagcagagccctcatcctaagattaatgaagagggttcagtaacagaatcaaattacatttaaagaatcccttctagcttctgtgtatggagaatgaattgaaccagagcacaagaaaaaggaacaagaccagttaggaggtcactgtgaattcaggcctgagaacatgcaggcttgaactcccgtggtggcagtgaggttggagaatattgtatggatttgacatccatttggaaggtagaactgatgagactcactgagggaagggagtagtaggaaggccaaggatgactcccagtttttcagcatgaccagctggattcaggacacaccatttcctgggattccagaatctgggagamaatcaggtttgggctggggtcagagatggagagtccacttttggatatattaaatttgaactgcctttgggttatccagatagagatatcaagaaggcaatagtatgtacagttctggagcttttggctggtggcataaatttgggaattggtataaggaaaataattaaatgcacagaaatggaacagatcacctttggagagaatttatagtgagaggacaagagggcccaggaccaggcatcaagaaattccattattaagaggtctggtagtgaggatgagctgactaaggaggctgaaaaggagaggacagagatgcaaggggtcggtctggtatcacaggacttagcatgatatagagggcatgagaaatcccatgaggtgttttgagaccttgctgggctccttctgcaaaggtgccttctgcaaaaaactgcctttccctggaatgtggggagaagtctaagctgactgttcatttctgcttcttaggatttgctctaagatctttggccttgggccccacagcttgagtccatatgttggcttagggtcagtagagcggcttccagtagagtggcttcttcttgggacttggatgccctggagtttgggtgaggtgtaactagtcaaggaagggtgtgtttggaggcttggcctttagtgtctgttcttttcattcattcccacttggaggtttgctttgggaatgctctgagggttctgagagggatcaatgggaagagtgggatttgatgggccctcagggttatcactaaaactgtgagaacctgtcgtacctgttaatttgttcattcattcatccattggttcgactttgtactaggctctggggtaggtgctgaagacttagaggcatcaaacatggcccttgtccttgaggagctcccagtctagtgaaagcgtagacacacaaacgttagagtgatcgggacggtctgcacaacaatgggatgcctgtgccaggttttgaggttgggcaagggaaagagcattcagttgtgcttggaggaacaaggttggctcccaaatggaggaggttgtgggaaatttctaggtggatgagatggtggagagaaaggagggcattccagactgaagaaacacgtgggcaaagggatgcagtgtactgtaccttggtgtgtggtgtacccgtaagtggtttgtcacggctgcagcacagaatggggcagtggcaaggcgagagttaaggcttgaaataagccttgaatctcaggccaaggtgcttgggctttatcttgagactgatgggcccataggtcatttgttaactggggaatggcctgatccaatctgcattttaaaaagatttcctggtgctgtaaggaggtggaatgcgcagcarggctgaaagggagggataccagttccgaagtctggaggagaaatggggggtgggatccagacactggtggggctgcccggatggcccatgaggtgctggggttctgtgcacattgagggttggatgtcttaactcttgttgctaggggaggtggcctgactcagggcctggtgggcgctgtgttccaggtggacacacacatccatgcggccgcctgcatgaaccaaaagcatctgctgygcttcatcaagcacacataccagacggagcctgacaggactgtggcagagaagcggggccggaagatcaccctgcggcaggtgtttgacggcctgcacatggacccctacgacctcactgtggactcactggatgtccacgcggtgagtgagcttctgctccagtgccgccagcagacagcagccctggctggggactcagccccctggaaagccaccatgattgtgcttgccgggaggtgctacggaagcagctttctcttctatctgactgagaggtcatgcggcctcagagaataacaggtctggggcagccatgggacagggaaagagggtgtgtggcttggggcctgacaggtctaagcactaatcccactcctgccacttaggagttttgtgcccttaggcaactcacagaagcctttatttccttgcctataaaatggtgacagccatgtgccttattaacttaaaaaaatattaaaacactaaatgatggtgtaactgctatggaaaacagtatggtagttcctaaaaaagttaagtatagaattacctatgcctcagcaattcatttctaggtatatacccaaaagaactgaaagcaggaacttgaacagatactcacataccaatgttcatagcagtattattcatagcagccaacagatagaaacagccggtgttcatcaacagatgaatgggtaaacaaaatgtggtatatccatacaacggaatatcattcagccataaaagggagtcaagtactgtacatgcaacaaccatgaatggatttttcaaaagattatactaaatcgaagccagacacaaaaggacaaatatcatatgattccactgatataaggtccctagaataggcaaattcatagaaacagaaaggagagtagaagctaccaggggctggggagaggaaggtatgggaagttagtgtttagtgggtatagagtttgtttgggatgataaaaaagttctggaaatggttagtggtgatggttgcacaacaatgtcaatgtacttaaagccactggaactgtatggttaaaaatggttgaaatggtaaacgttgtgttgtacatgctttattagaacaaaaaaaacttttgttaaacaaaacattgaatgatataatgtggagaaagtgctttacaaaatgtgagtagtgatagggaatgttctattattcagtggtgcagcctctctgctcactaagtcagccatgtcctgagccgagctgtggtaacttgcaggtggggcctctgctgttccttcacagggggccttgccaaaggatcccaagctgaccgagtgaggatccatggtcctggtgctcaggagtttctaaggtttcatgcaagaattgacatagaagatgtctttcggtgtggccatacagaaggccgcctcgtaaaggtctagagaggggaacgtgcatggtggctgcagaacratgcrttgattggtgtggtctcccccctcagggccggcagacattccaccgctttgacaagttcaactccaaatacaaccctgtgggggccagtgagctgygtgacctgtatttgaaaactgaaaactatctgggaggagagtactttgctcggatggtcaaggtgagtgaaccctcagtctctctgaggcctctcaggtgcctcccaacatctgccttcagagagtgggggccctgtgtgcccctggcccyttcccctccctctgtgtaccatcagctcagggaagggtgaggtgcccaggtgcccagtgctgtggtctggctgcctgctycaggcagtgctgcatgtgccaactgcaggaaagaggagggaagggtatccaccttggccaagctcacagcacctggcctggctttcgwgtctctgcagcctgaacctagctgggtgcagatgagctccgtgtggagatgcttctgctgtggcctggttctgcagacccaaggccttcctcaccagagggggcctctcctaaagtggaacaagagcttacaggagcaggcagccctggggatttagatsagtgcttccagcctgggagcaaggtggctgggggagcaacaggaycctgctggtgacggagagtgagagtctcccatgtagctgggatgcactggggctgacccaagctcttcttgtgcyaggaggttgcccgggagctggaggagagcaagtaccagtactcagagccacggctctccatctacggccgcagtcctgaggagwggcccaacctggccyactggttcatccagcacaaggtctactctcccaacatgcgctggatcatccaggtgccccggatttagtaagtgaggtggcccgctgtctaccctgtgccctacagaggtgacaatctgtccctcatgggctgctgagtctgcactcctgaggggtagggcctgttctggtgccagcttacgcttgtcctttccagggatttttccatagaaggagtgatgaaaaagatgtctgcatgacactagagctcttttttttttttttttttgagacagagtctcactctgtcacccaggctctgagtgcagtggcatgatcttggctcactgcaacctccacctccctgattcaagcaattctttgcctcagcctcccgagtagctgggattacaggcacccgccaccacgtctggccaatttttatatttttagtagagatggggtttcrccatcttggccaggctggtcttgaactcctgacctcgtgatccacctgcctcagcctcccaaaatgctgggattacaggtgtgagccactgcatccagctgacactagaactcttgatctttgaaaaatatagatgtgcaaaggccttgggggaactactacccccgccttcttctcattgtgggttgaggatggattgtccttttggtgagccccagggtatggggagagctgtagtggtctacattgctggcctctccctggatgtcactcagacggctgctgtcctctccaggcggctggccagggtggagcccatggctccaggatgggctggggtatgtggtttagggaaacagagctgagtaacagaatgtttgggtcactgggaatttgaggattcatatctcagtctcttggtcagccagaatgccaccatcccattcctagtggcttctggcttgagaaagtgctctgatgggcatgggtaggtgtggagcttgcaaaccaaggcagaatattgcagacattgctgggagaggaggacagaggagggatctgttttctggtcccatctgacttgattctgggtgtttgatggggacacagggtgcctgaggaagtgacyggggctggtctctgacagggcagcaggctgttggatccacctgacaagcgagtctttgctgtcccccagtgacatatttaggtcaaagaagctgctgccaaactttgggaagatgctggagaacatcttcctgccccttttcaaggccactatcaacccccaagatcatcgagagcttcacctcttccttaaatatgtaagtgtgggtggtgccctaggcagggctcatagyggcagaggcaggaatggattcgctgtgagctgggtcaggcttgctcctgcccttcacgatggtrtcttaggtcctgccacctgtgttccaggcrtggggtcaccagccccaagaagctagatttctaaaaagtccccttctcctcaggggcagctctgggagtcagtgggtgtggggggatgggggtggtggtcttggggtaggcctttcccccagcagggaaggcaacagtgggcaaagactgggaactcggttcctgccaggtggggctggaaaggctggatctagcccccggcagcaccaagcagcagcctcaggtttttttttcggaaatgcaarcacttcaattcacctgctttacctcgcaacagaggtcctcamaccatgtgtgattaggtacaagcccctaaagtgtatttcccttccggatccagttgtaggagaaggagaggagcrgtctgggagaggcttaaccagggagggaggcggagggggcgggagccggtcccaccctccggatgcctgggatcgagggggtatcagatggtgatacagrccagtgcctgstgatggatgactttctacagggagaggcacagcggggagcccgagggctggggcacggggaaagaattgagtctgtgtgcccagaaagtgactggacaagctgagggacatcatcaaatttatgttttagacaaacatattctggctgttgtgtggagwtggcccagaagagaaggtagctggaggtgggggcaggggtgagagtcaggggcctgcctggagacaggaggggagcttgacccagcggaaatagctcacactcgtgcgtgcttctgcctggcctggtcagacgccacaacgtgatctcacctaagcctcacaattaccccgttactatcaccattttgttgttaacagtaagcggaattattatgtgcttggtgcgtgttggacacggtgttgagtgctctccctggattatctcatttaatcctcaccaaagccctgtgaagctgctagcttcaattgacacacaaggaaattaaaacagatcataaagctaaaagtggcagagctggaatgcgtttccaggcaggctgactccagcgatgtaccctgaacccctattctatgttgcctcccaagtgagaatagtaaggtgcacagcagctaccagcttgcgtctctgaggtgtggcagcgcagggactctgcacaaagtgtggggcttggtgagaagcggtgggcgtacacctggcaggacctggacagagactgaaggaggcactggggggagtctaggatgcctcccaggtgcctggctttgcaggagcatggatgatgtgctgtccgaaggttgctgccagcaatggaggaagagcaggtatggggaggaggaggaagagcaggaggaggagacaacgcattttgcacccgaggctgtgggagatgcagtggtgaggccctgcttcagctggatagagctctgaagaggggctgaaattatccgcatgccaggccccagaaagttcgggtgaagtatggagctagtgagcacagagcagagctcaaggtcctccctggccccccaaacccgtctagggagtgcttagggtcatagcagggaccctgtcatttcctttgacacacagggctctgtgacacggaagattctggccaagctgccttgctcctctgggcctttgctgcccccataggaacaggagaggccagcagacctggctggggcctggggcgtgggctgggagccctccagtttgggccagttgtggattaagggggacagtctctttctcccatctgctattcagaggcccctttgcaaagcactgccgtggcctggtagcaagcctcccctgtgcgctgagagcccgtaccctccatgcatgtgttcttggttggggatgacccctgggatcagccagaaggctccagtgactcaggagcagccccccaggggtcccagccaaggtagaactgcagtggaagggtgggggtttcctgaggctactcaggcccatctcagagggcagctcccagtggggattggagagcagagctgcctcccaggagccatggcttagcccagcaaggaccctcttatctgtctgtgaggcagctggcgggtttctcctggccacacctggacatgccctagagtattctctacctaccgccccaaagagtgcagacccagagcccagaacctgttttttttgtttgtttgttttttgttttttttagatggagtcttgctctgtcacccaggctggtgcgatctcggctcactgcaacctccacctccggggttcaagtgattcttctgccttagcctcctgagtagctgagattacaggtgcacgccaccatgcccagctaatttttgtatttttttttactagagacggagtttcaccatgttgggcaggctggcctcgaactcctgacctcgtgatctgcccgtctcctcctcccaaagtgctaggattacaggcatgagccatcatgtctggccaaacctggtttcttgagcaactttcttaattgctttggccctggtttgctcaattgtaaaatggggctggcagccaacccctccctcctgggttgctctgaatatgaattaactgacgtgagtaaagtgctttgagcagggcttgatgagtgatgtgtactaggacccttttccctcatcgcttgtcgctgctgctgatggcaatggccactcctccctgcaggctggcctcggcatagcagaggggcaggtggtggccatggctgctttgcccttcacctggcttggcagtttcctccactgtcaccaccaccacacaggggcttggcactctcctgtctcacctccagagtacctatggaagctccgaaggggcagaccttggtgttgtacccacttttcatccctgggaggaatatggcctcaggcaggccaaggggtccccagctgaggtgtgaacctgaggggcccagacccacaggcctctggcagctatgagctctgggaggctgaaccgaggctgagtcctggtcctgccttggcctggtgctcaggacctctcctgcccaggtgacggggtttgacagcgtggatgatgagtccaagcacagcgaccacatgttttccgacaagagcccaaacccggacgtctggaccagtgagcagaacccaccctacagctactacctgtactacatgtaygccaacatcatggtgctcaacaacctcygcaggtgcgtgaggcctgccctygcacatgcttgggttcatgtgttagtacatgcacrcatgcacacacatgcacacacacatgcatgtgatccttgtgtccgtgtgcacctgaaccaacatgcatgtccatgtgcccacacacctcaaaacacanagcactttccagcctgctatatgaggcatgtctccacatgatcacacanatscaaacatgcccaccataacacacatgccagtacagacatatgtcatgtacagtatgcaatgcagccacagtccacacgtgtccacacatttatatgtacacacaccagggcacactccaygtgtacctgtacatccctgagataatggaagcataggacatgctatcacacatgcacggtcacttactgccacaccaacaatgtccacacgtgcatattttcgttcagcaaatcactgcatctggcatgcgataggcattgccctgggcactggacaaataacggggaacaaaacagactaaatccatgcatgcccttacaggcagaggctcctaccaatacacacacagacgaggcacacgtggccaggagttagctgcccagggcagcaggacactgagccattcccttccctacaagtcttgcatcccactttcccctgctgggccctggggtctctctagctcagcctaaactggtgctagttggtgggtgtggaggtttcgaatggggtcctgattgaaagaaatggcctggcagggtggaggcagtcctgggctgagcttttggagatgggggctctggttctggctttgctactgacctgttcagtggcatggaacatagacttcactctccgggccttggtttgcccatttccataacacagaggtcagactctgtggtttctcatggccttccctgctctggagttctacgaatgcgggacacaaggccaggagaggaattcaggagagtggctggagggcacagcagggtctctttctactgcgaggcccactctctgcccgtagaggtgatgcttcttggttctaaggggccccggggcctggacctctgcattttaggaggggtagtttccagggtgcactgggtcagcacagctgaccatgggtggtcattccccccggagctggccctgagctgtggctgcaggccccaggcagagccaactgkggggngccttcctgattcggaaaccccttctcttacagggagcgcggcctgagcacgttcctgttccggccgcactgtggggaagccggctccatcacccacctggtgtctgccttcctcactgctgacaacatttcccacgggctgctcctcaagaaggtaaccaggtcactctcgggagcccgtcctgagtgactgccctgccctgggctcctgggaggctcaaccagtgaggccagaaggctrggccctcttctgggctgggatgtctgtccttatcttggttttatttttaattatgaaagtaatataatcaaactcatcacaattttgattttccaaaaactggagaaatggaaaaaagccagcccttatgctattacattaatagaaatagccattattagctttttagtatatctaatttccatcttttatccacagcatatttttaatgtgtttattatcataatgaacacagaatttggttcctgccttgtcccttactgttgtatgacaagcattttttgatgctgcaacrtaatatctatgctcctttttccaaaggctgttgttggatgaagggtctgccactttgtctgtaattgactcaaccagtccacactagttgggcacagagtccatccaccttttcactggtgtacccttgagctctgtgcatacagtcttctccgtattttggatcactttccattggcacgatgtttgatcaaaatgctccctttccctgatcccggtgaggtgtaaccatgggtcacatttttgggtggggtgggtgctacagtagaaaaccactctatcctgggcaggtccacccctcccatcccttcagggatcatctcccaggagctggagtgtttatagtctcaacctggctgtttgcagtcaaagcaataaaacagctagaggggggcatcttctagactgggtccgtgcctaggagaaaggagctgaaggtgtaggctggagtgggctgcccttcctgccctgagccttgcctccagtttggagcaagaatgagcacttccaacagtgggtagaggcaccagggagggctggcatgcaatgtaggaatgagatgaacagtggggaaggggagagtgggtctgagtgtcctggcttcgaggaactcgggttgaggacttgggcagacatggttcagacccctggtttccactggtgaatgcttcttcccttcctttctcccttcccttttcccttctcccctctctggcacttgtcacatgagttcggtggttcttttgcagagtccggtattgcagtatctctactaccttgctcagatccccattgccatgtctcctcttagcaacaacagtttgttcctcgaatattccaagaaccctctgagggaattcctacacaagggactgcatgtttctctttccaccgatgaccccatgcagttccactacacgaaggtaaggactttggggtgaggacagtagtgcttcagtaggcaccagtcctagcctgtcctcccatttcaggaacctgagcccatggcttagttctgcttttggggtggggttggtggcccagtgaaggcaggaaggaagccactgttgggggaaaattgtgccatscaggagccctttctttggggttcttgaaccctcaaaggcacaatttagtatctttgccttcctctattttctctttctttgacatttatgagctctgtgaccttggtaaagttattagatttctggatcaagttcttcttcatctgtaaaatggagataaaattttctctgtccctaccctgtaaggattcatgaagataatgaatcaaaggttctaacatagtgtctgcatatattcaaaatggttgctactttttaaatcaatgctattataatttctacactttgggtctctgggaaaataaaagaggaagctaacagtggtgtcatgcatggggactagccgcaagtatacccagcatgttttgatggtgtcgacaagaccagccattgcttaacaaaaacagaagcaccagagtcttttaggacagaggttctccaacctcttggtctctggacccctttatactcttaagaattgaagctttcaaagacctgttgtttatgtgggttatatctactgatatttaccatgttagaaatgaataagaaattttaaaatatttattatctcatttaaaaaccacatcaataaaccaatgaaatgttacataataatgattttttttctgaaaagtaacagtttcccctgcctttgttttgcatttttaagcctctttaatgtcttaatggaagtcagcaggactcttctagccacttctgcattcaatttgtttttaatcaaaatatgtaaaaatagaaatcttgcctcatgaaaatacataattggaaaagacaagacctttcaaaaggtcttaggaccctcaggggtccttgacctgtacttcgagaactattgctctaggctacagcggcagtggggtggggaagaggtcacagacggcttgtgatgaatagacacttcacatcccagaagggaagcaaaaccacagctcaaacccagatcattctgggattacaccattttaccacttatcctatgatcacttctcattttttttttgatgttccatctctgcttttagtactttactcatctatctatctatctatctatttatctatctatcatctatctatctattgcaaacttaagaaaatagtgtgttaaaaagaaaagctagagggcaagtgctaaatgtggcatgactagagggcttgtcacaggagagcagagactgccatccctgatgactggcacagggtttcaacatgaggtctcagtgctggtcaatgaataaatgtagaggcgtgattttagatctctctttgataaccyrtgattttacagaagaaaagatcttaggctttgaaggtgtgatgtttgatgatccaggtgccatttagtgaggaaaagttaaacccgcagtgtctgatgttgttagctttggacatgtgtgaacgattgacatggatatccycccttctaatccacatgctttgggggaggatctaggaagcacttatggaagaatatgccattgcagctcaagtgtggaagctgagcacctgcgacctgtgtgagatcgccaggaacagcgtgctgcagagcggcctctcgcatcaggtatggagtgtgacggtgctgcctgtgtccctcctgggaaggctgcctgctgtgtgccaggagccttccaggcactggggatctgtgatgaacatagcaggcagggcctctgagacactcaggcacagggagagaagacgcggcagcctcctgtgttttcatggctgcttcctcacccttctcagacctctacgcctccttggagaggccttccctgatcgcccattctaaaatagccacacacttgctattattctctatccccttaatcagtttttctccataccatttattcctgctgatgtttagttatgtgtttttctgtctttccctctagcatgtaagctctgtgagggcagaggtttgttcagaattatatccccgggccctagatagtccctggcacatagcaggcgctcaatatttcttgaatagatgaacagtatctagactgaataaaaatctagactatgggactcagacatctgtcattttttaaaaagcctgatgaggagctggcactgagacccatgttctgatgtacgttaggtcccccgacacctccctgggtgatgtcactggttgggaagaggttgcattaggggctgtgctcgtcggatgatgatgcagcagagttaaaggcttaagattcttttcatgcgcagtgtggtgccttggattggccctccccaggaacattgtccttgtcagctctcaggagggacttcttaattagagtcttacctccttccccttgcctttcccatccccagcagctgctgcagaccttatctttcctctctgatcaaggaaagcacagccaggaatgaagggctgtctgaggatgactgaggttgtcagggtgacatccttgaggacacagaggccagcaggaattttaagagttctgtggggataagatgtcctgaccaaagatctgcttcagggggactagtctgacttgctgtgactgatgtcaaagctgcccacatggctatagaaagtgaatcaaaagtatatagtttcatttgtatttctcttggtccacaggaaaagcmaaagtttctgggacaaaattattataaagaaggacctgaaggaaatgatattcgaaagacaaatgtggctcagatccggatggcattccgatatgagaccttatgcaatgagctcagcttcctgtctgatgctatgaaatcagaagagatcaccgccttgaccaactaggtccagcatttgacatgcattttaactttttggttcaatttcaagtctgctgtggctaatagtggtcaagattccgaactaggactttcctctgtgaagaggatgcctctgaagaaattttaaactggtgattttggttgcactgctcactttaagagttaacatgctcacttgttagtatttctgagtaacaagatggtgacttctccttggggatctgggagctgagcacttgtctatacttgttcctaattttccaagtatttctcttgaaactgccagtgcctgaactgttggggccaggattttccctggtcagatgccaagtaacatgtggttttctgccatacttttctccattggcccaggtaggctaattggtagttgttcatttcagcctctggatggctggctgccttaaacacaatcaatttcaaagctccatttcataaaggggctactttgaaggagttaagatggaagacttccttcttgacaaattgtgtttttagtgaatttcttaaaccgttttatttagccctccttccctctttctagttggaagccaaatgtactcatgaaaacagccactcctattctgagtcttggtttcttcacctagaaagtgagggtttggactagatgagtggctttcagggtgttctgtgaatctcctcatgaatactttagggtrggggagggaagggagtgagtgatgctcaggggctgtcaaagtgactgcgttcatcagttttacactggggctgctacataatattttcatttgaacgaagaacttcaaaaagcacaggactagatgatctctgttccttttggctctaatatgctacaactgtaggccaattatcactttaccaattaagagttaggccagataagtgaaatttaacttaagggcacacagctaataagtaataggcctaaactggatttccttattccaaatcctgtcttttccccactattccattagaccccacaaatgttagttgtgtgtgtgtgtgtgtgtktttttaatcactgtaaccggrtgcatttttttaaggcaraatttctcccttatctactrtgatgacttcagaagatacaatggtcccaggggccaagtagaaagcatttttaaagattaatctgaattaagctttatcagtgtactctttatctgtgttactagtgcctggtatgtagtaggtgctcaataaatgcatattgaataactaagtgaatttcttttggcaactttttaaggacatgtgctcttagtacttaagaggctgctcaaggaccttcctatctatttctgtggtcaaattcagactacaggaggtctttttgaatcattatagttagaagaagaatccagtttctgcctgtgaacttatttgactttagattgtctcatcttgtgactttataatgcctgtcccctccactggtcaattcagcatatggaagtataaatgcagtctttttactaggcagatatatatgctatcttacagctaattatgaaattgaatgaaaatccattgttatcttagggattagttttgaaaagcccccrtttatatacatttgccctaacataggaagtattgtgtagtttctcattgtcattttatctgtatcaagtatctttttttaaattgttaaataaagtcagctaggactgtggctcaatagtttaaaactatttaaagataatcatatttaaagcaaatgttaaagatttttactcttaagattgggcaccatgaaaagctatcaataataatagctaatttatcttttactaagactccgacatgaatgacattcactaggaaaactcaaaattttcaaactgaagctcaccagacccagaagataaatcttcctttgttattttctctaacttctaccctgttatagttcatgagcaaagctatacatgttcctttccttttcccggggtattattttagtctgtccagctaacaccttgttgatatggactctagaataggattgcgctgttatccctagggtaacttgttccgttggtcaagttattggatcaattaaacgtggtaattcgctttgactggtgaagtctcggcatgtgttgctcggaggtcggattgtgctccgaggtcgccccaaccgaaatttttcacgcaggtttgatagtttagggcctgtggacttgttaagtgttgtttgcgttaatgaattaaagctccatagggtcttctcgtcttgttatactatgcccgcctcttcacgggcaggtcaatttcactggttgaaagtaagagacannnnnnnnnnnnnnnnnnnnnnnnnnnnnnnnnnnnnnnnnnnnnnnnnnnnnnnnnnnnnnnnnnnnnnnnnnnnnnnnnnnnnnnnnnnnnnnnnnnnnnnnnnnnnnnnnnnnnnnnnnnnnnnnnnnnnnnnnnnnnnnnnnnnnnnnnnnnnnnnnnnnnnnnnnnnnnnnnnnnnnnnnnnnnnnnnnnnnnnnnnnnnnnnnnnnnnnnnnnnnnnnnnnnnnnnnnnnnnnnnnnnnnnnnnnnnnnnnnnnnnnnnnnnnnnnnnnnnnnnnnnnnnnnnnnnnnnnnnnnnnnnnnnnnnnnnnnnnnnnnnnnnnnnnnnnnnnnnnnnnnnnnnnnnnnnnnnnnnnnnnnnnnnnnnnnnnnnnnnnnnnnnnnnnnnnnnnnnnnnnnnnnnnnnnnnnnnnnnnnnnnnnnnnnnnnnnnnnnnnnnnnnnnnnnnnnnnnnnnnnnnnnnnnnnnnnnnnnnnnnnnnnnnnnnnnnnnnnnnnnnnnnnnnnnnnnnnnnnnnnnnnnnnnnnnnnnnnnnnnnnnnnnnnnnnnnnnnnnnnnnnnnnnnnnnnnnnnnnnnnnnnnnnnnnnnnnnnnnnnnnnnnnnnnnnnnnnnnnnnnnnnnnnnnnnnnnnnnnnnnnnnnnnnnnnnnnnnnnnnnnnnnnnnnnnnnnnnnnnnnnnnnnnnnnnnnnnnnnnnnnnnnnnnnnnnnnnnnnnnnnnnnnnnnnnnnnnnnnnnnnnnnnnnnnnnnnnnnnnnnnnnnnnnnnnnnnnnnnnnnnnnnnnnnnnnnnnnnnnnnnnnnnnnnnnnnnnnnnnnnnnnnnnnnnnnnnnnnnnnnnnnnnnnnnnnnnnnnnnnnnnnnnnnnnnnnnnnnnnnnnnnnnnnnnnnnnnnnnnnnnnnnnnnnnnnnnnnnnnnnnnnnnnnnnnnnnnnnnnnnnnnnnnnnnnnnnnnnnnnnnnnnnnnnnnnnnnnnnnnnnnnnnnnnnnnnnnnnnnnnnnnnnnnnnnnnnnnnnnnnnnnnnnnnnnnnnnnnnnnnnnnnnnnnnnnnnnnnnnnnnnnnnnnnnnnnnnnnnnnnnnnnnnnnnnnnnnnnnnnnnnnnnnnnnnnnnnnnnnnnnnnnnnnnnnnnnnnnnnnnnnnnnnnnnnnnnnnnnnnnnnnnnnnnnnnnnnnnnnnnnnnnnnnnnnnnnnnnnnnnnnnnnnnnnnnnnnnnnnnnnnnnnnnnnnnnnnnnnnnnnnnnnnnnnnnnnnnnnnnnnnnnnnnnnnnnnnnnnnnnnnnnnnnnnnnnnnnnnnnnnnnnnnnnnnnnnnnnnnnnnnnnnnnnnnnnnnnnnnnnnnnnnnnnnnnnnnnnnnnnnnnnnnnnnnnnnnnnnnnnnnnnnnnnnnnnnnnnnnnnnnnnnnnnnnnnnnnnnnnnnnnnnnnnnnnnnnnnnnnnnnnnnnnnnnnnnnnnnnnnnnnnnnnnnnnnnnnnnnnnnnnnnnnnnnnnnnnnnnnnnnnnnnnnnnnnnnnnnnnnnnnnnnnnnnnnnnnnnnnnnnnnnnnnnnnnnnnnnnnnnnnnnnnnnnnnnnnnnnnnnnnnnnnnnnnnnnnnnnnnnnnnnnnnnnnnnnnnnnnnnnnnnnnnnnnnnnnnnnnnnnnnnnnnnnnnnnnnnnnnnnnnnnnnnnnnnnnnnnnnnnnnnnnnnnnnnnnnnnnnnnnnnnnnnnnnnnnnnnnnnnnnnnnnnnnnnnnnnnnnnnnnnnnnnnnnnnnnnnnnnnnnnnnnnnnnnnnnnnnnnnnnnnnnnnnnnnnnnnnnnnnnnnnnnnnnnnnnnnnnnnnnnnnnnnnnnnnnnnnnnnataaactgtatggggtgtctttggggtttggttggctcggggtatggggctagcagcggtgtcctgcaagcttttctgacatcttttctatagcactttgtgcttttattacattgctatacttaattggccttttgggggacaaatccctactttcctttgtgtttgcaactggaataagaggcaattaattgtatactggcttaggtttctaaagcaacagtttttgaggcagttatcccttctttatccttaagggctcaagttcactttatgtgttacttcaaattgtaccgctgaaaccgatcgacatcattgctctttgcctcgtgaaaacaaatcacagctcctgggttgtgatttttcacggcctcttggattaaacaagagccgaaagcacttttctcttgctttctctttacttctgagtgttggtgaaacaatattcttcatttcctgcgtttgagacatgactgaaggtgatatacccaaatactctgcctgaactatgatcattataaagaacaagtgtaactaggggaatactaaccagataaacagttccttggaaatttttgcaattagtaagatagaagatgacagagagtaagactataaacagytgcaagcgtgtcaaaacctatctctgcaaaggcttttatgtattttgacagtaaaatgtgcatttctccacagtatgatgatacagtcaatttaactaccaactgccactcattcttatgtccttgcacttttcagcactaagattctacgatgtttctctaattacattcttatattttggaaatgattttacaaggtaaacaaactacaatagggttgagcattttatttttgctgtctgttggggtaggggtccacaacccctgggctgtggacagtactggtctgctgcctgttaggaaccaggccgcacagcaggagttgagccgcgggcgagtgagtattattgcctgagctccacctcctgtcagatcagcagcggtattagattctcaaggagcatgaactctactgtgaactgcgcatacgagggatctaggttgcatgcaccttatgagaatctaactaatgcctgatgatctgaggtggaaaaatttcatcccgaaactattcccaccccaaccctggtctgtggaaaaatggtcttccatgaatgcagtccctggtgccaaaaaggttgaggactgctacagcagggtgaatagacatacgaacaaatgagtctgttgtcagctgcttaggtttgtattgtatcgtcattgtgtggcccagcatgaatgtgagtgacctgttaacttccctcatctgcaagtagttttcttattcccggatagactaagcttgacttcagacaatagcagttaaaaatgcaaattcttcagactaccttttaataaactcaacttcccaatgttaaaaatcactgaatcaaaagatattttcaagcagccttttctcccagatatatattagatataaggaaatcgagtccaatttgaaatgaattttaaaacagcacacaaacatcacaagcccccagcgcacaatataaaatagttctctaaggaatataaacatttagtatattagaatgtgaaattacataggaaaataatctcttcaattagctaaaatcacttgcgaaagattatttattgcacaatttatcagtgggtactaagaataacacagatcctattattctcaacctctaaattcagtacatagtaaaattcattttctcaaactaaggttctatacataatcggagtaaaccctctgttactgagttaggatagggaaaacaaattccttagagttcatgaaaccacttcacaaatcctagaaggcacacattatatttcctatcatagtaagtacatttaagtacttcatatttaaaaaagacaaagctgtacagaatacaaaaagtgtacatttcatccattaaacaaatttacaacttttacgattagttattacagtagaactgacctaacattcacatctaaataattatcacccagttcaatagagcgaacaaagagctgtgctcatttatttatttgataaggctaataacattttatattcacagtagatcagtaagtgtcttggagctcatattgtaaaataaaaaggtttgggccctattgagtcactgggctcattgttaaataactccttgaaaggtgaaggattctgggggataaaatcattggctatccctggaaagatccaaaactctgtaaggtaactctgttcacttttcagaaacattttaaaattaggtaatctgaattaaactcagcaagtctaatctaaaaggacaatttaaaatcttagagctggaaaagatttcagtggatcatctatcccaaggttttcaaaatatgttccatggaatactaagaatctatggaggagatacagggttctgcaaatttgacttgaatttaattaaaaaatttttttaaaaaaaacgactcccactatatgtgtgttactcaccaaattcaaacatgctggatatcaccaatgcattaatgtttttattcattgacttaatcacatttatagtatataaagtttatataataaggaaatttataataatatgacttttatatagtggggtatagggtatgtgtgtatgcacacgtgtttaaaggttctgtaagattttccttgaaaaagtttttgctgctgaaatagtgtgaaaaccacaaataaagtctcagtttctaaagtaagaacacataaacaagagtaagagactttctcaaggtcacacaaccaccaagtgcattgccaggttgatatgatggaacccctggtactctgcttgcataaacctccatagggagtagttagctatttggtacttagctgtcccattatgaatgtcaatggattagtcttcagtatttttgggggcgaaatcaagctacccctggccagatgttttyccttgaaattgatttgaattttatttgctcgcctattaaaatcctactatccagaaattctgtcatcaataagtggcaacttaaattgtgtaccctggtttaggaaaatagtaatatttgcaacttatgaatgataagtcagaaaagttacatggaatgttaaattttaaaggagataggcccttgttttattacatgccgaaatgttaatgttagaaattttagttcataagcaaaaaaaatggttgaggtgcaactgaagatcacaattccattattactatattgtttcagaatattttaatggaaagagtatttcaatggaagtacagtgaaacagtaggaatgccaaattatcttctaattttcataagtattttatgtatatacggtaaaaaagcctcactctattttcttgtgtttttttttgattaggagtctcgttctgtctcccaggctggagtgcagtggtgtgatctcggctcactgcaacctccacctcctgggttcaagcaattctgcctcagcctcccgagt

SEQ ID NO: 95059 - DNA, 60769 bp, Homo sapiens
cttttggtaagagctattctaactatagtgaagtagtatttaattgtggttttgacttgtatttccctggtgatcagtgatgttgaacatttttttttcatatgcctgttggccatttttatgtcttcttttgagaaatattaaggtattttgcccatttttaaaattaggttacttgggtttcttttgctgttgggttgtttgagtttcttatacattctggatattaacccttcatcagatatatagtttgcaaatattttctcccattctgcaggttgtctcttcactgctaattgtttcctttgctgtgcacaaactttccagtttgatgtaatcccatttgtctatttttgctttgattgcctatgtttctgaggtcttatctaaaacttctttgcctagtccaatgtctcaaaatatttccccatatcatcttctggtagtttcatagcttctgattttatgtttaaatctttaatccattttgagttgatttttataggtatgcgtgacgtaacaatggggctacattgtgagagatgctttactaggcgattttgtcatttgcacaaacatcatggagtctacttaaaacatacctagatagcatagtccactacatacctaggctatatggtgtagactattgctcctaggctataaacctgtatggtatattactgtactgaatattgtaggcaattgtaacataatggtaagcatttgtatacctaaacatatctaaacataaaaggtacagtaaaaatacattattataattttataggactaccatcatatatacagtccctcattggccaaaatgttatgtggcatatgacctgatatggtgagaggtcaggatctagtcttgttcttctgcaggtggataccaaattttcccagcaccatttattgaagagactgtcttttccccaatgtgggctcttggcaactttgttgaaaatcagttggctgtaggtgagtgaatttatttctaagccctctattctgttccattggtctatatatctgcttttatgccagtatcatgctgtttttgttattatagctttgaagtttattttgcagtcaagtagtatgatgcctctagttttgttctttttgctcagacctaaagatttttggtggttacaagttcaataaaagccaacgagggcttataacaggacttctaaaacaaattaatgcttcattagtagaagtataatgtgcagaaaaagagaagagcaggtggctttgttatactttgcattctgtcaagatgaaaaactaagagtttaaatcggactgcctggatttgcttgggtttgcatcttgactctcctatttgtagttctaaaacctgggaaagttatttacacacacactgtctctcaatttacttaaattctttcttcatctgtaaaatagtaccttcctcagggaaaattttgctgattaaatgagttaatacacatagagttcttacagtagtaccttgcatatagcaggctctatcagtcaatgagagctattattgttattgttaatattttaagacaaaccttgaccaaaaaaaatctacttagatttattagagtgacgagggcaaataaaagtccagaaactctatcacatacaaaacaattgaagaacaatagagatattagattcagtagctttacatgacaattgctccaaatattccaagagctgctatattggagaggataagacttatctggctcaaaaatagagaactagcactattaagcaggattacaaggaggcagatattatattattaagatatcagagtaattaaaaaacataatgaattgccttgtgatatatagtaagctccccattaccaaaagcattcaagcaggggttggaagtcatctgccagggatggtataaactggagaggagattcctggacttggaggttgcatccagttataagatgctaggattctgtctaatattaccaccaaaaagcggatgtatttccctttccagcctgtctgtctagatcatccctttctttaaatgcctctttattctttttctcagcatattgataaatatgtttccttttcactcaattactattaaatgtgataaatttaattccaaaaataaattatttcttgattaagctcatctaactaatgcttttgccttttataaaaataccttaacctactggtcaaacctaatagtctcaaatttggtcatagtgaaatgcctattaaagttatcttcctcttcacaaaacaccacaaaatttgatctatttatagaaataaatatatatagttttgtgctatattagatgccatcttgcactatattgtaatgaaaacaaatagtaggtatcaactgagaatatttaaagtttcccacattcttaggaaaatttgattgttctgtagtcatgctaacctgaactagtagaaaacccagtggcttaatcaatgacaattcacctgttaagcttttagaagccaaccaatcagtgataggccctcacttctgagagtcaaccaatcaggaatgaactcatgccattaactgcatctcagagtgctaaccaatcaacaaatagtcatgcttctatagctgatgttagcccatttatgtctgggaaagtacaccagtccctgaccttcatgcatcctcgaaaccctatatgagatcagcagcctgcttttcagagagattgagcagcaaagcttgcccttactataatgagcaataagtttaccatttttgttttattttagaccttaaatgggggactcatcattctttgacaattctggaagctctactgtgattgttttaaagaccttcccttggcaatattccagggaacatgggaccaacaggtacacttactgggctccttgtgcccaagtgcatttgtcctttagatctgctgcctggtgagaaaatctcaatgataacctgagatctgactggtttcattaagttctcattgcttctgtgatttacaagcaaacaggtctttgtataagatcattatgcctagttctttgtattacataattagaaaatttagtcaacaggtgcacattttagtaaacaattacacctagacccttgtaaaaggtcattaggcattttgtttgggaggtacaccattgagtaattggacataggtcttggtataagatcatttgatattttgtgtgggaagtataccactgggtagttcaacacaggtctttttataagttcattagacctttggttttggaggcataaatatttttaccattaaactgtttattcccctcctactctctgtttacttttgcttgtctatattaaaaaatcttattgtattttttctgtattgtcttatttctgatataagggagtgttccagaggaaatgaatggagatatatactccataagttaccaatccaatccaagctagtcctcagcgataacatttggaggtccagtaaactgaaaaccaatttgggaaaaggcaattggtcagatctacaaaaaactttgatgagagcatgccctgtcttgtcagtctgtgataggacacttttagtttgtacactggggtgaaagattttgtcaggtcattaattatgtggtcctttctaacctttgcttagaaagggaacccaagatagcattcacaggcacacacttttactcagtggcatctcttgttcttcttggtttcttccatgtcaaagctgcagtctccactggaagaactcctgctttccatataaaattgccatataatcctaactcttgtacttattttggtaaactgcaaaaattaatgttagaatagcaatggccatcacgtagaacttctgacatgtcaaaatgaataaattaagatatttaagaggaggcccagaaaaattaggagacaaagccccaaagaggcaatagtcagcttctttcattggtaagctaaggcttcaaaataaaattttaacttgagaatggtctctctcaaagactctgataccacctaaaacctaccctcctttcatttctctttctactcagctttacctgaccttcaacatgagacaaccgtttcttctaagttttctctgaaaaagagtaatcacattgtaaaactgctaaaccagaggggagccctaaaaagctgaatttaaaccctggcctggagcaaaattaaaagttatcatgaaagattttcctaagcctcaggggtggttgagcagaaattagttaacaattcaggattttattaggtacttattgttctggattaaacatctgtaccaaatgattcagttaattgttagtccatccaatagagaaaaaaaattataagcagcagggtaagaaaaaaattaaataactcagttgtgcaaaatgaaaaacaaacgccttaagtggacaagaaaaaccttgaaaatccagtacaaaaagcaatttcaaaaaaatctttcttttaaaagtatgttagacaaagattaaaaattgtaaactaaatgaaaatgaaaagagacttcagaaaactttcaaagagcattctggagtacactcaacagctgaaataaaagaaacattgtctttatttttttctattaaagggctcaaatatgaattcagagatttaatgagaaaaaagtaattgaaatatgaaactgacagcttagaaaatatccaatacatagctagatattttcagagagctctagaaagtaaataagctagaaatcaatagaacgtatggttctctacataaaaaaacttgccccgaaataaaaacaaagccaaaaagtcttctattttctaagaattgggaacatatagagaggggtacttgtagatattgcaagcaaaagtgtcattcaaagaaccaatgttccacgttggctaagtaacagaaagatgactatccaaaatctgtctaatggtgtttctccaaaggagacattagtacccaacaattacagtccttcctcggagtttgtgtccccaaatctcagaggggccagtcgctatactctccatcagggcatagctacatctagcatggcttaccactctatccccagcctctagcccagtgcctagcatagagtagatgcttattaaatatctgttgaacaaatgaagaaatagaggaagaaagtacatttttgttttgacatgctgtagtcccttccttagtccagagatcacaaacctctgaattgggatgtgactctctctgtcattaatcggcaagaatcatggtagaattattgtccctacttacggattctctttcccttatacatcccattgcagattcctgtcttccctttacatccactccaacatcagctgatgcagtcactaaaatggtttataagtcacatatgagattccctaaggagtttataattgagaaatgtgtggacacacaggcctcacagaatgcactggatcactagagtctctcctggtgaaaagggaaaacctgcccaaatccagtttttgtttcagtaacttcctttgagacaaagtcaggaatctgagagtaagcacctgctaagggtgggacaggggctctgtctggtatgcctctcccatgttaagagctaacaatagtaatggataagtctccagggcaaccaggaccacttccaagcattcctgtcttgggctgcctcgagggctcctctgtcctttggggagtactgattgatgcctgatgcccagaactggcccactctggcttctctttggagctgtctctgcaggcgccttctggctgccagctcggtcctagcataagggacttcttccttggcctgggtttcaccttcttgtatcaggtggcagaccagctggtttcagtcccaaatcaggtcttctgactcctcccagaaaccaaccaacttctgagcaggaaatcctgcccctccccaaagagtgggaaaccgcaaaggaagagagagatgaaacagaaggaaaggcagaggaggagggagagagagagaagagaagaaaaagaaaaaagaacatcaataaaaagaagtcagatttgttcgaaatcttgaggtaagacttttaaaaatcacattatatataatagtatcaccatttgtatcagggcctagtacatagtaggtcctcaaaaaaatctgctattgaaataattaatctatcgaaatgaacaggagggctgggctaaagaaaaatttcaatgtgaaatgctggtcagaaaaaacaagaagaaacgcccgatgagctttcaaatgtgtaggagggatgatatgataagatgcagatggaaccagaagtctcttgctggcactgacagcattctgatcattgtgggacagaaagtcaagttggaacaaaaaagttgcaaagatagtataaaaagtgtctgcatgttcttttggaattacagaaagacagcaagaattatagaaatgtaagcagtttttaaaatcggctttaaaccaatgacagagcacaaacactatgctgtatcttgggaagtacttaaatgtgctgatacctgcatgttgcagccaaacatcagccagtttaatgttattaacatttagatctagagtgttgaaaaggctcattttatttccagaagtcttgttcagtggaccaagggaggcctaaacgtgtccatcaaaattcttcatgtgctattcatctatcctttaatcctagtccagctgkgctgctcagaatactgaccctctgagccctaaacgggccttttcagagaaaatcccaacacttgtttcaggtcaaggaactagagaaacctgacaggaaagggaaataccattccccaccctcaccatttacccaaaccttcacttgccatcaatagaccatatcatccagagggttgtggcttagtgatccactcactttggagagattaaaatagctggatgcatgcttcagaaaacatctacagacgacgatgatgtgttttcacaacagttggcttttaagagtccaactcctctgacttttccaacagagcttaccagtatcagagggacacaattgaagtgtttccttcagagccagtgtttctctttggggtttgtgtgagttcaycagagtcggaagctgaaaggagggtgggaaaggtaaggagagatgaaacaatctcacttctgctggcttgccaaggtttgaaaggaactgcctccctgtcattaggatgatatgaaaataaaatctgaaaatcctagctctttctttatactaatttgagtacagctaaaagttctctgtgtccaatttctgagctagaacaaatattaaaggtaatctaatttatttctccttgtttgccagatgagggaattgaagccaagacaagggaagggccttgcccaaagtcacatgtattgtcagtgatgggagggagactggaactcagttctcccagagtcccacccaggagccttttaagaaatcatgaaaactttacaagaaggtaccccagatgtccgagagctcataaacacckcagctgctgactaaatacaacattcagttaaaagatgctcaagtaatctttccctggcagaaatagaaagaagaaaaagatttccccaatagtttagtttttccagaatctgttttataactgttaggagactagggaggagaaagatttgaggcagatttgtcatgagagaactagaatattttacattcctaccattgatcagcattttacatgtctcatttctttatgtaatcttcatattatcctcattttacaaataacattgttttaactttgctcaaatgcacagagggaataagatattatgatttctggagctcttgttggtaagcccaggatcaggctctggagagacatggctagttcagtgactgttccagccttactcaggcccctccccaacacagacccttgctctagccattcaggctacctragttgcctccaaaatgccatgctttctagacttcttgcctgaatacatgcagttacctctgcttgggatgcctttctccaacatcctcataacttgtacttagccttcaaaactgagctccaggaccacctcccagagccctttcctgctgccatggcctgtcccttctctacttcaacagccctctacacacattcctattatagtatacatcacgctatggtgagctctgacttacttgccaactttccttgtgcttgacttcaaactccttgaaagcagacaccacatattagtgaggctttgtattcccagcgcctagcacaattccagagatgtattagtgctcagtaagtatttttttaaatggacgaacaaatggaatatttcccctccttttcttcgaataaaaccatgcaataaaaagtcttgtttccatgctcttgactcttcagtaacttgggggtaagtagaagatatcactactataagcttcctctcctttcaagcctgacaagccactcagaaatagctatctagggttaaacttggcactctgaacagacattaatttctgcatcctgacaaaatgctttgatgacagtagaagaatttatatgccataagccacaaggacaaaaagactgggaacatgggaacaacagagataacaacagttaaggaatgtcaacactcttggaagatggaaagtggatggatgagtaataagtgacttagcaaacccaagactgctggagtctgagtgctcatgatgggaagcctcaggagttggaggaacaggtgggggtaaacatagcagaagacccttggcctctacagctactccagctggagaaggaaagtttattttctggagaaacttaacaaagacacaccaggctctgggacatcagacacagcagagggtggggttaggcatggagctggaaatagcgagattagagaaagactccatactgaaagatgagattccccagcccattttactggctcagctcccagaacacaaacagcctagctctacccctctccacccaccctaccccagcttacactaagcagaagaattaaggattcttccctgtagaaaggactcaaccaaagagacaaacactacagacattgatgtgtggttcctccaatgaaaccgccaggggccttctggattatcctacagtgaagtccaaaaattgacaagccctgccctcacacacaaagcttccaacagccaaggaagagactacaaagatcaccaggtgatatagtttggatatttgtcccctccaagttgcatgttgaaatttaatccccaaggttggaagtggggcctgatgtgaggtgtttgagtcgtgggggtgaatccctcatgaatgacttggtgccatgctcatagtaatgagtgaattcttactctatgagttcctgcaagaactggttgttcaaagagcttggcccctcccacccctctcttgccatgtgatgtctgctcctcttggacttctgccatgagtggaagcagtctaaggccctcaccaggtggagatgtcggcaccgtgcttcttctgcaggctgcaraaccataagccaaacagaacccttttctttaaaaactactcagcttcaggggttcctttacagtaacacaaacagactaagacaccgggcatgggacaaaagccttagatactggagacctcaagagaggaaatctagaaagccaaagaaataattatcagtaacggccacagcaacatcaatatcccccagagataagggaagatatttcatgaattatgatcaagaagccaatttttggctgaaaataaactttccttctccagcagtgtctcatgccyataatcccagcagtttggaagactgaagtgggaggatcacctgaacccaggagttcaagaccagccagggcaacatagagagaccccagtctctacaaataaaaaaattagcagagcgtagtggtgcatgccaagctacttaggaggctgacatgagaggattgcttgcacataggaggttgaggctgcaataagctgtgatggcgccactgcgctccagcctgggcaacagagtgagaccctgtctcaaaaaataataataataagataaaataaagaaccaatttttaagtatggagaagaaaaaagagctctttaaatgaaagcgcaattggacatttaaaaattaaaatgaagggccaggagcggtggctcatgcctgtaatcccagcaatttgggaggccaaggtgagcggatcacctgaggtcaggagttcaagaccaacctggccaacatagtgaaaccccatctctactaaaaatacaaaaattagccgagcatggtggtgcatacctgtaatcccatctactcaggaggctgaggcaggagaaccgcttgaacccggaaggcagaggttgcagggagccaagatcgcgccattgcactccagcctgagcgacaagagtggaattctgtctcaaaaaattaattaattaattaaaattaaacttaagcattggaagataaaattgaggaaatctcccagaaaataggatgaaatggaaagagattaaaaaaataagacatagaaagataagaaacttaaaagatcagctcaggagctctaatatcttctattaagaagtccaaaaagaaagcacagagcaaatgaaagagaataaaatactcaaaaaaatttctctaaaatttaccaaaatacaagatttgaatttccatattcagtggacccagtgggtgcccaacacaatgaaccacaaaaacaaaactcatcaaagaatattattggaaatgttagaaccccaggaataaaaggaccccaaaagtcctggagaaagaaaaatagttcacaaaccaagggtcagaaatctgaacagcagttggacctctcagtgtcaacactggaagctagaaactgaaaggcaagacagcaacatcttccaattctcagagaaaacttacctagaaatccttacccggccaaaaaacaatcaaggagaaggtaatacaaggacaagcggatggggctgaccagaactgtcacactgtcctttatttggccggggtcagatggattaatgccctcttaaagatgttaaaaatgtgaaacatcactcctgcatacaaggtctcaaaacatttccttatcatacatgaggaagtaaatcaagaaagagaaaaacgggagttcccattcccaaaggaaagtccccagattcagggaacaggaggactaaagtcttcagtaaaatgtctccaagaaaaaaataaaggagctcatagattactcaattaatttgacctatttatttgaattttatatctcttgtcagagggtttgaaggacctgtacaactaagaaagcaaacaaatcaaaatgaagtgattattaactcccaggaattcaatgaagactagaagaaaagaaatgcatcatagtatactatattgttcagctgtaaacaattaatcataataatacaaacactattgatttaattaaaattgtgttattataatattaggaatctagaaaaaagggaatgggtgtttgtgtgttgtaaaaacgcaaaatcccagtattccttagcaggaaatgaataagtaatttccaaaattgcaaaatcaaatagcagtaaaagcacatcgtttacaaatgtggagttggttttcaggggaaaataaattaagatttaaaagcgatttgcctgtcagtgggaccagggctgagaaaggaaagagcaaggattgttgtcactagttgtaaaccttttgtacyaggtgactttttaagccctcctcatgtattatattaataaatgtaaaaactagtttatttaaaaaaaaaaaaaaaggaaatggctcagttataacacagcagtctcccagggaatacattctaccaaccagtcagcatgttgatgtctggagccattaagtctctaacaagctaaagttaaaagtatttacctaattacccaaagtagaagttcggaccggtatgtctacaggttactttagaatcacctggggactgtcaaagaaaaccagagctagagagcagttaaagtggtaaaaacaggttttaatcgggactattgcaatggaggaaaagagatctcagtaaagaactggactcaattccaaatacaccatgggaagtgagtgataatttacactcaaagagcaggatggtgactggtggatggaaaattactaagaggaaacatcaaggttggggtaaggagggttctggctgaaaggaaacaggattatttctgaagacaggccagggtggtcaggcaccccctgggggatgatggcaaatgaaaaaaccaattagagatcaaggaatcgggtattaaaatggcggggggggggggggggtgggggctcggttcttgctaaattgacttagcaggattctttgtaaaactggattttacaaggaagtgcccagatgggcctagaaggttcaggagcctgactaaagtttggccagaaaaatctttgtcaggaactttgcaaaaaatccagattcctaggtcccacccttaataagccagactcaacaggatttggtggggtctaaggatctgcccttagttcccccagatgattcatggaggtttgggaatcactggactagagtggaaatcaggagtgtgtgttaggaggagcaagggaatcagtttacatgtattttatgtgtgtgtaactatttctgtatatttaagtctctctccctccctccttcattctcttttattttcagttaacccataaatccctctggactgctgacggcattgccagaaattaagtagccatccgagctgtctctcccactcctggggctccctctgctggcagaagcatgttaaaattcttagcatcctaaatctagaaattctcgttcagttccctattaggtcagttttttgagactgttgccaaaccctcaaatttcatgaatcctcccatcagatataaaatacaaagtgaagcctgggaaaactttcttgccttaaatttgtgaatatataaagattaggagggagcaggacaaggcagaaatgaaaatgaaaggtatatgctgtggtcaatactgaggaagaggagacatttgagaatttaagttcccaccttcttcttcctggccctcccccaggagatatgaatagatggggaagctgcatgtagctgctttccaaaaaatgcaaagaaggaaacaagttagactaaaaagctcactgaatttggaagcagaaggcaaggattcaatatccacccgtcctctacttcctcgattctcaaaagaagtggtctccttttccagagccatgtgccatatcatctggagtatgactccataaatcatatccttccagtgatcttgtttttagattctactggatctttcccacaaacagaaaggatgctcagcccagcacactgtctggcacaaatgctcaatgcatttgagcatttgaatgaaagtttaactcatttctatcccccaaatcaaaaccctctttcggatctccatgcttctcaagtgcctcaaaattgtggaccagtaaacattgcattccctcaggtacttcactcttcaactcacagcatttccactttagctcctctggaactctcaggcaaagatctccaatgattcctttatgccagaccccctgtattcttggcacttctcaccttccttgacctctcccatctcactgagacctgttcccttgggttctgtgctctctgtcctcctgctcccagctcaccgttgttctcctttgctggccctccccttcygcccaaccctcaaacatgagtgtaagatttccctcttagccttcactctgtccctggtggcttcatctactcctatggttgcaacattaacttccatgatttaattctcccaattctatatctttaacctggacctttcttctgagttccaaatacctaccagacatctgtatctggatgtataagaatcagttcatccattacacactcaaaaaatgcttactgagcacctaccctgtgccaagcaccgtactaactctggagatgcaggggcaagcaaggtggaaatgrtctctgccttcccagaactatctaatgggaaaggcagacagtgaatggctaggagtaaaaagtgatgagtgcaatgattagagaaatgcctagggttcagagagcactttttctggtccccagcattccctgaaggtgtgactttgaagagcagtacctgaatgataaggaattggggcaaggggaggttcctggggaagaatttcaaaaataatgaagaacttgtaaagctgtaataggtagtttggactttatcctaaagacaataaggagccactgaatcttctgaagcagagaaatgtgctgatcagttgtggtgtgaagaactggatggattagagcccaaggggaacttcacagtgctgggatattcatgtcttaagttggatggtgagccatgaggcttttgtttcatacttatgctttatacgttattcatgttttcctatattcttttgtgaataccaaatatttcacaagcttgttttaaaaattaatagattggggaaggtgaggtggccagagaaatgtgaggaggtcactaaagcagaaaacagtggtggcctgagttaggatatggcctggctctgtgtccccatccaaatctcatctcaaattgtaatccccaggtgttgaggagggaaggacctggtgggaggtgactggattatgggggttcccccataatctcatctgttctcatgatagtgagtgagttctcatgagatgtgatggtttaaaagtgtttggctgttcccccctttgctctgtctctctcctgccaccatgtaagatgtgccttgcttccccttagccttccaccatgattgtaagtttcctgaagcctccctggccatgcagaactatgagtcaattaaacttctttttttatataaattacccagtctcaggtatatcttcatagcagtgtgaaagtggactaacacagatggtcacaaagggtgaagatttggagatggttctagagatacttaggaggtagaatcgactgtacttggtgattaatggaatatggagagggaggaataaagaactcctaagtttctggattactaattagacggatggtgaagccattgattgaaatagagatcaatgggaaatggtgagtaaaaataacagtcattggagaacagtttggcagtttcttaaaaagttaaacatggctgggtgcggtggctcacacctgtaatcccagcacttcaggaggctgaggcaggcagatcatgaggtcaagagatcgaaccatcctggccaacatagtgaaaccctgtctctaataaaaatacaaaaattagctgggtgtggtggtgcaccctgtagtcccagctactcaggaggctgaggcaggagaatcgcttgaacctgggaggtggaggttgtggtgagccaagatcatgccactgcactctagcctggccacagagtgagactccgtctcaaaaaaataaaaaaaagttaaacataaatttaccatatgacccagcaatgccactcttgggcatgtacccaagagaaataaaaacatacgttcacacaaaaattttcataccaatgttcattgcagcactgtccataatagcaaaaaacaggggaaaattccaaatgtctgtgaactggtgaatggatcaacaaaatgtggtacatccatacaatggaatatgatttgtcaataaatgacacatgttacaatacggaagaatctcaaaracatgttaagtgaaagaagtcagacaaaagattacacgttgtgtagttctactaatataaaatgtccagggcaggcaagtctatacatggaaataaaattactggttgcctggggctgggggtggaaacagggagtgactgtaaatgggcacaagaaatctttttgggagatggaaatgttctaaattagattgcagtaatgatttctcaactctgcaaatttattcaaaatcattgaattgtacacttaaaatgagataatttgctagtatataaattgcactgcaataaagccgttaaaaaataatcatgtcagtttcagcatgatgaatttgagatgtttaggaggccctcagaaggagagggtttgggtaagcaggtggttatactacctgaagcttaggagaaattgctgcacaggaaatagagacttttaagactcatccatcaacacaaaggttgtaattataaccatgagagagaagggaattacgcagggaatacagacaaaaaatgagaaccgaatcaaggccaactccaacattcaaggaatccagaagaaaagataagcctataaagaaaactgagaagcagtgagagaaacagaaagaaaagcctggtgactatgaattgacagaagccaagggaggaggatatttggggaggttaaagtggcaagtgatacttaatgagaaggatcaaagagaaaaaaagcatggtagaaaaatccagctggttatagggcagcccaataacattgctgggcatagctccaggggctgcaagccctcagggtcaaggccatacccagcacagcctggcagggagagtgaagtgctgatggagggtgtgaagctggattgaagagctgaaagagtgcagaagattcagaattttttgcataaggcaatgaggggatacaaagagccaggggatagagttctgggatggggatgaagaagccacagagggcaaagccttcatgacttgagaacaaatggccagaactacagactccaacagtgggcattcatggccctcaaagatgtgcctctgcttgcctctccaggcttcttactgtgtaaccccaccttgtaaaattcagttatccagccacatggaactgttcatagtttcccaaacatgactttctctttcacacctctttctattttcccacacagcttcctgtgcaaagaatgttctacaaactagccctcccctctccccacacactcctgaacccaactcaatgctcactgttatcattcttcatttcctggaacattcctgctcatatttcaacatggatcaaaatgaacaacttcctggaagcagctcctgctggcccgtcccacatgtagaatgggctactcccttcattatgcccctactgtagacttccattagcgcactggtaatgtcttacacatttcatttatttccacgtcttcttcttctagggcatggagagcatttcaatggtgtttttattcwtagtacctgaccaacagtaaatacctaactaaataaatgttagtagatgattcctccacccagctaccatgtggtatgtacctcttttgcctttttgggctgtttgtggccaggatgctgggctccactttggtaaaggtagaccagatggctatcagtaggcatggtccagaatgttttgtccacacctgagaccatttctcaggttcttaaagcccgctgccacttctaagcttttcaaattaaacacagttcacccagttaaatccaaatttcagataaacaatgaatgattaatggttttgttttttcctttttttttttttttttttttttttttttttgagatgagggtcttgctatgtttcccaagctgatctcaaactcctagccacaagtgatcctctctttggcctccccagtggctgggattacagccaagagccaccaaacctggcttgaatcatgttttagtgtaagtatgttcctttcaagacatctttccttcaatagtttaggaatatttctttcaacagtttatcccatcttgataggtagacagcttagatagaggataggtagataagatagatagattagatagatagatagatagatagatagatagatagatagatagataggaaggacagacagacaggcatccttaaaataactatttgtcatttatctgaaattcagatttaactgtatttgtcatttatctgaaattcagatttaactgggcattctgtatttctatttgctaaatctggcaaccctatgtcccaccaggggcaagtgacttccttctaatgctgacatccctggaaccttgagatgcccacctggctggggctgtggtgtcaccctagcgtgcttcctgaaagttgggctggccaaccaagaaaaaacacaagatgggccaaagccctgtrgtggtcatgctgaggtcagtcctctcagctgtgtggggctctcccactgctccccatgctgccaatgtttcaacagaccttccattgaataactttgtttagttcttacatggccccctytctcttctatgctcagatgtgaatccacaggagctaggcaagagagaaaacctgaaaaactacaactacaacatgcttagaactgtctacttagatcatgcccttaaaacataaaaacaacagaatttttttgattataaaaagaactctttgcatctccatctccactgggggcagggatcagaccatgctcgtgacctcgtgagggtctcttctttcctagaaggcccttggctctcccaggcaaatagattccaggtattctaccctctcagtcccctaccacaagctacacgtgccaggcagtaacaggaaagcacacagagggcaatttatcccatgcctacttcattctcccagatccacgattccrttagctaaaaaatagartaaatctgtccattgagattgacatgaaggattgacaaatgagaacttctcccctcgttagacacacacatgagggaggaraacaggaggaagggaaggaggagggagtctgttactggacaaaattgcatgaaatgatagttctttctatagacaggaaaagatcttggcagctgtgagttctgaggaactggggtgagaatgggggtgggggtggcaagaragggagaatcttatgcgttattgtattagttcattttcacactgctgataaagacatacctgaaactgggaacaaaagaggtttagctggattacagttccacttggctggggaggcctcagartcatggtggtagccacaaggcacttcttacatggcagcagtaagagtaaaatgagaaagaagcaaaagcagaaacccctgataaacccatcagatcaagagagtagcaggggaaagactggcccccatgattcaattacctcccccaggtacctcccccaacacgtgggaattctgggagacacaattcaagctgagatttgggtaaggacacagtcaaaccatatcattccacccctggcccctccaaatctcatgtcctcacatttcaaaaccaatcatgccttcccaacagtcccccaaagttttaactcatttcagcattaacccaaaagtccacagtctaaaagtctcatcggagacaaggcaagtcccttccgcctatcagcctgtaaaatcaaaagcaagctagttacttcttagatacaataggggtacaggtattgggtaaatacagccattccaaatgggagaaattggccaaaacaaaggggttacagggcccatgcaagtctaaaatccaaaggggcagtcaaactttaaagctccaaaatgatctcctttgaatccaggttacactgatgcaaaaggtgggttcccatggtcttgggcagatctgcccctgtggctttgcagggtacagcctccatcctggctgctttcatgggctggtattgagtgtctgcggctttccaagcagatggcacaaactgccagtggatctaccattctggggtctggaggacattggccttcctctcacagctccactaggcagtgccccagtagggactctgtgttgggtctccaacccgacatttcccttccacactgccctagcagaggttctccatgagggccctgccctgcagaaaacttttgcttgggcatccaggcatttccatacatcttctgaaatctaggcagaggttcccaaacttcaattcttgatttctgtgcaccatgtggaaggctcaacaccacgcggaagcttccaaggcttggggcttccaccctctgaagctaaagcctgagctctaggctagctcctttcaggctcctttcagctgggacacagggcaccaagtccctagcctgcgcatagcacagggaccctgggcccacccatgaaaccactttttcctcctaggctccaggcctgtgatgggaggggctgccatgaaggtctctgacatggcctggagacattttcctcatggttttggggattaacatttggctccttgctacgtatgcaaatttcagcagctggcttgaatttctcctcaaaaaatgtgtttttcttttttacatcatcaggctgcaaattttctgaacttttatgctagttttcccttttaacatggaatgcttttaacagaacccaagtcacctcttgaatgctttgctgcttagaaatttcttctgccagataccctaaaaaacctctctcaagttcaaagttccacaaatctctagggcaggggcaaatgccaacagtctctttgctaacacataacaacagttacctctgctccagttcccaacaagttcctcatctctatctgagattacctcagtctggaccttattgttcatatcactatcagcatttttgtcaaagctattcaacaagcctctaggaggttctaaactttcccacattttcctgtcttcttctgagccctccaaactgttccaacctctgcctgttacccagttccaaagtcacttccacattttcaggtatcttttcagcaacagcccactctactcgtaccaatttaccgtattagttcattttaacactgctgataaagacatacccgaaaccaggatcaaagagaggtttaattggacttacagttccacatggctggggaggcctcagaatcatggcgggaggtgaaaggcacttcttacatggcagtagcaagagaaaaatgaggaagaagcaaaagtggaaacccctgataaacccatcagatctcgtgagacttattcactatcaagagaatagcacaggaaagaccagcctccatgattcaattacctccccctgggtccctctcacaacatgtggaaattgtgggagatataattcaagttgagatttgggtggggacacagccagaccctatcaattctcatgtaatgcaaagatcctctcctgtttcaacgttgcagtgttattctcccaggaaaggcagaacctctgaacacagtgtttacctactttttactctgaggtttgcccaacaagatttcattttcaaatgggagcacttgcttaacaaatctactaaatagtcatgaaaagcactacagctgccaccttctaaatgacaggtgtttctttcatgatcaacgttttatgccaaatgcaaggaacttcccctctggctgcccctcctcacatttttgccatctcctatcagtctccccagatctggcccatccttcacagtcccattcttgttcattcagcccctatgttcttctcactctgttgcttgtgcttgattccatttattctggtgrgaatgatcaaatcagagagaattcctggctgggctctaatactcacctccagcagtgaaaagcccattctgtgcaggtaggctccaggtatctgctgaaagcctgctctggaatgggaatggtcagtgtattacaaaggagggtgcaaggagtggagtgaactgttcactgtttttctatggaactttaattcaatcagggaatacttgacttgaaacaaatgctagctgaaacagttgtatttcattttgtctttattaytttttaaaactttgttgacaaccccagaaagaagatttgggggatgggattgatctgttctgaccagaatgctgaatcccagtgatttccccagattaaaccaggctccaggaagacagcaattttctcattgctgcagtatctcaaaaacactaaaacagcaagtttattgaatgcctattttggagcaaggctagtgggaaatggaaagagacaaagatgaaaaagacataatctatgtcctccaggagtttacaagctaatgagagaaccagccatgtaaatatggacacaaagtggattagatgtttattatataatatggtcaaagtgtggtccccatgggtctctgagaccctcttgaagggttgaaaggtcaaaactattttcataattatactaagacattacctgacttttccagaggctacaggatgtatgctaatgccactgccctgaatgctaatggaatgtatgcttatgtattcttgagctttagaaaaaaatcctcagtcttaatttctaatgcataaattgcaatagcaatatcaataggtaaaacctacacaggcaaaagttctttgaggtccttggaaattattaagagtatacaagggtcctgagaccaaaaatttgagaactggtaagatttaatgcatcaactaccattacacagtgtccttgtttctcatcaatgcattttatatagcaattattttatctaatcccatgaaamtcactttattggatgcttttgccatatccttattttctagcatcgtagctattaggtcatctaattattaatctgtttgtgtctttgggtttaaatgtgtcttttgaggccacacaatgttggacttcattttttaatggagccaacaatcagcaattgttaatgcatttgctttgtgttctattactctgcagtttatcttactcattgttatttttgctttctttaaatttatgttttcttaatggactttaaaattctttatttattttttatgtcagacaataaacatccctagtctgcccatctttctatcatttcaacatcatcatatttccaaataacttttcattgtttcctataattttactattaatagtataggattaagaaaataaaccttatctgggttctggctggcactgccttccctctagggatgaaaatggagtgtagtctgtaatatatcctggtatcataaatatatttataaaattatacaaatgtagcttgcagttctaaaggcatgtaatctaatttttacttgaattttatcttttttctctttttgtccttcatagacctcgagctctgtctagccctcaactgttctcaaatctccaytgttttctacaagtgaccctcacagctgtgggcctttgttgacaaattgtttcatctcctctgggtcttaaattattttctcttactctaaagtgaaaatttgatgaatgtttccagatactgcacttggaatcataacttaatttcccttaaccttgtgtaaattctgtcccccmactactcccaactcctatccctcctccaaagcactgatacttattatcacatttaaattttttccccgctctactgataacttacagaatgcaggactgcattgtgatggggtaatttccatgagttgattggttggttttgagttgaaaaacttaacaatgatacatcttaaattctttctttgaggattattccttaatgaattcgtgctacggacatactgaggtggttatttttatatttccctgataataaattctaaattgctaagggtttcttaccaccctcgtccttttactgttactagatctatttttagctggtgtgggcgtccccagctagtttcacttgcctaatgctagttcttttttcttctacatcaggtcgcctcttcctagcatcttctccatgtttcttgttgctctacagcatttacaagacccagtttaatagtttagtgycttttttgtcactcattatttcttctttgttctctgttaaaataataagtgtatgawccattgcacttgccttagagtcttgaaccagtcttggatttcccgccatctgggttctggctggcttgcaatttctcctttgatgttgtaatactttttcattgaacttgagtgtggggcttatagagcttctttgctttcattattttttcccaaaatgtgcacattttttttcttaagcttattttgctgttttgtgctgttatttttaattgcttcccactgggtgggggggtagggggactgagagtgagatttggcttgagtttggctctctttgctattactcacatttccccccagaagccctacatgcactcctctctctctgtctttgacaaattacttttgaaagatcattgatccctggcgtaaatggtgttaagagtaagatggactcgggtagggatgctcaggaatccagtcctgtacagtcatgagcttggccatctggaagtctcctcttgctcaatgaaatggagtaaacattgtccattatgaaatccaccacacaggctgccagggacgaatgggatcccacccaaagccaatcgctgctctgacagggaaattggctagcactgcctgagactactccagcctcccccrtccctgatgtcacaattcagaggctgctgcctgcttaggaggttgtagaaagctctgtaggttctctctgtgtgtcctacaggagtcttcaggccagctccctgtcggatggcttttatgaaaaaatatctcctccccattctggggctcttcatggcctactactactattctgcaaacgaggaattcagaccaggtaagtacccatgcgtctcattttggaggaataggtttaaaaaacacaggggtgcttgagtgttcctgaggaccaagatgtgttcttgatcctcaaagttggtgaaaatgagggaaccctgagttaagatggtatttttgtgtcctccagctacaggctgtggacaggggggactgtgtaggaagggtaatcgtgtagccaaaatctagccaaataggccatgctttatttggcacccttaatggaaagcagtttcaaatcttctacaaaaatgagagtaatacccaaattcacaactcagcagctaattgggctctatgaagagactgataagtgggaggcaaaaaaaaaaaaaaaaaaaactggagatgatgactacatagaagtgagggaaaatccctggaatttctatgaacacatgtgttttgattccttgttaaatgtactttcaattgagcaaaattgaaagagtccagaaatgtctggaactccagcattttagctgaaccatgacttttctggcttcatcctatgatctctttccatggaggtttttagaaatgacagtagggaggctgtcagcccaaacctcccacttcagagcatgtttatgaaagacctggcctgttcccacagtgatttacggagtttgtgacaaactgatctgggctcataacctttaagttacaaattgcgataagcatgcctatatccagagagggagaaggaattttgctgccaacttgggtatggtcctcacttccttttggggttccccagagatgctccaaggaaagaaagtgattgtyacaggggccagcaaagggatcggaagagagatggcttatcatctggcgaagatgggagcccatgtggtggtgacagcgaggtcaaaagaaactctacagaaggtgagggttctatgctcgcagatatgtgtaccgtcacatgctcagatgtgttcttatatatgctcacatatacacagaagctagcatatcgcagatctatatacagaggcacatgcacacacacagacacttaattttgcactctcatatatagattcaaacaccaaaaaacccacaggaatataaaagtatgcatttaagcattcattcatgtgtgtgtgtgtaatatattctgcaacagagtccttgagttatatatgctcacagacatgcctagtcacacacatttacacatggaactacagatacatayggatgttttcaaaaactgaaatcccagtacctgcttatgaatacatatcctcatacccatgcagactcccagacacatgccctctcatggactcacaaacccaaggatgtacaaacattcacaaacctagagctacccacatagtaaccagcatctacactcataatgccctcagaaatgcctattcacagaagccatgagcataaatcatgaacttaaaccccagcactgggatgatttatccatttgaaccccaccaagttccagaaaatatttcagacagaggacgatgatcatgagggttatattaggcaacacacacacaaacatacttaccatttcttacctaaacagggctgtgagcaatctctcatttaagccccccgttacttcagagactaccccccaaaaatctgcagctaagactgatgccatttctgctgtatcactgcaggtggtatcccactgcctggagcttggagcagcctcagcacactacattgctggcaccatggaagacatgaccttcgcagagcaatttgttgcccaagcaggaaagctcatgggtgaggctgtttctcttacctcctcctctgaactttgcccttggggtcaccaagagcttttgggaggagaatgggaaaggtatcaaccccagakgatttcttaatatagccatctcttgcaggaggactagacatgctcattctcaaccacatcaccaacacttctttgaatctttttcatgatgatattcaccatgtgcgcaaaagcatggaagtcaacttcctcagttacgtggtcctgactgtagctgccttgcccatgctgaagcagagcaatggaagcattgttgtcgtctcctctctggctggtaagtgggacagggacatatgtggaaggtagaagaaaaaaaaaaatgccagggatgatgccaggctctgaagtagacataaatttttatcagtttccatgcagagaagtaatgagggattggtcaaggtaagtgggctacaaaattcttttaagtaacagagaaaaagcagtagctctgagtgctcattggaagactgaattgttttctacaaagtaaggtcaaagggacttgaggggctgctggaggtacagcctgtcctggtcctaagggagagacctagttacaatattaacttgaagttgaaatgttcatagtaatattaaacaaaagctgattaacagcttactcatatgcatgaatgggcagatgtactgataagagacttgtaggggggtgatttgtggactcaatgagaggcacgcatcctgagtaaaggagacactgttacaaactagtgacaccataaaaaatgaaggattggtcaaggtagatgggctacaaaattcttttaagtagcagagaaaaagcagtagttcagagtgcctattggaagcctgaattgttttctrcaaaggaaggttgaagggacttgagaggctgctggaggtacagcttgtcctggtcctaagtgagagacctagtcacaatggataaaaaggactttgcttcctccatgaccaaaaggttggtgaagttatgtaaatgtgaaggtacaactgagaagttaactgttttaacaacacacaggtgtctgataagtgggctaagctaaagctaaataaaatgaacaacaagaaaaaaaaaaaagatgaacagacctgcctatagtgggtgtattctctaaaatttgaacatgttaacatgaaaagatcaatttaaacaaccagctgggtaggkaggaaatgtgtccagagaaatggtcatgaaaagatatctgtgggatcaagagaggtccctggtgttctggatggtggtagcatcagaagccatcaccagtaaaaaaccagtgagttcccagcttgggacatttctaggcccatttttatcatagatccaggagacaagttccacacatctttgttgattagtcagttagaaggatgtggctggaaagtgcaaacaccaggatcaaaatccgccatctaaatgttgttcctggcaaaataaaaacaaataacctagaggactctgtaaactgttaagcacttcacaaacattcttattgaaactaatagcaccatctgtatcgtaaagagttctcctttctggcccagggacggcctgcatagtgattggataaaggggcagtgtgtctgtgctacccgccaaacagtgtgattgatatgcatcccggtgcttcccagacaacacacactccccacccctccccagacacagactctctctgggctggaagaaagggagagcttccagatgcatactgagtgggagggtgctgggcacatccccaatccatcccagggcattggacaaaatcctcacatcagtcatgatgtaggtggctttaatgatttcagytgattaaataatacattcactctaggcaaaggatgtatttcacctttgacgaatgtaactttctagaatgtacccatgatctaaatgtgctcagaaggactaagaattactgttgagcccaaggacgtgatgaaattctgataatctctgtttccccatatctcctacacttattgaatgacacttggtaatttccatgaactctgggaggtaggaaatctagctggatgagtatctttggtgtttattgcttgtgtagccaaaagattccagcttttttgccttgaaacctgtctatgaacttgcaaagtacagacacattgctgtcttgccgcaactgaagaatattctctgctttatgatgtattcttttaatcagtcagtaaacatgttcattaatccttcctctttaaaatctaaactctataaatatgggatgctaaacatcaagttgatcttaaggtcagccaaacagtactgggatggagttttaatcatttcttctagggaataccttaagttgtttattgagtttcagtgataaagaattgttttttctccacaatgcatttctgggtattgcattacatgggaatactatacttctaatatgttccttaaaggcttggttacctctgtagcattaacagagacaatactgctgcttctgggaacctccttgtagtccacatctatccactattcaccaccttttcttggcacctattgagcaagtttcttgtatgtgtaacatcccgttacattgattagcctcctctccttccaccacttgctagttaggatgtaagttcagctactgtaacgaagacccgaatttacaatggcttaagcaaatctaaatttatttatctcacacaaaacacmctggawaggcagtccagggctgatatggtagttctgtcctatgaggctgtccaggaggccttctatctcagaaccaccattcctagagtgcttgtttacayctgcatgtccaagatggctcattggcatgtctgaattctaactcaagaaaatgaaaaaagaaggataccacctggaaggtgtacacttttcttctgccacagctggctgcaattgttatctttattcaaagggaacatgtgtccaactaaaaatcagaagttctatttgtgtaaaagacactgatattgataaacaactagcaatctctcccacatcacccatgctaaaaaacacataagactagaaaaaagtataccctccaggccatcccacatgtgaaacacacacacacacacacacacacacacacacacacaaaagactcattccctctcacattcaaggtccatcacaaaaaacaaagtccttccatccggcagtgcgtgcaggggacagtggggtaggagaaagaatggaaagagaatacctaaatagcatttgtgaaacaaaccaaagtagaaatattaatacttgaatwtgactaaaaaaaatcactggagtgggcagagaacatttgaaaacatctggaaaaaagtttatctgacattagtcaaaataggtcatcttaggttcaatattagaaaagtaaagttggtttcattttcgggctcctgggcttggtgaatcccatcactgtggtgtgtgtcatcagttgcacacatggcagctagaactgagcatctaaggccatttctccacctgctttatgcccctgagaggaatcacggacaaaccctgtcttcctctgctcctttctcctctcaaaatctacttagccccctacctcctatgaagtctttttcagaactcaccagagccatttcaatgtttcttctttgtctttatctactatattttggtaagttaactttagaaatccaacttcctcatcatttctcttttttgggtttattggtaatccaaatactactaatactactcataactactaataacacaaatgttaaacatactcggcaagcatacgtgtagggatagtaatccttctggatcaaggaaaatgcaaggtatattttgaagtgaaactggacatcayaaaagactcagttgctttaaatattcaaaatgaaaatagatcagaaggaataaaagaaccttgtcaataacctttgaatcagacttctcttgagaagctccataagtgtctccagttaactattcacttttctccaagtaaatcttcttaaaaaatcaactttccctatatatagatagtcttattcaaatgtattcctttcctgttttactcattcgcagcattgtttcatactgttttttaatgtacgtgtgcagtctttcaggcactttgagttgagttgactagccgggggcaaacattcataagacagtgctctgtgggaaarctcaaaccaacagatgaagtcacttgctggatcttaacctatttgtcagtggaggtctgcctgtgtggtctaaatctatttcaaaaattcaacattatgaagtggggggagaaaaacaggtttttcaactacacatatcaactaacaggacttggaagacctataatgatgttttgcatagacaaggatatacagatgttaatgtcatccctgccttcagttctggcatacccactccttcctgaaaggtgggccaatgtttcaatgtatagctgtgcctcaggttattgggggtggggggatcccaaactccagattatgaacgggcctcagaaccagagtsgaaaggggcaatttatcccttgccacagttgttctcatttttctaagaaaaaatgccgctttacccttaaatccaattacctcagaaataatcttcaggaaccaggatttctgaggtgagtggaagtgtttatccatgtgaacgtaagcatttacatgagggatggggagtggcgatggctgcacagggttgagctgtgtgttggggggatgggtagaagtacgcagaggtgaggtatgtgtttgtgtagacgtgtcatccatagggcctataagaatgccaagaaggagatcagagtaaaatcagcaacctgggcataaaaattccagaaaatttattctataaaatataatcattgttgtctaaatttaagagatcgtgtttgggcaacactgtgaggattgagacagaatctgctagatttatctaggaattcagttctgcatcagccccaaaaagaaaggagtgggggagatttgaaagggaggaagactctttgatgaagacagtgacaatttagtgcaggttgagaataatataatgctacccgtaatcattgttgcttcatgttcttttctggaaaggctcggctgaacttaggtagttgaggttacttatccctgctagaccacaggtttcaytcaagtgcacttgtggatggaaatagcaaggttctaccatcatttgtatctttacgtttccttaccaaggagtttgagaaggcttacaacaaatacattctatttggaaaaacacaaatagaaaactaggtcttaagaaaaggagaatataaatgtgcccaaattagactcagtatagatcctgtgcttaagcttcaatattggcacttgaatttcttaacaataagaaaaagaaaagaaaaaggacaagatcagtgtacagccagcactctgcatgcctgggttctacatctgtggattcaaccaaatgtggatcaaaaaaaaatggggggaaataaattaacagagttctaataagcaaaacttgaatttgctacatgctgggtactatgttgaattcacagaaatgatataaggcataggcaccaaattaggtattataagtaatctaaagatgatttaaagtacacaggaggatgtgcataggtaatatgcaaatactacatcattttatatatgagggacttgagtatctatggatttgggtatccacagaagatcctggaaccaatccccctttgaatactgagagatgactgtactcagagtaggaaaaatgcatgattcttatattcatttaattgtttatttttgtgtattttttaaagtctaggtctttatttgtcattttgtctaaggtaatttggaaatatgtaccagaagccttaagaatgtttcctttggccaggcgcagtggtttacgcctgtaatcccagcactttgggaggccaaggcagacggatcacgaggtcaggcatttgagaccagcctggccaagatggcaaaagcccgtctctaccaaaaatacaaaaattagccgggcgaggtrgtgggtgcctgtagtcccagctacttgggaggctgaggcaggagaatcgcttgaacctgggaggtggaggttgcagtgagccgagatcgcaccactgcactccagactggggcaatatagtgaaactccatctcaaaaaaaaagaatgtttcctttatttcacccagtctaagtgcaagaatatatcaaggaaatagctattaaattagtcacagatttaggtacaaaaacatttgttgtaggattttttaaattgcaaaacattggaagtaacctaaatgtctggcagtaggaaaataactagttgtactatatatttatatttatatctgkatctgtatccatagctgtatctatatctctggaaggacattttccaaaatattagcatgattatatctaaattacagaacaatgaatgatttttgtttttagcttcatatttttcttcattttccaaattttcattgtgtgtgtatgcatgcatgtgtaacttttataatcatagaaacatttcaataagttgttgggtgtgttgttttttccattgctttgtgcctcttttcataaccttttatgagaaattcatttcagaaattatttgcttcttgctgtgcttccttcttttaaatataatcatatacacacaccctcaatttcttcaatggattggttccaggacctcccacagataccaaaatccatggatgctcaagtcccttgtatgaaatggcatagtatctgcatataacttaggcacatcctcctggatactttaaatcctctctagatgacttataatacctaatacaatgtaaatgctatgtaaatagctgttatattgtattatttaaggaataatgacaagattttaaaagtgtgtatgtgttcaatacagacacaaaattatttcctgaatatttttaacccatggttgcttaaatccaaagacgcaaaatccatggatacagagggctgcctatattgatttccataagtagaaatttgcttaagtacttcaagaggaatggtcagggagagagagcataacttcatgtctgagaagtttattctataaacaaacttgaacaagtgcttcccaaatatastcattcattcattcattcaaaaaatatgcatgaaggtcaactctgagtcaggcactatgccagatgccaaggctatggcagggagcaagaaggccaaggcaagatacctgttgtgcacccacattctagtgtaagccaagttgttactgtattgtttatagttgtaaaaacaaacaaacaaacaaaaactagaaacaacctaagtagcaacaaacataaaacaaacactctaagggataaaaatcatgttacagatctattggaagggtttttatttcttggtatacaaaatagtagtatgttttacaactgcttgcctctgaaagcwgttgaaatacagcattttacycacagtgattaggctgtgctctccttaaaggcaggcacattgttcattcatctctgattccctggagctaacaaattttgcaaataatcaacacattcttcttgaatgaacaaatgataaaatagcttgctagtacctggatttctggcttcatgtctttccttaaactgtgttggagactcacagtcatattttccctccatatttcctttctgtttctaggccttcgtgtcagggcttcttaataaggatactattggcctttggtgagggacaattcttcattgtgtgggactgtctgatgcattgtcgagcattttttagcatccttggctctgaataattcaatctaaaagccactcatagaggccaagcaagataggcatcttcaccggggaggaaggtggcagcacagattgaaaaacttgagcaggatgggacaggtttgtgtcacagagcaggtttgggacatcagagactgagtgagatgaggatggcatcctcacatggggcagcagtggtggcctagtgtgaagtttcagagcctaagtgggccaaggaggctcttcatgtggcacctggcacagggcatcagaactaaggggagtgatgagagcatctgcaagagggcctgccatgggcagcccgacatagggtaaagaaggcattcaccaggcattcatgtagcctggcactggggtgtcagaacctaggtgggatgaagaggccaaatgaagaatgatcacatacaggagcattaatcacataagtaatacatattgcagatcttggaagccccaggttctcactatcaatgttacaaatatgaaaaggaagaaaatgagaatgaatcctctagtgttggattgcaattggaagtgtgggtatgaattaatagttgtttaatacacaaggacagatatataaatatagatgtgtgtctacatatacatgcatgtattcactcactctgtccactgacaggacctgggagcacacttggtgcccagatcttgttttctaaatatcattctccactaaaaaaaaaaacaacaacaacaaaccaccaaggcttcttagagaaatgactgattccagggcagtggcaagaaaggtacaagataagcctgaaaatcttgttctgccagtaagtacagaactgctcaaaggataataggcacacattaccaggacacagaggccaactttaaagggatcccactagccaaacctagaaccattgaggcatcaaaacaaatagtagtaacagattatcacccattgcaacaataggaaataagtccatgaagtcataaataaatgcatgaataaataaatcaagagaggggaaggatttttcatgaagtggaaagccaactgatatgaaatgatgaacttagaaaatcaccatttggtaaccataattgtaataattcagccaggaagcaacaaaggatgctaaaagtagtgggtaaaagttaaacaaggaagacggtatttacatagtctcaaagtactaccctgtgcaacaacaaccaaaaacaccacaaatgacctgattcaaaaatgggcaaaggatatatgacagacccacagctaacatcatactgaatggggaaaaactggaaacctttcctctaataattggaactaaacaaggatgcccactttcaccactcttattcaacacagtacgagaagtcctagccagggcaatcaggcaagagaaagaaataaaagacatccaaactagaaaacaggaagtcaaattttcactcattcacatgacatgattttataatcagaaaagcctaaacgctccacaaaaaaactcttataactgataaacaagttcagtaaagttgcagtatacaaaatcaacatacaaaaatcaacagtgtccccatatgctaacagcgatcaatctgaaaaaaagaaaaaccatttacaatagctacagaaaaaaaaaaaccacctaggaataaatttaaccgaggaggtgaaagacctctacaggaaaaactataaaacacccattaaagaaatggaaaaggacacaaacaaatggaaatatatcccatgctcatggattagaataattaatgttgttaacatgaccataataccaagagcaatctatagattcagtgcaattcctatcaaaataccaatgacatttttcatagaaatagaaaaaaaaaacctaaaatttgtagggacgaaatagccaaagcaatcctaagcaaaaagaacaaaactgcaagtaatacattacctgacttgaaaatatattaaaggctatagtaaccaaaacagcatggtattggtaggaaaatagacaaaacaatggacaagaatagagaacccagaaataaaccgatgtattcacagccaagtgattttcaacaaaggcaccaagaacatgcattggggaaaggacagtctcttcaataaatggtgctggaaaaactgaatattcatatgcagaagaatgaaactagatctctatctctcaccatatacaaaaattgatgcccaacagattaaagacttaaatgtaagacctgaaactatgaaaccagaagaaaatgtagggagaacattccatgacattggtctaggcaaatattttatgactaagaccccaaaagcacaggcaaaaacaaaaatagacaaagaggactatattaaactaaaaaccttcagcatagaaaaggaaacaatcaacagagtgaaaagaccacctgtttaacgggagaaaatatttgcaaaatattcatgcgacaaggactaatatccagaatatacaaggtactcaaataactcaataggaaaaaaaactatctgattttaaaaatgggcaaaagacctgaacagacatctctcaaaaaaagacatagaacatataaatggttaacaagtatatgaaaaatgctcagcatcactaatcattaagaaaatgcaaattaaaactactatgagatatcatcttatcaaattgctattatcagaaagacaaaacatagcagatactattgtggatgcagagaaaagggaactcttatatactgttagtgggaatgtaaattattacagtcactatagaaaatagtttggagatttctcaaaaaactaaaaatagaactatcatatgatccagcaatcctgttattgggtatttatcaaagagaaagaaaattggccaggtgaaatggatcatgcctctaatcccagcactttgggaggccaaggtggacagatcacttgaggtcaggagttaaagaccagcctggccaacatggtgaaaccccacctctactaaaaatacaaaaattagccaggcttggtggcctatgcctgtaatcccagctacttgggattatagctacttgggaggctgagacaggagaatcacttgaacccaggaggcagaggttgcagtgagccaagatagcaccactgcactccagcctgggagacagggttagactccatctcaaaaaaaaaaaaaaaaaaaaaaggaaatcaatatatcaaagagatatatgcaactccagtcatttgcagtaatgtggatggaactgaaagtcattatgctaaatgaaataagtcagacacagaaaaacaaacactgcatgtactcactcatatgagggaactaaaaaggtttatctcatgaaggtagagagtagaatgatagtttacagagactgggaagaatgtcagcgtgtkggcaggagggtgaagaggggttggctactgattacaaatatgcagttagaaggaataatttctaatgttcgatagtagagtgactatagttagtaactatgtattgtacatttcaaaataagtgaggacttgaaatgttctcaacacagaaataataaatgcttgtgatgatggatatcctaaatacccttacttgatcattacatattctatggatgtaacagaatatcacatactacccataactatatacaaatattacgtatcaacttaaatttttaaaaaaatttaatgggcaaaggacttgaataaacattttaccaaagaagacaaacaagtggccagtgagcacatgaagagatgctaaacatcattaatcattagggaaatgcaaattgaaactacaatgagataccacctcacagcactaggatggctactatcccccacacccccaaaaaacagaaatagcaagtattggtgagaatgtggggaaattggaatgctgtgtactgttgatgggaatgtaaaatggtacagtcactatgaaaaacagtatggcagtacctcagaaaatttaaaatagaattatcatgtgatccagccattctatttctgggtatatacacagaagaattgaaagcaggaggccgggtgtggtggctcatgcctgtaatcccaaggtgggcagattacctgaggtcaggagtttgagaccagcctggccaatatggtgaaaccctgtctctactaaaaatacaaaaattagctgggcatggtggcaggtgcctgtaatcccagcttctcaggaggctgagacaggagaatcacttgaacccgggaggcggaggttgcagtgagccaagatcatgccactgcactccaggctgggtgacacagtgagactccatctcaaaaaaaaaaaaaaaaaaaaaaaaaaaggaaagaaaagaaaagaaagcagggtctcaaagagctacttgtatatccatgttcacaggaacagtatttgtaatagcaaaaacactgtatgtttcactgttagcaacccaagtgtctatcagtagatgaatggataagcaaaatgtagtacgtatatacaatggaatattattcaatctttaaaaggaaagaaattctgacacatgctacaacatggctggaccttgaggacatcatgcaaagggaaataagccagccacagaaagagaatgaaccctctggtattggtttgcaattggaggaaactgtatgattccacttacgtgaagttcttagagtggtgaaagttatacaaagttgaaagtagaagggtggttgccaggggctgggaaaggagagaatgtggagttattgtttaatgggtgtagttagttttgctacatgaaaagagttctggagatggatggtggtgatggttgcacagtaatatgaatgtactgaatgcccccgaactgtccgcttaaaaatggttaagataggccccggcgtgtgatgttcctctcccagtgtccatgtactctcattgttcaactcccacttatgagtgagaacgcgcaatgtttgagtccttgtgatggtttgctgagaatgatggtttccagcttcatccaagtccctgcaaaggacatgaactcatccttttttatggcttcatagtattccatggtgtatatgtgccacatttgcttaatccactctatcattgatggacatttgaattggttccaagtctttcctattgtgaatagtgccacaataaacatatgtgtgcatgtgtctttatagcatgatttataatcctttgggtatatacccagtaatgggattgctgggtcaaatggtatttctagttctagattggctgggggaaggacagcatcaggagaaatacctaatgtaaatgatgagttaatggatgcagcaaaccaacatggcacatgtgtacctatgtaacaaacctgcatgtcatgcacacgtaccccagaacttaaagtataatttaaaaaatggttaagatagttttttttaagtaccacccgaaaaacaaacttactgattatgacagggaaaagagtaattttacagaagagaaacctgatagacggcacctgattcaaatgatcatggtttattaacatcaccagtaatggaataaattgaaaacatgtatcatttgatggggtgcaacgtgaagaacaaaagttacttttgtgaacctgccaaaatgcataacctgaatcaaatcatgaggaaacaccggataaatccaaactgagggacatccatcaatagcgcgctggtaaatgtttaacaacaagctatccagaaaggaagaatcaaaagccctgatttgtagcctttccatgtaatcaacactcccatgatgaccatatccacatgacattctcttgcttgcaaaatttataaacatttaaccaccagctctcacaatctagtatgagccagcttcggcatatcagcttgtacaaaataactggctgtactctccaacagtgccaaggtcatgaaaataaaggaaagactgcagaatcattgcagagcaaaggcaactgaagagtcatgacaactaaatgccaactcatgatcctcaattggatccttttgctataaaggatattattggcacacatgacaaaatttgaatagggtctgtggattagataacatggatatgtcagtattactgtactgggttgaatagtggccccaaaaaagatatatctacatcctacctgcctgaacctgtgaatgcaaccttatttggacaaagggtccttgcagatgtagttaagttaaggatcttgtgatgagatcatcctggattagccaagtgggctcttaatccactgccaaatgtccttatagagtcaggggaagagaagacacagacagagagaagaaaaagccatgtaaagatggaaagtagagattgtgatgtagccacaaggaatgccggcagccactakaagctggaagaggcaaggaagcactctccctcagagtctttggggggaatgcggccctgccaacacattgatttcagacttcttgactccagcactgtgagagaataaatttctgttgtcttaagccacccagtttgtggtaatttgttatgacagccctaggaaactaataaattccctcattttgatgactgtattgtgattatgtaggacagtgtccctctgtgtaaraaatgaacactaagtatttgggggagatgggacatgaggtcagcaatgacctcaattacagctattaccctcaaatggctcagcagaaaaaaaaaataggttgtgtgtactattcttgcaactyttctttaagtttgaaattatttcaaaagcaaaaaaaaaaaaaaaaaatccccatcctgggagtctagtgacttggaggacatatgaaagtgaattctgtggggctttttctgggttcttcagagatcccctgcaggagacaccactgctgccgcccattccccctgcagttccctttgtgtgagcaatgccttctctagctcattattttcagttcagctttcttctcagttcctaggcttcaatcagcccagcccacttggcccagtctacccaaccatccctgggcaggtgactcctgggcagcccccatccacaggatccacactgggcctctgggaagccaatccttggactacatggttgatcccacaatgcactcagctttgttctcaagcaagggcacttccagccctccctgttgcctttagactttagatgtgagtcaaattccagtccctgaactccaggggacatattaaaagttctccaaataatgctattgaggcccctstcatatggcttaagtggaaagggatgaaactgccctgagcgtcggtggatatagacacaggacattgagaactatctcttatccaagggtgatttaggctaggcacgggtgattaggcaatgcaggcagaaccggtttkggcccacccttcaactgtggatgttcttcaaatctattcttttattcttgccttagaagatgtgctgatactctgagactttaggaagaactccatttcatatcctgtcaacaggccccatacctgcatagaaatattcttgccaaagtcaccttgtgaaatttagtaaaagttttatcttatttatctctgttacatttttgtgctgtttcaacaccaaacgctctttcctagtgatcagccaaaactttgccctgggttttctctggccaccttaactctcccctctcagtctcttaggtttcttggcaattctccaaccttaattgttggtttcctgaggatttttctatcctgaaccctcttctcttttcactcaacacactttccctggataaatccattcattccatttcttcaagaatcactggattgtgggatgtctcaatacttatgatgacacctcaggtcttctggggtatggagaagataggtggatttatcttgagagcccaactcaatccaaacaactaaagagtttagaccatgagggtctcaactgaggaaggatttttaggaagagctgggaaaaatggggggcaggatcccagatgactctctggccttgaagccatttaggcctgatgcacctcaaatttgggctcattcatttgcctggggttgctctaaaagtgtgaaggcaggcaggaatgaagtttttcaatccttgtgcactcccctctgagcaatcaattaaagcagtctaaaatccatytttgaattggtaatcatttcaaaatctcagcaaggcagttagggatggagggtagagaggggatgaacgaaagcatgtaggcctccttttgacctcttctactcagctaataagcctcagtgcatggcttctttgccagttctctggctcttgctgtttctacagtggctgagtccccgcatttctgggacagagctaattacaaacattctgtcccacctatcatcatgtctgccttcatccttctaagactctgtgtcccatattttgcttcagaaaatatagtcaccatagctctgtttctttgtgttctaaaacttcccagaaagctagctgccatctttctcttctgctatcatggacccaccctcccacataagccaaaacttaaccttgggtagaaacactcaggcttccgaccccctcaattccacgactgcttcatgcatattagaacagtatatttatttacttactaattttgttgagcacatacactggcacattttttaaaaaaaactggcagtctaacaagtggatctcatagggtgcaatcagaaaacaagttgattctttcctccccctgcctgttcaaacctgttctgtgcgcaggtcctccctgagcctggacatgagctagggcagatggcaacacttttctggttactccaggttaataaaaaatcctatggctgcctctagtccacagaacagtctcatttccaaataggtaagatgtctagtcatgtgcaatttaacttttaccaaagcttctccccttgctaagctggaacctgctgttggtaggaaatgtgtttgttctttcctctctttccccacctcctccccactccctgaccccctctagcctgtcttgggttaaaggaaaagggacaatgcagggaagaggataaggagtaggaaaggtcttatttggctggcacccagctaatatattggtcttctcttgacattcagaactcatgctctctgaccatttggtggatgatcaaatctgactcttgcattgcatgcttttgtggattctttggaggccctttctggaatactagttattcttcttgtggtttgggcagcagttgcttatgttatttcctttgggccctgggaatacagtgggaatacaagagaatacactcaccacttcaggctgtccttttgggcagaattggaaatggctccagaagagaagggatgagtcctgggacaaggcccacagggtggtgagcagagtgtgggctggatttcaggtccacctacaagggagagtttccataggtgtgacacaatttgggctatgcaatggctttgcccatagccatggcctctcagattgagtcagaccccagtcctccttgttgctcatcaaactctttgggacgagctctctgaggtctctttgaagtcactctcacaaagactgacgtgaggaaaatcccccaccccttctttttggaagatcaatgagacattgctaatttcttctccctaactcctatcttctctggcctcccagtgtcagcccctttatttccttgggatgtttgtttgtgtttccatgttccctgtaagtgcacaggtggtctggaacctcccttcagaacgtggaagcctttgccaattactgtgatgttctcagcctttgaacctcagctgaaatgaaagcagaaaaagtcaaattttaacatcctgttacatgttgtttactccactttgaccaggccttttgactcatggaatcttttttaaaaaataaaaatctagatttttagagggattttgcccttttcagctttctgaaacttctaaatatggtttacatagagcagaacataggggtttcctcacacaagctaattagcattatgtggaaaaatgtttaagaacacacttgtgaatagaaataggctttaattaaatgcaccaatgttgtttgagaatggaagatttttctctcttctcttcattttttttctgctttttaatttttaatatatgttccagctttcctttagtgggcctagactggttcacaatccttatctgcaattccaaaatccaaaaagctatgggaaaaaaatggaaacaataataaaactccaaaaactaaggattttcttttcataattaaatctacctaatgaatttaacctgaactgaagtgaggctacktaaatcctttctttatctcagtatgaactttccaatattttagtgcagaaataatacatgctgtcttacaggctgcctcctccaaccctactggagatgcgatgtaatacctattaatgcccataccaccatcaaaaatccaaaaacaaattaaaattccataatacatctggctctaagagttttggataagtgtttttaagtctgtacttttgtaaaagaaaaaatacaataaactttgctattattttccttgtctgactagcttctcactgcctatctaactcctgcctctaatttttgtacaagccattcttccacctccctggtccttcatgtacttcctttcatcaagcagaatttacaacctacctcctccaggtggagtttcctgatagtccaatatcattctttacctaaacatccagtttggatttgaaatacatgttttccttagtcatgccagtttgggttttaaagagacttaattcataattcagtgactgctcacccagctgtcattgtgggactttagcctcttccaaagacctctccccatttctttcaggagttcctagatgatgttcaacaagcttaggccaccatgcctttcctaccccacactcattctcaaaacccactatgaatatcatttatggataaagccactctttcctactgaacagtttagcacagtcctctactccataaacagactagaagaatggggggcagagctcaaatctgcaggttaatggtccttatttgcacatggtccttacgtgcattgaatttgagtactggcttaaacatttacagatcaatagcaggtcacaaaatctgagagatgtcaacaacagctgtagccatatgttattatgttacagtgcacctcatgcatagtcttcacaataaaggctaatcgtttttcagtagtctttgtccaaccttatatgcttgcataatagttcatttttttcaccaattaaaagcaggcggatcacgaggtcaagagatcaagaccatcctggccaacacagtaaagccccatctctactaaaaacacaaaaattagccaggcatagtggcacatgcctgtagtcccagctactcaggaggctgaggcaggagaatcacttgaacccgggaggcgtaggttgcagtgagccaagatcgcgccactgcactccaacctggcaacagaatgagactccgtaaaaaaaaaaaaaaaaaaaaaaamccaaaaatattttttaggcttggcacagtggctcatgcctataatcccagtattttgggaggccaaggcaggaggatcacttgatgccagggattttaggccagcctgtgcaacatagtaagacgttgtctctacaaaaaattaaaaataaattagccaagcacagtggcatgcatctgtaatcccagcaactcaggaggctggggtgggaggatgagctatgatctcaacactgtgctttagcacttcagcctgcgtgggtgacagagtgagaccctgtttctaacaacaacaaaaaaaaaacttttttaaaccatacaagcatccatgtcatgaatttttcaggtggtcttctgacatgtctggctccttcactacttctctcctttcttctgctttcactttctctcttctcttacctccttctcctacaaaaccatttaggattcttctatgtaccttgagcataacctgaggcataactaaggataggcaatgtgatgcatgagctccataagtggtataaaaatamctgctctaggaattcagactatggcttcgcaggatatcttgcttctgtatctctgttgccacctagacaaacacattaaatgtcatagtcaatatctttattgtcatctaggggtgtgtagtgggmtgaatggtggtcctcccccaaaagatatatccacctagatcctgtgaacgtgaccttaagtggacacatagaaagtccttgaggatgtaactaagatctcaagatgaaatcattcccgattatctgagaggccctgaatccaatgacaagtaaccttatatgaagagtaaaagacacagacagaagagaagaaagtgatgtgaagatggaggcagagactggagttgccagcacaactcagctccaactgccagcagacattagaagctagaagagaaaaaagaaggattccctgctatagsttttggggggagcatggctgtgctgataacttggttttggacttctggattccagttctgtaagagaacacatttctgtagtcttacgctaccaagtttgtggtaatttgttatggcagcccagggaaatgaatacaaagggactaggagtgactagccctgtttatttatgggtatcctcatctgtcagcttagaagtgaaaataatactgctattcataaattttgcctattttggactcgactatcaaaagagagagaatcctcaccaatgcagaaagaactggatttaacacatggctcctggaaaacactcatataaagaacagtgccttctgtagaggaagtaccacctagtgttcaagagtgtgggccactagagtcaaatttgaatcctggtttgaatcctgcttctcccactcattaaccttgaaactttgagcatttatcctttagattctacactggcacataagagctaaataaatgttagttcctatttagctcaatttcagaggttattgtgtttgctccatatgcttgcttatttttgcagaatacttgtctccgcttacttatccctctccatggctgaaatggctaccccagtcccaaccttacatgaccttttcattcaaaatccaacagcagcaatcagaatcttttggtcacttatttcaatttattgaaagagagaccacgatgtgtgttcaagccagtgtgcatattcgtgataactgggccaaccttccatggctagaaagataaaggctctttgaaggggatgagggcaggaagtccatggcaagcatttctagtacactgtagcttttcacattttatatattccaacctatttatgtcttccttcatagtatatgcctccaatttcatgctttaaaaagtatctctaactttgagattagaaattcaccaatagcttattttagttttttactttccacatatactctgtgatctaatttgaatttgtttattagaatggcacttttttctccaagtaactagctatttgtcccaacatgattttttgaatagctcatacttttctcaccaatttgaatactaatactgctaacaataatagcattttctgaatgctttctatgtgccagagtttgtgctaagtatattacatgggttacttcagcttggttatattattatccacatattacagctaagaattggcatacttgggattcacacctgggtcatctgactctagagctcatacttttaattattatgctattctgataagtaatgtggatctatttttgtctcaaacaataaggaaaattattgacataactggaagtccagatgtagggcaggcttcacagttgacttggctgaagctcagtgtccccgtgattctcttggctctgctctcttccatgtgtggcttcatcctcaggctgacaatgagatagctgcagcaattccagcccccatatcaatgcacaaaaaatgtgtyggaagaaaaagaggattgctactctcagaaactcttccagaaaaacaataactttttgagacactccaacaaaattttcttcaaatctcattggtccaaaatgagccacatggccattcctgtatcaatcatgagtaagaagaatgggataaaatagattacataagctcatacctgcagttaggaatgatgtcagctttcttttggcacatgggctgcatagaagtgaggataactatcaataagaagtaagtccagctctcagatacagaaaacctaaaataatagtggattcaataagttagaatttaggccaggcatagtggctcatgcctgtaatcccaatactttgggaggccgaggcaggtggatcacttgagatcaggagttcaagaccagcctggccaacatggtgaaaccctgtttctactaaaaatacaaaaattagccaggtttggtagctcaaacctgtaatcccagctactcgggaggttgaggcagaagaatcactagaacttgggaggcaaaagttgcagtgagccgagatcatgccattgcactccagcctgggcaacagagcaagactctgcctcrgaaaacacacacacacacacacacacacacacamaagtaagttaaaatttaaatcaggtctgaaggtaggcagtatagggccagtatagtatggcagctccatggtcacccaggttccttccttctatctaaactatctaaatgttttgccatcctcaacacgtggcttctacctcatggtccaagataggtctggagccatagccattacatccaccttcagacaccaagaaggacaaaggattgggaaggagagactggcttctccttttaaggatgtgtcccaacattgaaaccaaaactaaagatacaacaaaaaagagaaaaccacaggccaatatccctgatgaacacagatgcaaaaatcctcaacaaaatactagcaaacagagctcaacaacattttaaaggatcattcattatgatcaagtaggattcatcttcaagatgcaaggatggttcaacataagcaaatcaataaatgtgatacatcacatcaacagaatcaaaggcaaaaatatataatcatttcagtagatgatgaaaaagcatttggtaaaatgcaatatcccttcataataaaaaccctcaacaaattgggtatagaagggatatacctcaacatcataaaggccatacatgacaaacctatagctaatatcttactgaactggacaaaattgaaagcctttccaccaagatttggaccaagacaatgatgccaacttccaccacttttattcaacgtagtactggaagttctagccagagcaattagacaagagaaagaaataaagggtatcccagttgaaaagaaagaagtcaaaaacctcactgcaacttaacaaagagagattccttcttctcaggtaatagtttagggctgcttttggtggacttacatgacgtcttcaagaatccaaggtcattccacatttctgttccactataattaacattagcttttcctaaagttcacaaactgactgctacaattctagccatcatatctgaggttccttaggaggaaaggagaagggcaaaatgtaaaagttgcatgccacctgaatccatctaatttattggaaatcaatatctttcctagaaacctcatctgttagatttctcattgaccagaactattacgttgcatggcctattacggcaagaaaatctcagggagatgagcattttaaaatgattacgttgctgtcctgaacaaaatcagactctattattaaagaaggaggaatggatattgggtagataamactatttactatcattttccatctagaatattttttgctatatgacataaaacaaagagttaattttttccaataagttaaccacctttctcagcatctttattaaataacccatcctttcttcattggtttgacatacaacatattatattygaaacatatagaaattccaattccgataactgcaagagtggcacccgaaagaccatccttccccagattacaactataagcttttgacaaaatatcgacgacaaccattgaaagcactggagattaaccaagagcagatagaaaatggagggttattgacacttggaagaaggaaatgacagtaggcgagtttctcaattgtatagctttaggcctaagggcaaccccaatcagtgccatatctgggatagaaacctgccatcttgccaacatgaatagctagaaggaagaggttggggttaccgtaatagctggaatgcaaaggggttatgctggaaaggagagtcacagtggagaaacactgaatcctatacataagctctgtccaaatctctagttgttctctgaacaatgcatgggcaatgcagaaaccaagcagccaagttaagattcaaataattgaacagagattgcagctgatacttattacaagagacagagtttcacccaagttaactggccacttaaaaaaaaaaatcaacactctttggaggaatgtgacagaatccaggtaccctgcaatgtatcattcacgatatccaggatacaatacaaaattaacacccatacaagaatagtaaatatgacccatacttaggaggaaaggaaatcaataaagatcaatcttaaaattacccaaattctggaattagcagacaatggattttaaagtagttgctataacaatgctcggtaaagactatagggtctcaggtcacttctactctcccctcctaaaaagggtattaataatagtttatcctattaggcatatgtccacatatcctccaaacaacttgagtgagaattaaccagtctggtgaacattttttttaaaaagcggctttgggtagaaaagcaaagacaggattctgttttttgtttttttgagatggagtctctctctgtcacccaagctgcagtgcggtggcgcgatctcagctcactgcaacttccgcctcccaaattcaagcgattcacctgcctcagcctcccgagtagctaggactacaggcatgtgcccagctaatgtttgtatttttagtagagatggggtttcatcatgttagtcaggctggtctcgaactcctgacttcaagtgatctgcccacctcggcctcccaaagtgctgagattataggtgtgagccaccacacctggccaggacaggcagttttttaatacctttgtaaggaaagtaaaacataccctttccattgccaacaggtcaccaagttggcagagataactagtcaaactcttggatccccagcacttggttcagagatgcaagagttagcagctgtggaattacatggctcttttgtagcccagcttgtttatcacccttactaaaagcttaaacagtccctcttcaatgaaggctgtcctgcagcccaatcccaccctatgccttcgataccttaatgttttcaaaattcaacacagcagtataacttccatggggaatatagagaaactaagactcaaaggggtaaaaggacaccataggagttacaaagcctactacagctctgtaagaagstgaaatgggcagccttattaacccatttctttaatctrtcatttagggaaagtggcttatccaatggttgctgcctattctgcaagcaagtttgctttggatgggttcttctcctccatcagaaaggaatattcagtgtcyagggtcaatgtatcaatcactctctgtgttcttggcctcatagacacaggtaaggtcaatactttgtgtttttttttaattattatactttaagttctagggtacatgtgcagaacatgcaggtttgttacataygtatgcatgtgccatgttggtgtgctgcacccattaactcgtcacttacattaggtatatctcctaatgctatccctcccccttccccccacccaacaggcccagtgtgtgatgtcccccttcctgtgtccaagtgttctcattgttcaattcccacctatgagtgagaacatgcgatgtttggttttttaatactctgaataatgacctgcagatgaactgtctgccttaccattgtggataaacaagggtgctgaactccctgacctcatgtgtaatgcactaaaaacaaaccagtgcagaaagcactagctctctcatttaaaggcatttctgtcactagtggaggctctggctactctttgactctcctttccattttgattaccaaggtggctgagtctcaccacattcatcacttaaccctttgctgaacaccttatgtcctcatggacactcaatggccattacgtttctatatgagacttatcaaaatacaagtttgtgtttcttaaaagcagcaccagtaataagacacactggtatcatgaactctttgatgtgatgttctgagaagaacacaacatcattttggtggtgttcttgccaaaatacatgaccccactccaatcataagagaacaatgaacaaaaccaaatcaaggaacattttataaaacatttggtcagtattcttcaaaagtgtcaaggccatcagagacaaggaaaggctgaagaactgtcacagattggaagaaaaatgggaagaaattactactaagtggaatcctggataagatccaggaacataaaaagaacattagtgaaaaaataaggtctgtagtttagttaatatattgtatcaattctattattatacctgtcctaaatcattgcacaatggttatatatggtgttgcaaccagggggagcaggtgtggaatataagggggtacggcctacaatttttacaacttttctgttaagtccaaatacaagtttatctaaaacatgtggcagatattaaaagaaaatgctctttgaagagtaattgagcaacagttagagaaatagagagagagaccgagacccagggggaaacaagaaaggaatggagagagagagagaagttgtgcaagatggacatgaaaacttggaaggggagagaagtgaaagtggtgacaagggagcaaaagcctgtattcttgtgtatctcttccttttacaagacagtaagtcattatcatacagcactctggtttttcccactggcacttcccattagctactgagtcattatgagacttctatcctcattctgctcccccatattacttctccgcctccaaccaaaatacccaagagagaagcatgattcagatctcccaagtaatcacctctaactgctcccaccaatctccatccaggaaggcaaggcccctattaacactaaggcctctctttgcccaacagactctaacatacccagtctctccatgtattccctatagtgcctgtgaggcttgcagagcaaacactgccaaaagcccctgacagctaagtggttgatgtctccaggccttccatcatgtagactgtcctagtcagataaccctactcttcccttgtcattctatagaaacagccatgaaggcagtttctgggatagtccatatgcaagcagctccaaaggaggaatgtgccctggagatcatcaaagggggagctctgcgccaagaagaagtgtattatgacagctcactctggaccactcttctgatcagaaatccatgcaggaagatcctggaatttctctactcaacgagctataatatggacagattcataaacaagtaggaactccctgagggctgggcatgctgagggattttgggactgttctgtctcatgtttatctgagctcttatctatgaagacatcttcccagagtgtccccagagacatgcaagtcatgggtcacacctgacaaatggaaggagttcctctaacatttgcaaaatggaaatgtaataataatgaatgtcatgcaccgctgcagccagcagttgtaaaattgttagtaaacatagrtataattaccagatagttatattaaatttatatcttatatataataatatgtgatgattaatacaatattaattataataaaggtcacataaactttataaattcataactggtagctataacttgagcttattcaggatggtttctttaaaaccataaactgtacaaatgaaatttttcaatatttgtttcttattttgtggtctgaactctttatctcttcctgagtggaagaaatcaccctaatctttgtttggtggggaatattgtgtctttaccttttctgtgtatttctgatattcttcatattattgcatattgctcctctgggaaagaagacacctaggcataaggaactagggcaaacccaggaaaatggaggtcccagaaacttgagccacagacccaatgcccatttactgctctcagaggacatcaagcatctgtactttacatgtgaacactaaactctgcattggaagtttggagagggggagttggagttcaaatcctgccactcactcatttagacatttactcattcaacaaatatttagtaagcacttattaggcatcacctaactatgattaaatgggaaacaaaacatcagcatgatgaacaactcagcaaagccctatattgatcagggcccaagaagtaagagatgacaccctcaaattgggtaattttagtagcatttaataaaaaaaggggcaaggcacagggaaatcacaaaagatagtgatatctcagggttagttgcagctgtttccatcgtaaggcccacagggacaagagaagagacctgttaccaaaacctcaagatgtgaagacctgtatggagagcaccacatggcaggagctgtaacatttagttaagagatgcagccaaccagccaggcgctgtggctcacgcctgtaatcctagcactttgggaagctgaggtgggtggatcacgaggtcaagagattcagaccatcctgaccaacatgggggaaccccgtctctactaaaaatgcaaaaattagctaggtgtggtggtgcacacctgtagtcccagctacttgggaagctgaggcaggataattgcttgaacctgggaggcagaggttgcagtgagctgagactgtgccactgcactccagcctggcgccagagcgagactccatttcaaaaaaaaagagatgcagctagcctaccaaggattgtgaaggaggtgtctaggggaaaaaacaccctagcctcacctcacgctcttccctccctctgatctctggccagcatttcacattagctgaacagaggggcaagggagcagataggtatagaccatacaggtcagcttccccatgtacagagcagatggaaaagggtagagagtgttctggagaaatgaatggagtatatccatcaggaaccccaacactcccaaacatacagcttccatggtaagtaatgctgggacatgagacatgtgcctaaaagtgcaggggaaattttcttttcccacctctgaatctaaatggctgggcagcagaacatattggaatctattgagcctgccagccacatggacaaagggctggatttgagcctgctaatgtggctgcacttttcttagaggtccttccaaggctatgctcagtgcaagggagcaggagagacctggctgcatccatgtgcaaaaacaagacaaaacaaaaagggccaaaaaatgtagtctggtttctgacatgaaatgcacccacacttgcaacgtggcttaatatatgtcctggtttctgatcaatcagattaacacccttcagtctcttgtagaaatgagactccttcttcacagtgagatgaagtgaagtaattcctttactcaagggtagagataatattaaagctgagttagaatttgcttggggagaggttaaacctctttctaaatgagactttcttcagaatccaaaggggaagatctcaaaaagtaggtctgagaactgaaaccatctacacccacatagcttattgtcttcattaacatgattttaacattccattctctttatcagcatgactttactattccaagaaactcttgtccgagaagataaatgttgcaagcccatttaaaagtgctgaatttttcaacagatagcatcaaatgactgctactctttaagactgcttggaacccttagttccaaaccccagcttcattgtgttcaccagtctccagctatggcatcacaatccttatccaattcaaataaagtcaccatgctgaagtctcgccttaacctagacttcaaagccccataaagaccctgactttaccctctccactctcagagtctactaagactccatcaagactccagctttgccttatcaacaggttgttttggtggtcttttttagggagccaacattcaacaagtccttcctaagaggtcgtctcaggggtcctcatccagttcctaacctggctcccctgtcccttaaatacctgtctcatctctcaggactggcaggggttccagcagctggagccaagttccaatttcagtggcaccagcagtacaatgacccttgtctttggactagttccacttaaaagaacctagccttcctagctcactttatcacgagctcaaaaatatacatccaaggacgtccattttcacatccttacgtgaaatccagatgtgcatcactcacttctcgcccatattaacacaaaaattcagcttctctttgtaggttccaaaagtaattatattctcactgaaagtattagtaagcaaggtagtgtttgcaatatgcaaggtagcatatctcagaggggagaaggaagactaagtttacattcattcagtgtgcatcattttttttgtttgtttgttttgttttttgttgtttgtttgtttgtttgttttttgagacagggtcttgctctgtcacccaagctggagtgcagtggcatgatcatggcttcactgcagccttgaactcctgggctcaagcaatcctctggccttagcctcccaaggagctaggactacaggcatgggccatcgtgactgggctgattttttaaaaattatttttagtagagatgagatcttgttatgttgcccaggttggtctcaaactcctgagctcaaatagtcttcccatttcagcctcccaaagtgctgagattacaggcatgagccaccgtgcccagcccggtgtgcatcatttaactcaaaagatcccccttggccatgttgccctcaaagtgcttcctctaagcttcccctcttaatctgactttgaccccccagagaatccagcctctagcctccttcttctccctcataaatttattatgcacagttgattctgactctagtttgaggctatccagcaacatcttttttaacaaaaatagcctcttcccacaaagaaattccttcaccaaatattacatttgtagtagccaagacaattgaaaacaaccttaatgtctacctatagggaaatgtttaaattataggaattaaattcaatattatgaaatcactgtgtcatggtaacaagggatcaagtcaatttatatgtacatccatggaaggaattccaaggcatactgttaagtgtataaaacaagttgcttaaaaagatgcataatataattccatttatgttaataagttatacacacacacacacactcatggaatgaggatgtgtggattccatgtgaatggaatggggaagctaactagcataaggcactattgtaagacctgagaaaattaggaacagctctcttccaaggaatacacctgtgattctcaaactggcagtgttgcaagttgaaccgtgtccccaaaaaagacatattaagtctctaatccctaaaacctcagaacatgattttatgtggaaatagatcattccagatataattacttaggtgaagacaaggttgcactggattcaggtgagcaacatgactagcatcattttaagaagaaggccacataaaggcagagacacacagggacaacaccttgtgatgacagaggcagagatgcaagtgatgcagttgcaggccaaaggacaccaaggcttgaaaacccctatcaggaagcaagaagaggcaaggaagccctctcccctacaggctgcagtagaagtgtggccctgtcaacaacttgatttcagtattctagcccccaggactgtggatcaataaatttctattgtttcaagccactgcgtttgtggtactttctttggcagcctttggaacctaatagaggaagtactttctttggcagccctaggaacctaatccctgtattagggatccctaatacagggatatgtaccccttgccctgcttctcttggtggcccaagattatgatgttatcataatgttatgattataatattaccataatcttgggccacaaagagaagcaaggcaagggatacacattccttgacccagaattttacttccaggaatcctgacatacaaatgtgatctaattaaaacagaatcaagtcatacctccatcaaaacccataattatcccattcattctgagtaaaggccaaagtccttacagagacctaaaaatcttacatgatctcggtcctcattggctctgagacggcatctccttctcttctcccctcattgctcaagcactccaagaggcctcgcttggcctcctatctattccagagcatgcaaaatatgtttctacttctctataccacatggccagctgccttacttccttcagattcattcaaaaagttgccttttcctaggctaaggacatgaatagacaattctcaaaagaagatatacaaatggccaacaaacatgtgaataaaatgctcaacatcagccaggcatggtggctcatgcctgtaatcccagcacttcgggaggctgagttgggtagatcacctgaggtcaggagttcaagaccagcctggccaacacggtgaaaccccatctctaccaaaaatacaagaattagccaggcatggtggcagcatctgtaatcccagctactcagtgggctgaggcaggagaatcacttgaacctggggggtggaggttgcagtgagccgagatcacaccactgcactccagcctgggcaagagaatgagactctgtctcaaaaaaaagaaaaagaaaaagaaaaaatcctcaacatatctaatgatcagggaaatgcaaatcaaaatcacaatgtgataccaccttactcctgaagaaataatcaaaaaaatcaaaaaataatagacattggcatggatgcggtgaagagggaacacttctacactgctggtgggaatgtaggctagtgcaatcactatggaaaacagtgcggagattccttaaagaactaaaagtagaactaccatttgatccagcaattccactactaggtgtctacccagaggaaaataagtcgttatacagaaatgatatctgcacatgcatgtttatagcaacacaactcacaattgcaggaatgtggaaccaacccaaatgcccatcagtcaacgagtggataaagaaactgtgatatatatatacacacacacacacacacacacacacacacacaatggaatactactcatccttcaaaaggaatgaattaatggcattcacagcaacttggatgagattggagactattattctaagggaagtaactcaggaatggaaaaccaaacatcgtatgttctctcctaagtgggaggtaacctatgaggatacaaaggcattagaatgacacaacagactttgggggctcaggggaatagggtgggaagggggtgaaggataaaatactacaaactgggttcagtgtatactgctcaggtgatgggtgcaccaaaatctcacaaatcaccactaaagaactgactcatgaaaccaaacaccacctgttccccaataacctatggaaattaaaaaaaaaatttttaggttgccttttcaatgaagcattccttagccaccctaaataaaatttcaaacccaccctgaaatgttctttttgttttgtttttttgagacagggtctctctctgtcacccaggctggagtgccaaggcatgacacagttcactctaacctctacctcccgagctcaagcaatcctcccacctcagcc

SEQ ID NO: 95060 - DNA, 13354 bp, Homo sapiens
tcttttcagatcttcatctttggttacctttaatgttgaacatgcatctctatttcaagtgctcagtacactctcattttaataaaccgaatgattgctgttgctgtatactaaaacaaaaattaacttaagcatatactatttgttagatactatacagaatgtatgaaggttgaaggtgcaatccgttttaaacatatcccaactggaattttttttttttttttttttggagacggagtctcactctgtcactgtcacccaggctggagtgcagtggcacaatctcagctcacggcaacctccacctcccggtttcaaaccattctcctgtctcacaccaccactgcgcccggcctggaattatcttcttacacccctctcagctcaaacctaaccaactggaattttaaacattgtaggatccactcagaaaaggaactagaaaaaaaatactttttctgtattcccctggtcatctctgaagaaactatgtttgtaaaatttactaatatcagccgggcaaaatggctcacacctgtaatcccagcactttgggatgccaaggtgggtggatcacttgaggtcaggaattcgagaccagcctggccaacatggtgaaaccctgtctctactaaaaatataaaaactggccagccccggtggctcacacctgtaatcccagcactttgggaggccgaggcaggtggatcacggggtcaggagttcaagaccagcctgaccaagatggtgaaaccccgtctctattaaaaatataaaaattagccaggtgcagtggcaggtgcctgtaatcccagctactcaggaggctgaggcaggagaatcacttgaacttgggagtcggaggttgcaatgagccgagattgagccactgaactccagcctgggcaacagagcaagactctgtctaaaaaaataaataaataaagttaaataaaatatactagtgtctattacaatagtagcaactacaatttatgaagtattagctgctaggcacagagacaggtgcttgatgtacattatggatgtacattatgtctatacaagcctcacagttgccttctagttttttttaagtgataaagactacattgggtagattgcttgattttgtgtaacatatttaaaaaaaagaaatgcatttttttcattttatttttattaagcactacataacacattgcatgctacataatacactgtaaccttctagcaggggtagatggccataactgagttatttttttcatcaatcaggaaaatgcttccttaatcaatgttctccaaaccctgaaaaacagtttaaaaaggagaatgtgacaagtctgttcccatcaaagatatgccatgtacttttatttccagtgtcattaaatggcattgttattaaaaagagtgcttccacatcccacatttctctaactgcaacaatacattggattaaattttataatcactaaagaataacctgtaatgatttctagttttcattttctgacagcagcatattgctttatatgaaacaaaccttccccgacccccaatcagaactaaagtcaagcaactctttaccacctggatcctttttttttttttttgagatggagtctcactcccgtcatgcaggctggagtgcagtgatgcgatcttgcctcactgcaacctgcatctcccaggttcaagcaattctccttcctcagcctcccaagtagctaggattaaaggcatgtgccaccatgcccagctgatttttgtatttttagtagagaaggggtttcgccatgttggccaagctggtctagaactcccgacctcaggggatccacctgcctcggcctcccaaagtgctaggattacaggtgtgagccactatgcctggcctccacctggatccttttacaaagcacctcagtgagtcagaggacaagaaggtaaaatctgttttaaaaaataacagccaacatgaggtagatactattattctcattccattttttttacaaatgaggaaatggaggctcagagaggttaaaagtcacctgcttaagtccataaggaattagcagagccagaattcagggaccccaactcccgaacccttctctgacaagcactacactatctattcaaaatacctactggatcttactaagttgacaaccaaatacttcagaagctataaattaaaagattacacctggcgtggtggctcacgcctgtaatcccagcactttgggaggccgaggtgggtggatcatgaggtcaggagttcaagatcagcctggccaagatggtgaaaccctgtctctactaaaagtacaaaaattacagcgcacctgtaatcccagctactcgtgaggctgaggcaggagaattgcttgaacctggtgggtggagcttgcagtgagccaagatcattccactgcactccggcctaggcgacagagcaagactccgtctcaaaaaaaaaaaaaaaaaaaaaaaaagactcatcagtgatgacacttcttctaggtattaaataacatagcccaggtatttggtttactattacaggaagaactgccttaagagaagttaaaactgtatcttccttggagccatctcttagaaatcctaattctgtctcacatgctaggtgattctgatggttattcttggaccatactttgagaaatatggctccagataagtagatatctattatcatgttcattggattagattctcaactacctctctactgagaggtgtatcacccaggttgagtccttataatattacttaatcactctgacccttgtctataaaatggaaatactatttacttaggtttgttgtgaggaataaatgaggaaggagaaaatattaaaaagtaaacatttttaaaagaagtatgagaatgaactactcctacaaaatataaaaacatactattagggccaggagtaggggctcacgcctgtaatcctaacactttgggaggttgaggtgggcggatcacttgaggtcaggagttaggaaaccagcctggccaacatggtgaaactccatctctaccaaaaagtacaaaaaaaaatttagctgggcatggtggcaggtgcctgtaatcccagctactcaggaggctgaggcacaagaatcgcttgaacccgggaggcgggggttgcagtgagccaagattgcaccactgcactccagactgagtgacagcgtgagaccttgtctcaaaaaacaaaaaaaaagacagaaaaacaaaaaatatactattaagttgagccttatgaaatgctactgcttggtcgtttttgacctacaaaaatggcaatgtcataattgaatcaaaatataaaattatagtaattctttaaatgaagtattgttgcaggaataggcagacctagagtatagaaaagcacatccgtgaaacaggcccatgtgtacatggaaatttagtttaccagagtggtattacaaataaaaataaattgggtgcttggtggttttttttttttttttttttgagacaggctctcattctctcgcccgggctggagtgcagtggtacgatcctagttcactggagcctcaaacccctgggctcaagctgtcctcctgcctcagccttctgagtagctaggactactaaactcttctataaatgggtaattgcgataactagctacctgttggaaaaaagtaaagttaatcctcctttcacattatactccaaaatgacctgtagatgtaaccaaataactaattttttaaagaaactaacaatattaggagaaattattttttaaaagtatttttatgagccaggtatagtggcacacctgcagtcccagctcctccgaaggctgaggcaagaagatcacttgagcctatgagtttgagggccagcctgggcaacacagcaagactgtctctattttattttttgaaagtatttttataatcttagatagaaaaggcctttgtacgggagacataaaaacctagaatccagaacaacaaaacatgatacattgaatatcaaaatttagaactacctgatgaaaaacatcataaagtaaaaaagacaaacagcagactgggaaaaatgtcatatataaaatagacaaaaaaattaaagtctagaatatataaagaaccatagctcaaaaagaaaaagacaatggaacaggcaaaggatataggcaacaatccacagaataagaaatatatgacagaagaaaaactaaaaaaaaaaaagaaatataaaagattaaatatgtaaaaagatgccaacctcactagtagataagaaaatgctagttatatattagcactgtatgacccttggcaaggcattaccagaacccacctcaaccctggcaaaaggctggcatcagagtggcatcttacctttgacacatagtaacgatcaactccagagatgcgcctatctctttccatcagactccagtgatacccaaaatgagcaacccttttttccttcaaataagagacaattattgttgcagtttataaaagtgagtgacccaattgatagatactacaatttttaaaagggacattccagagaaatggaatcatcgtttaaataaaaatgcaaattagtagtacaaagaacagaatctcctaaataaaatcagaccactaaactttaggattaagttggtacctgtgactttttacactattttaaccaacatgaattttttttccttttttttttaaaaaaaaaaaaaagaaatatctagttgttgtcttttgggacactaagaaacaacagctgtagatcacacgtgaagaacaataacaaaatcaaaaagtaaataaatttatatcctgtactcttgagatgatgtgaaggactaggaagaggggaaaatgaatcctgatgtaaaaaaacaagatctcgcagtaaattcctaaaggcttgcaagagaaagtggggaataaaaaagtcaagggtggccggtcgcggcggctcacgcctgtaatcccagcactttgggagatcaaggcgggtggatcaaccgaggtcagaagttcgagaccagcctcgccaacatgatgaaaccccgcctctacaaaaaaaaaaaaaaagccaggcgtggtcccggctactcgggaggctgaagcaggaaaatttctttatttatttatttttttttgagacggagtttcgctcttgttgcccaggctggagtgcagtggcgcgatctcggctcatcgcaacctccgcctcctgggttcaagtgattctcctgcctcagcctcccgagtagctgggattacaggcatgcgccaccacgcccagctaattttgtatttttaggagagacggggtttctccatgttggtcaggctggtatcgaactcccgacctcaggtgatccgctcgcctcggtctcccaaagtgctgggattacaggcgtgatccaccgcgcccaaccaggagaatctcttgaacccagaaggcggaggttgcagtgagcgattctcaggcttgagccaccttttctaatctaccttcccggcccccgcgtcgctactctgccctaaggcccactctgatacacccagaaacgctgtttttcactagagcaggatgtagtttctatcgggcttcgtttcgcaagcctcggcttctaggcaaccggaagcaagtagagggccgacctcggagagagggttcgcaggctgacggtctccctgcccaccacccttttcggaaatcagcccgtggagtcggcccccgggccgaagccggcttaccttgcccccgttagtgaacctgtggatgtacgcagtagccagtcctggaatcaacaagcacacgcccatgacggagagtccggggagaatctcgaaccacatctctgccccgttacctaggccaaaaccctacttctgggtccttgaaaggtgacctggcttcgcctctcttcccagcaagccccgcggccgcccgcgagcggggcggtgccacgtacggctccggaagaagcgacggmmtctgctagggcacaagagagacgggcgctcgsgctctcgcagtcctcttccgtcagtgtcttttgcttcgactcccggcggagcgcgcaacgtggagtgacgtgcaggggccaagtgcaacccaggcagccacggctgtttcggagctcrggactctaaaatggcagagcagctttctccaggaaaggcggtggatcaggtgtgcaccttccttttcaaaaagcctgggcggaaaggggctgctggacgcagaaagcgcccggcctgcgacccagagcccggagaaagcggcagcagtagcgacgaaggctgcactgtggttcgaccggaaaagaagcgggtgacccacaatccaatgatacagaagacccgtgacagtggtaaacagaaggcggcttacggcgacttgagcagcgaagaggaagaggaaaatgagcccgagagtctcggcgtggtttataaatccacccgttcsgcgaaacccgtgggaccagaggatatgggagcgacagctgtctatgagctggacacagagaaagagcgcgatgcacaagccatctttgagcgcagccagaagatccaggaggagctgaggggcaaggaggatgacaagatctatcggggaatcaacaattatcagaaatacatgaagcccaaggatacgtctatgggcaatgcctcttccgggatggtgaggaagggccccatccgagcgcccgagcatctacgtgccaccgtgcgctgggattaccagcccgacatctgtaaggactacaaagagactggcttctgcggcttcggagacagctgcaaattcctccatgaccgttcagattacaagcatgggtggcagatcgaacgtgagcttgatgagggtcgctatggtgtctatgaggatgaaaactatgaagtgggaagcgatgatgaggaaataccattcaagtgtttcatctgtcgccagagcttccaaaacccagttgtcaccaagtgcaggcattatttctgcgagagctgtgcactgcagcatttccgcaccaccccgcgctgctatgtctgtgaccagcagaccaatggcgtcttcaatccagcgaaagaattgattgctaaactagagaagcatcgagctacaggagagggtggtgcttccgacttgccagaagaccccgatgaggatgcaattcccattacttaggtttcccataattcttaaatttaaaaaataaacgttttgttcttttggaagtcttacttcgtgtccttcctttgtagagaaagtgacagagcaggcgggtggtgaagtagggtcctggattaaaagcttcaaggtaggtataatcaggatttttagccctaggataaccattttgcctgtgtttcttttcagaacactttggcataaattataggggtgggagtagtttgagaaaagagctataatttgctcgaagtaaccaaagccatgatgaaagcaagacctctgagcctgtttattatatcacatttctgtatcacttaatagtttacaaagtactttcatgcattctttctcttgggagcctgtactacaaaatatacccgagccaaggtgttggggagaggggttgtgtttggggaactggtagctagcaccacaggcttcacatatgggaaatgttccttgctgtcttggttatttatttatttatttgtttttgagacggagtctcgctctcttgcccaggctagagtgcagtggcgcgatctcagctcactgcaacctccgcctccccggttcaagcgattcccctgcctcagcctcccgcgtagctgagactacaggcgcatgccaccacacccggctaatttttttttttttttttttgtatttttagtagagacggggtttcaccatactagccaggatggtctcgatcgcctggcctcgtgatccacctgccttggcctcccaaagtgctgggattacaggtgtgagccaccgagcccggctcccttgctgtcttggaagcagctatagttaacccccacgtccatgggtgataaaagtatctgtgctcagctatccagtgtgacagacactagccccaggtggctattgagcacttgaaatgtgtctgaccactgtattggacattactattgtagacagaactcgtgaacctgcagaggtcaaaaacaatattttatcatccattacctgaaactatctgtgttctcacagtctctgtaatagtgctgatcacaccttattaaaattagtcaatgtacctgtctctccaactggtttatgaactcagtgactagcctagtgcttggcatataataagcacttaataaataagcctagagaggtttaaaaagggagattggggccaaagccttgaatccaagctgaggagcgttgactgtattctgtaggcagcgggggagatagcagaggtttgggaagagaacacaatcagacttgggtttttttgtttgtttgtttgttttagtgttactgtggttgcggctataggatggctcacaagggagatggaacacgaggccgggaggccagttaggccaaatgattagtaaatttttattgatatggctagaatttgggctaatcccacgaaacagatgcaagaataaattctgggttagtggtttttattcacattcattaatccatttaaagatattctttttttttttttttgagacagagtcttgctctgttgtctaggctggagtgcagtggcgcgatcttggctcattgcaacctccgcctcccaggttcaagcaattctcctgcctcagcctcccgagtagctgggactacagacgtgcaccaccacacccagctaatttctgtatttttagtagagacagggtttcaccatattggtcaggctggtcttgaacttctgacctcgtgatccgcccgcctcggcctcccaaagtgctgggattacatgcatgagccactgcgcctggcctaaagatattctttgagtagctactctaaatcaggcactgtgcttggcatgggggatattagcagtgaacaagatggacacagcccctgccctcatggagctggacattaaataatgactgtttgtttgtttttgagacagagtctcgctgtgccacccaggctggaatgcagtggcataatctcagctcactgtaacctccacctcccaggttcaagcaattctcctgcctcagcctcctgagctggtctcgaactcctgacctcatgtgatccacccgcctgggcttcctaaagtgctgagattacaggccaccatgccctgcctgtttcgtttcttttaatttcaaataggatctcctatgttgcccaagcccatctcaaactcctggcttcaagcaatcctcccgcctcagcttcccaacatgcagggattacaggcgtaagccaccatacctggcctaggaaagcatttggaaaagtgtcatgtcctacacaaagcttcggacgaaaaggaaataaatgaaaagtgtcacggaggcaaggcgcagtggctcacgcctgtaatctcagcacatttagaggctgagatgggaggatcacttgaggccaggagttggagaccagcctgggcaacagggagacccccgtctctacaaaaaacaagcaaaaattttagctgggtgtggtgatgtgcacctgtagtcccagctactcaggaggctgaggtgggagaatcccttgaacccagaagatcaaggctgcagtgagccatgattgcgctactacactccaacctgggtgacaggagtgagaccctgtctcaaaaaaaaaaaaaagagagaaaaatatggcaatgagtagcaaaagaaccagaaaaaatgttcatttttttaactatttctgataatttatactaaaaaagttattcagggttgggcacagtggctcatgcctgtaatcccaggacttcatgaggccaagattagaggatcacttgagctcaggagtttgagaacagcatgggcaacatagcaagactcccatctctaaaaaataaaaataaaaaaagttattcaaaagtagaataaagtgttatggaaaaagatatactttgaattgttatctattatataagctgagagaaaaggtccaggagaaaacacagatgataaaaggtgaaagaatgctgctgatgactaaattctaggaggtagaacagagaagcgacagaattaagagcataaatcagtcttaaagagttgagagggcaagagaaagatgacgtttgtgcactactctccacatgacgttttttaatacttgtctgtgaatctttttttcttctttcttttttttggtcttgagacagggtctcactctgtcgcccaggctggagtgcagtagcgcaatctcggctcactgctacctctgcctcccaggttcaagcaatcctcctgcctcagcctcccaagtagctggaattacaggcatgcaccaccacgtccagctagttttttgtatttttagtagggatggggtttcactgtgttggccaggctggtctggaactcctggcctcaagtgatctgcctgccttggcctcccaaagtgctgggattacagatgtgagccaccgtacccagccttttctgtgaattttgaaaaagtatacaatgtacttgcaaatgagcattattctggagtccgtagcattcagcagattcttaaaagggaccgtaactccataaaagcacctaaatcaatagtgtactcaaagtacttttcatgtttacaagcttatgattacattttctacagttcaggaatattttcatcacctttaattaaatggtacaacttcatttcataggtgggaactaaatagttattcttacaatttaaaagaaactaaatatgtagagggaagcaagcgctccagaagagatgaggttgcagctggaccctaaaggagcttacctagtttgaaaggtcagggcacctatgtctcccctaggaaatgagcctcaaactgagacccgagaggtgagttggagaaagagtatctcaggtagagggacaagtatatatactaaggccctgatgtgagagactgcctccagctaaaaactcaaggcagtctaaggtggctggggaaaagagacaaggtagtcagggccaaagagcagacaccttgcaagtcatgttaaggactttggactttatctgaagggcaaaaatgcgccatgaaagcattttaagggccaggcgcagtggctcacgcctgtaatcccagcactttgggaggccgaggtgggcggatcacttgaggtcaggagttcgagacctgcctggccaacatggtgaaacccccgtatctagtaaaaatacaaaaaattagctgggtgtggtggcgggcacctttaatcccagctacttgggaggctgaggcaggagaatcccttgaacctggaaggtggaggttgaagtgagccaaggttgtgccactgcactccagcctgggagacagagcaaaactctgtctcaaaaaaaaaaaaaaaaaaaagtggggggagctgggcgcggtggctcacacctgtaatcccagcactttgagaggccgaggtggatggatcacgaggtcaggaattcgagaccagcctgaccaacatggtgaaaccccgtctctactaaagatacaaaaattagccaggggtggtggcacgcacctgtatttccagctactcaggaggctgaggcaggagaagtgcttgaacccggggtcgggggtgcacagaggttgcagtgagccgagattgcaccactgcactgcagcctgggtgacagagcgagactccgtcccaaaaaaaaaatttttttaagggtttaaaaaggaaaatgaaatgatcagatctaaatttcaaaaagataattctgaagagtggggaatggattgaaggcagccagacatgaaacagggagatcagttatgggggtggtgcactggtccaactcagatgatggtagactggactagactggtggctgtgaacattcatttaataaatttgtattgatcacccattacatgacaggcattaagcactggagatacagtcatgacaaaagcacacaagtccctgctttcatagaacttacatgaagtgagcacagtggctcacacttgtaatcccagcactttaggaggctgaggcaggaggatcacttgaggccaggagttggagaccagcctggaaaacaaagtgagaccccatctctacaaaaaataaaaaataaaaaacttagcaagggatggtggcatgtgcctgtagtcccagctaatcaggaggcttaggcaggaagatcccttcagcctgagagtttgaggttgcagtgagatgtgatcatgccactgcactccagcctgggtgacagagaacccatctaaaaaaaaaaaaaaaaaaaaagaacatacatgagagacagtgacagatatatatatatatatcagattgtgatgagtgctatgaaaaacaataaagcaaggtaatgggctaagagtgcaggggtgtaggggaatgctattttatatatggtagtcagggaggggcctcttctgataaggtgacatttgggcagagacctacatgaaacagatatcggggagaagagcattccagacagagaacacctagtacaaaggcctgaggcaggaaagtgcataaaacacaactttgtaatagaaccaataattatagaagaacacctgcataaccaccacccgggtcaagaactacaagactgaaaacactgaagaagcccctcaaggatcccctccagatcacaccctcaggatcacaccctcaggatctcaggatcacaccctcaggatctcaggatctcaggatctcaggatcacaccctcaggtaatcacttaatcactatattgattttttttttttttgagatgcagtctcactctgtcacctaggcaggagtgcagtggcgcgatctcagctcactgcaccctccgcctcctgggttcaagtgatcctcccacctcagcctcttaagtagctggaactacaggtgtgggccatgatacccggctttttttttttttttttttttttttttttttttggtagagacagtggtctccctatgttgcctaggctgctctggaactcctgggctcaagcagtcctcatccctcagcctcccaaagcgctgggattacagatgtgagctaccacgcctggctgttgaacctttctgtaaacacttttttatttgctgaggtgaaatttacataacat

SEQ ID NO: 95061 - DNA, 131875 bp, Homo sapiens
  misc_feature (1)...(131875): n = A,T,C or G
tcatcactgatctgcaaaccagctgggacccgggccaacccgggtgaacgtgaagagagctgctcatttccactggcaggaaatcaatcttggaaatgccctttccacagcagaaaatcagataacaaatcgagctagagtttggagcaccatataaagaaagctgtgttccctagcaattaaacattaactcttctgcagtgacaacagtacactctcctggtggttctaagacccagcaattttatttgctataaagagtcaagcaagtcactttattcttcatttctccttagatatctccaaggccttagttcaattccaaatcaccacaaagccttctccaggccatcttgattcctcccccgcccccaacccttatctatctattccacatattttggtaaggagaacatcaggcttgcccattacttcactactgtgtgtgtagagagccttctctcttctgcttattgaattgcaagcctctggagacaggaacactggcttacctatgctttatttctatcagcaaacagtcagaggaaagatgtccccagaatgtgtcaatagatcattgttcaaaaacaaagtgaatgactatcctttgcctgcttctaaaggtaaaaaccagtgagatctaagaaaacgaaaatgtgggttttcaaaagaaaacaccatttgagttggatcttatttatttgtgtggttcatccacttgctaggtatccgcaccaatatttaaattgctggctgaatttctaaccatcagcttgtttttggtctatcatctcctaccatttgtcatttttatgaccaagaatgcctaagcaaagacttaggaaaagaaggggccaggcagagaaacataatgtaaaataacactggagcactgttagaactcgtttttattcttgttgcatacaaaaggcagaacagactgtcctgattgcctgaacaagccacacacttgacatcgccaatgttattgtagcctgctgtgcctggcaaaacccacttctctctcaaattcaggctcagatataacccctcccctgtgaagcttagcgacagcctgaagtagaactcatcatgtcttattaagccctctgtctttgtccattcagggtgctgtaaggaaatatcaaagactaggtggcttataaacaacagaaatctatttttcacagtttctagaggctgcaaaagtccaagatgaaggcaccagcagatttggtgtccagtgagggcccacttctggttcaaacatgactgtcttcttgttatgtcctcacatggcagaagaggcaagggagctctcctgagtttcttttataaaggcagtaataccattcatctaggcattcatctaggtcagtggtccccaaccttttcagcaccagggaccaatttcatggaagacaatttttccacgtatgggggctgggggttgaggagtatggtttcatgatgattcaaacccattacatttattgcttttttttttttttcctgacacagggtcttgctctgttgcccaggctggagtgcagtgatgccaactcagctcactgcaacctccacctcccaggctcaagccattcttgtgcctcagccacccaagtagctgggattacaggcatgcaccaccacacctagctgatttttgtatttttagtagagatggggtttcgccatgttggccaggctggtctcaaactcctgacctcaagtgacccgcccaccttggcttcccaaggcgctgggattacaggcatgagctaccggatccagcctatttctattatttttacattataatatataaggaaataattatacaactcaccataatgtagaatcactgggagccctcagcttgttttactgcaactagacggtcccatctggggtgatggcagacagtaacagatcatcaggcattagattttcataaggagagtacaacctagatcctttgcatgtgcagttcacaataggattggcacgcctatgaaaatctaatgctgctgctgatctgacaggaactcaggcagtaaagccagcaaagcagagcggctgtaaatactgatgaagctttgcttactcgcccactgatcacctcctgctgtgcagctcagttcctaacaggccacagacaggtactgggggttgggggatccctgatctaggtgatcacctcctaacggccccaccccctaatatccttacattaggggttaggatttcaacatattaatttggggagacacttcagtttatagcatcctcttagcattatgctataactggctatacatgtgtcttcctttatattaaattgtgaaattcattgggttgcataaggaagttattcaaaatattttttcaaagattttagcttgtgttacttgattgtgagaataactgaggtacactgaatttaagtgacctattcaaagccctaaaccaaatcaacaataaggtatgggcagaccccaataattctgacccgtgtcccaagagtccagccaactgactgcgtctttgtgaaagaacatctatcagctgtgaatgaaaaggaagtattagatgagaagatagtgcttgtccatctctgagctgctgatggactaggaatcctggctcactgtagtgacccaggagcactatccagagccttctctcccaagacatcccatcagggctctttcctaagggcacccctgaagaccctgctccacttcccagtgtggccttttctgtaattagaagtagtaattaataatcagttgcagagaagtgagccaagattgtgccactgcactgcagcctgggtgacagagtgagactccgtctcaaaaaaaaaaatcattagttattccatagaagagcttcatttgaaaagtcaatctactcagttcagatcagtaattgtaaactatcacaaagctacagctttcatctccatgatattacaattacctacctgcctaacctgtagtatctacaaaggttgtgattgtttatcactcagaattacttcattttaaaaatttttcaacttttcttttctattcaggaggtatatgtgcaggtttgttacaagagtatattgcatgatgctgaggtttgcggtatgactgagtccatcatccaggtagtgagcatagtacccaacaggtagtttttcaaccttgccccggtccctccttctcccttcttgtagtcctgtgtctatttttcccttctctatgtccatgtatacccaatgtttagctcttacttataagtaaaaacatgtggtatttggttttctgtttctgcattaattcacttaagataatgttgctgcaaattctgttttacagctccacagtattccattatgtgtacataccacaatttctttattcaattcactgttgatgggcactgaggttcattcctaggttgatctttgctatttttgaatagtgctgtgatgaacatatgagtacatgtgtctttttggtagaacaatttgttttcctttgagtacatacccagtaatgtggttgctaggtcaaatggtagttgtgtttggttctctgagaaatctccaaactgctttcttcagtggctgaaattaatttacattctcaccaacactgtataaacgttccctaacctctgcagcctcaccaacacctgttattttttttaatttaaataatagccattctgactggtgtgagatagtatctggttgtagttttgatttgcatttctctaatgattagtgatgttgagcattttttcatatgtttttggccacttgtctgtcttcttttgagaagtgtctgctcatttcctttgcccactttttaattgagttgttttttgcttggtgatttaaagttccttatagatgctggatattagacccctgcataatgtatgaatattttctcccattctgtaggttgtctgtttcctctgttgaaagtttcttttttgttttgagacagggtctcactctgtcacctagactggagagcagtggtgtgatcatggctcactgtagcctcaacctttccaggctcaggtgatcctcccacttcagcctctcaagtagctgggactacctgcgcacaccagatgcccagctaattttttgtatttttttgtagagagtggggtttcaccatgttgcccaggctggtctcaaactcctgggctcaggcaatctacccaccttgccccccaaagtgctagaattccagacatacgccatggtgcatggccaatagttttccttttgctttgcagaagctctttagtttaattaggtctcacttgtcaattttttgtttttgttgcagatgcttttgaggacttagttataaatcttccccaaggcctatgtcgagaagggtacttcctagattttcttgaaggatgtttatagtttgaggtcttacattgtattagtctattttcatgctgctgacaaagacatacctgagactaggtaatttataaagtaaagaggtttaactgactcacagttccacatggctggagaggcctcacaatcatggcagaagacgatggaagagaaaagggatgtcttatatggcagccagtagagagagaatgagaggggtttccccctctcaagtgaaaggggtttcccctaataaaaccatgagatcttgtgagacttattcactaccacgagaacagtatgggggacactgcccccatgatccaattatctcccaacgggtccctcccacaacacgtaggcattataggagctacaattcaagatgagattgggtggggacacagccaaaccatatcatacatttaagtctttaatccattgtgagttaatttttgtatatggtgataggtaggagaccagtttcattcttctgcatatggttggccagttttcccagcaccatttattgaataggatatcctttccccwttgtttatttttgtcaactttatcaaagatcagttgattgtaggcgtgcagctttatttctgggttctctattccattggtctgtgtgtctttttttgtaccagtaccatgctactgtagccttttggttactatagccttgtagtattttgaagttgggtaatgtgatgcctctggctttgttccttttgcttaggattgctttcactatttaggctctttgtttccatatgaatttcagaatagtattttttttctaacttagaattattttagctccaagatttcaggtttgaaattcctcctccttgattacaacactcctaacttccacctgtaatatttcatcacacctgctaaagatactttttggtgtctcataacctctagtctctcaactcttcttctctcagtgacccattgcatttggactcactgccatcccaatacaaacccaacccagtgctagccatttcactctgccctaaccagcactcctcaccctccacccgccacacctttgctaggtctgcctgcctggccccaccttgattacacctttcattttttccctcaccaggtactgtgtactgctatagaaagccatagtacattgtgaaaccattatgcattccttttaacctcagccatggcttcactacgtatgtgtagatgtccccatcagcaccttaaacatagtgtttaaaaccaaatttctcctgatatacatagttgttattgatgtaaccaatctctcaggcatcaagccttgaaatcaagagtgaaatttgtctcatttccctcccgcttccctgaaaccccagtcatcaaatccatattatctgtattatttttaatcacagcaaatgcaaaacctgtccctttttttcacttcccctgcagacccataccctgttccagttacactaatggtgataacctcctgactgattttggatcatccaatctctggcctcagttccaccttttttgatttagctaaagtttagctcacataacatgccccaaagccaccagtgggcctttcctctttgccaactaaagcttacattcctgagcctgaccgtcaaagccttccaggacctagcctttatctgcatctgtaagcatcaaccactgcttgatatcatgcagaataaaagagcaaatattaacatgttagagtacatccagtatattaaggataagtactgtcatggaattcctggttttttttttttttttgagacggagtctcgctctgtcgcccaggctggagtgcagtggcgggatctcggctcactgcaagctccgcctcccggattcacgccattctcctgcctcagcctcccaagtagctgggactacaggcgcccgccaccacgcccggctaattttttgtatttttagtagagacggggtttcaccgttttagccgggatggtctcgatctcctgacctcgtgatccgcccgcctcggcctcccaaagtgctgggattacaggcgtgagccaccgcgcccggccgaattcctggtttctaaaataaaatgtatttcttgccaagggtcatgttaaggtttgagaatcactgttctataccatttgctattcctaaacctgaactgtgactttctccttcatttttatattatgaaatatttcaagtatgtagaagagtgtagagaataacgtaacatttatcacgttaacgtgatgtctactttagatcttaaaatagatatgtacatagtatatgtgtttatatgtgtctataaatatattagtgtatctatctgtttgtcctcttctctctaaagcagatacaattacctgggcatagtggctcacaccaataatcccaacactttgggaggctgatcacttgaacccaggagtttgagaccagcctgggcaacatagggagatcctgtttctacaaaataacttttagaaaattagctgagcatggtagtatgtgcctgtggccccagctaagggggaggactgcttgctcctgggagattgaggctgcagtgagccatgatagtgacaccgcattctagtctgggtgacagagtgagaccctgtcttaaaaaaaaatggattcaactgaaacgtagcttcctatgtctacccattcccttcccaccctccccactggcagtctctatgcattgtgggtggttttcattcccactgttttcacatgaaaacattttgaaattatagttatatctacatataatgatacaataaaaccacatgaaatttataaataagatttttttggatatttttaaccttgatacaaattttgtacctaacattcttctttcatttaatctacgtttgtgtttttccacattagttgctattctctagttgactcattttctttgctgactacttccactgtatgaatataccacaattctttagttcatcctcctgtggatggacatggaggttgtttctagtgatttgctccgacaccctaggctgcagtctagtcttgcccatgtcttattggatatgtatatgactagaaggggattcctttatagacttttgcccaggttgttscctttacctggaatagcttcctgtcagaaaaccttatctgtccctgaaggcacttctcacatgccaattcttccatgacttccaactcacctggtcaaagcaatatcttcttccatccattctcctgcatcctccagtttgtatcacttaaatgatgctaccatatacaaccttgttctgtagttacctgagtattcccaagtaggccataagtttcttatgggcaagtattgtgttgtatggtacctccctgcttagaccctagcacagatttttgccagagtggcccctcaacaaacatctgttgaatccactaaactctccttttgctaccaagtactgctatcattatctaatgatatatatcttatgacaataatatacacctaatggctgctacattctcatgtgttattatttatgtattttcatggggctctctaatgtatgtgggagaaactaaatgtttagggtataccctgagctcaacaaccagctgaggctaaatgcccatagagagctgtgtatgcataaagataaaggaaaatatttctcctcctttcttgttaaatcacccaaaatattacatttatgccagtaattttataagaattgtgttcagaactaaaagaaatcaaacattgggtggataagaatgttaacaaaaattggagtagggggcaatttctgagattggtgctgtgctttttttcttttcttttgagataagatctcacccaggctggagtgcagtggcacagtcatagctcactgcagcctcaacctctgggctcaagctattctcccacctcagcctcctgagtagttgagactacaggcacttaccaccacacctgactaatttttatactttttgtagagctggggtttcaccatgttgaccaggctgatcttgaactcctgggctcaatcattccacccgccttggcctcccaaagtatagggcctacaggcccgagccaccgcacccagccattgctgtgctttttgaatccaccaatgcttgttgccattagtgtagaaaggacttagagagagaatccgtttcctcttcccccacctagttcctgtcaccttagcaattattctataaatgtggcctggcaagagagttacaaacagccatgtgtgttctgagttgctgctagtgttgtagctttagaattcttgaccagaagacaggattggggaaaagcaaaggtgcctgtccatccatagatattaatttccccacaaagttcagtgggaggaggagggtgggggagattttttcctgttccaaagtagagatttatgctcagtatacttctttttattagacctagaaaaatgaggttaagaaattatatgtggaaaaatcagttcaagtatccaaggatgcaaacctctttcagtttgttcgtgagtacaaagtattggcttaaatgatagcaagttgatacctgtttataccagcctcataaatttgtaataaaacatgtccaggtcacaggatttttataagcagctcaccattccatgccatatgatccatcaaataaagaatacatgaagtaaggatttttaagctgccctctttaagttgacaggaaggtcagttgaagcctggaaaatcctagtcttaatgaaggcgtttaaaactcatattgaaaaatgtacgttttctcagctcccaaggcaccrcaacttctcaggacaaacaacaacatgcaaattttggaataactaaagaaatcaaacccttggtgtttgtttctaggttataggttgattttagaaaaggccacatataagaataaccatttgtccttactgtaacataacctcaagtctcagatgatatctgattataatctgtgaagtgctacctgactgcctggattgtttttccaaatgagttgaaatgtccacgtccacagctgcccacgaatatgtactttaaaagatatacacagcttgattattgactgagcattgccataccacgggtggaccctggcagatttagacacagattttaatagtagccaagagacaaacaactccttccagtctttgctcaaatctcacctcttcaaggaggcttcccaaccaccctattgatttaatactgcatttctactctccctggcattccacaacacctaactctgctctactttttctttgttttccatagtactacttatcaccttgtgacttaacatgttattttctgctcacactttaaaaaaatccaggccgggtcgggtggctcacgcctgtaatcccagcactttgggaggccaaggcaggtggatctcatgaggtcaggagttgaagaccagcctggccaacatggtgaaaccccatctcttaaaaatacaaaatagcggccaggtgcggtggctcacgcctgtaatcccagcactttgggaggccgagacaggcggatcacgaggtcagcagatcgagaccatcctggctaacacggtgaaaccccatctgtactaaaaatacaaaaaaattagccgggcgcggtagcaggcgcctatagtcccagctacttcggaggctgaagcaggagaatggcgtgaacccgggaggcggagctcgcagtgagccgagatcgcagcactgcactccagcctgggggacagagcgagactccatctcaaaaaaaaaaaaaaaagaaaaaaaagaaagctgggtgtggcggtacgcacctgtaatcccagctattcgggaggctgaggcaggaaaatcacttgaacccaggaggcggaggttgcagtgagtcgagatcgcgacactgcactccagcctaggcaacagagcgagactctgtctcaaaaaataaaaataaagtaaaatacctaacataaaatttaccatcttaccattttaagtgtacagttcagtagtgttaaatcaattcacagtgttgtgcaaccgatctccagaactcttttcatcttgcaaaactgaaactctgtatccattaaacaactccccatggctccctcttcccaatcccctggcaaccgccattctactttccgtctctatgaattcagagaacactactctaggtccgttatataagtggaatcatacagtgctttccttttgtgactggcttattttgcttagcataatatccccaagggtcatccatgtcatagcatgtgccagaatttcctttttttttttttttttttttgataaagagtattgctttgtcactcaggctggagtgcagtggcacgatcttggctcactgcaatctctgcctcccacgtgcaagcaattctcctgtctcagcttcccgagtagctgggactacaggcgcccaccaccatgcctggctaatttttgtatttttagtagagaaggggtttcaccatatcagttaggctggtctcgaactcctgacctcaggtgatccacccacctcagcctcccaaagtgctgggattacaggtttaagccaccatgcctggtcaattttcttccccccctttttttttagacagaatcttgctctgtcgcccaggctggagtgcagaggcccaatctcggctcactgcaacctccacctcccaggttcaagtgattctcctgcctcagcctcccaagtagctgggatttcaggcatacaccaccacgcccagctaatttttgtatttttagtagagacagggtttcatcatgttggtcaggctggtcttgaactcctgacctcgtgatccgcccgcctcggcctcccaaagtgctgggattacaggcctcagccaccrcgcctggccaattttcttcctttttaaggttgaataatattccacaaaattttgttatatctggaatggggtatatttgatgcccacttgataactctgcttagctgtaacaaagatacctcaaatgaacactaccaaaagagaatcaagcttcttccactaaccctacttctgtcctgtgcttcttgttcctatctcagtaaatggctgcacccaggtgctcaagccagaaaccagagatatagcatttcttcttcactgttactgttctttatccagttgccagtgataattactaaaatgacttacatatattgagcacttactctctactacacatggttctaaggtcattgcatgtgacttaaataaataaaacatttactcctctcaactctatgaaatggaatctactatttttagctattgtacwgatgaggaaacaggtgaagtcccttgcccaaaatccagacaggaagtggtggagccagaatctgtgcccaggtagtctggctccagagcccacaccctaaacttttatgctattcaggaaatgctttctgtttcaacctcgtttattggaaatcattctaccaatgtattagtccactttcctaaatgtgtaagtgaacataattttgtccaggtcctttatctctttccatataaagtttggctaatagagataccaatgcgaagaagataggactgtgtctatggtaagcctaggaagttttggttaagagcaaaacttaaaggggaagttaagtttcccctttaagttttgctcttaaccaaaactaagtttcccctttaagttttgctcttaaacaaaacttcctaggcttttgggaagttgcttcttaaacaagtcccaaggatgttctccctgcgaaattgctcttaaacaaaagtcctaatagcatttgattttcctgtgttttgatatttttttctctaaagtggaatatgtcagcaagtcagtttacttgaagactgtgattaatcaaagctataatgtagcagatacagttattaatatcaacaaggtacatcaatcataaacaccattaaaaaacttaaaactttccttctttgaggttgcattgatcttggaggcaaagtgggctggaaagcagacagtccaagcctgagtcccatcagattaaatgaatcatatacttaaaataaaccacaatccttctggtaccaataatgccgtaaactgaaaataataataaaggccaactacttaagatttctgaattaaagttgaaaaaaaatgaatgcaattacaaggagtaagatgaatgcaggtcgagaaagtgtcacttttccattttaagcttattcagtgtctaacagccaatattatataagtttaccatcgagttaacattaaaatacgatgcattttaaagcaaaagtgtgccttttgaagtccctaaggtgcctttagaaaacagaggatacagtaccagcaagaagctatttgggcaagtccatagatcacatgggctgggaagagacaagcactcaatgttaccagaaattcaaggtcagcacttgcagtttcatttccatcaccccagcactccctttgacaaaggattatagtatctactgaaaagttgcattcattcccaacttgctatttcagcctcaaccaccactcatccctccagagaattcaattactttcgcattcccaaataacaagcaaatgatgatttggggggcctctttttatatgacatccaaaaagatgcagaaaataaagaacaacagtaagccagaagtgatttcagcttaagtatgatttttacatacgcatcactagacaaaagtatacaattaatggggtgggggtaagctctaaatcttatctaatttttagaaaatactttaaaaatacttggctaatctaatattttgtctaacctatatgggtttttcttcctgcttttcctcaccccatatccaatattcagttgagacttccaaaatggaaaagtatctctgcctgtccttgctctgaaatcagagcattccaaaatgagcctcagtttgtcttttccttgcaaaagaatgtactgttgattaaaacaagagaaaaccacaccagtgcatacacagtctgatcttaaccacccagaaagcagcctggcatcctctgtcaagcctcttagagacaggcaggcctggagcagcccacacagcttctgcctgcatagcctaccagctcacaatgattttggtgactacggactggcctaagccattactgctgtccaatacattgtctaaaatatggtcatgaacacttaaaacctcaccaaggaagtcttgatgcttcataygcattatcttaatactctccaaatttcttcaaaagagaactactatgtgacagcaagttagttataaccaggcactaagttttttgctttcccatctcattaaactacacataatctagattcagtttaatacaactgctataccagagtaggaacaggacaggctctgggtttcaattccttttcttccccttcagcactgcattagcatttttcttccttaagaatgatttgatttagtcttactgacaaaccactgaaggacctactataagttgcaaagggagagttgcaacttccaaatcttccatgaaccatcagtgtttaaagcatcccagccaggcatggtggctcatacctgtaatcctagtgctttggaaggccaaggcagtaggatcacttgagcccaggagctcaagaccagcttgggcaacacagaccctgtctctacaaaagaataaataaataaatacataaaaattagccaggagtggtgccatgcacctgtagtcccaagtacttgggaggctgaggagggaggatcacttgagcccaggaggggaggctgtagtaagctatgatcagatcacaccattgcactccaacctaggtgacagagtgagaccctgcatcttaaaaaaaaattaatcaaaaaaattttgctttctcttctgttttccagagagggtttggcatctatgtggtaatgtcaatgaatgaggagatctgctccctagctgttagggacctaatatgaccacaggctaaagagctcactgaattttagtgcaggaagggctttatagactacttatttaggagatggcaaatagatttcacttgtcatgccaacctctattgcttggtaatggcttcctgaaatcacgtgttgagcagcattccaggcctggactggagtttagagggcaaggtgttatggatttacaatgtctgccacaagctcttgagggaggtggggctcaggagggaacagtggcacagagccatatatttgccacccccgagctgactctactatagacaactaagtgacttgtcgtctactgtttttcccactaaacgtttttaaaaagtagtgatcatatcaataataaaaaactatttcaaaatatttgcaataacatatctttaaataaaatacattgtccctgaaaatgtatttccctcattatctctaatattattatattaatataatattatattaattattatctctaataataatgaggtcctccttggcatgtcccatagagagccaaaggtggaatttctaggcttttcttcaattgcatcctgacaactaccatcttctagaactctatgagtaagatggttaaaaaaagagctaggaagttctccagcagttatatggcttctgtgatgggacaggacaggtaagggggaagaaaaggaaacagaggtttaggaatcaagcaaatacctataggctcatacctataatcccagcactttatgaggccaaggcaggagaatggcttgagcccaggagttcaagaccaacctgggcaccaacayagcaagaccctgcaaaaaattagctgggcatcgtggtatgtgactgtaatcctacctaataacaaggctgaaacaagaggatcacttgagcccaggtgctcaaggtcacagtgagctatgattacaccactgtacttacagcctgggcaacagagtaagaccctgtcaaaagaagaaatgaaagaaacgaaacaaaacgaaaagagggaggggaggaggaggaaagaagcgagtaaatatcagtgcagtgatcccaatgacaaaggaaactattaagcaggaaagtcaatgtgatgttttgataggaaaaatggagaaccaaagtttcttgaacttractagtgtattagcccattctctcattgttataaagaaatactggacactgggtaatttacaaagcaaagaggtttaattggccacggttctgcaggctgtacaggaagcatgatgctggcatctgcccactttctggggaggcctcaggaaggttacaatcatggcagaaggcaaagggggagcaagtacttcacaatgctggaacaggagtaagagagggagtggggaggtgtcacatacttttagacaaccagatctcatgagaaccatcaggatgacaacttcaatggggatgatgtgaagccatgagaaactgcccccatgatctagtcaccatgccccacttccaacactggggattataactgaacatgagatttgggtggagacacagatytaaaccgtatcaactagcaaagctatcttgatcaattagtcaatacgatttatttacttgctgtctgctctgttcttaatgctgttatggaccaagtggacacatctgaggaaaaaaaaaaaaaacagatccttttgtagccagcttatccaatctctccctctaccctaaggcaatcttggacacccaggccaggtcagatctctggagaggcagaatcagcctcccagtacctactcagtgttggcagccaactggctcccaggtgaggagaacatttctggcagtaaaagcagtacacagcaggcaagagaccctaagaaaaagcaagggagaggagagaggcatgtgattccggagacaaataaacacaattagctgtgctagaaacaaactgaaaagactcagtgggacggctgattccttccgccaagagaaaaccaaaggagaattcatttaaaagaaaccttttagttcccttggcagctatggcccaatgacagtcgtattttctattragtccttttcattgtggatttctccaagatttaaaacactatcacaagaagggtttgactgctttatcagttttgctgccctaatagaatccattaatatttcaggctggtcctttctttctttcagacgggcctttcacagctattctgtccctgtgtacctaaatgaacccaatttgcagcaatgggaaaatggttgaattcayagaaatcaacagtcatgtccgtgggagtttgttaatcccaggatccaattctgtaatgcaaggattagctacaacagtggggtctggtagcaaccatgtagcatggcagtaaacaagatgggctttggagttaggcaacttggatttgaatcctgactccgtcagttacaagttgggtgaccaggggcaagtaatttaaactccttgtgtctcagagccttcatctgtcaaatagggatatagtgatatctaacagtgttattgtgaagtttaaagaattataataaaagggtccttaccttttggaaacacattttagaatgttcacaaataatatgatgtctgggatttgctttaaaataatctgaagatatatatatatatatccatatatatatatatatatatggagttggccatgagctaataattactgaaattggttgatgggcacatggggatttattataccatattgtctacctctgcctgtttgaaatttcaataacagaaagtttaagagagagagagaaagaaagagagagagaaatacatgtaaaactcttagcacacatgtgctcattaaatgtaatctgttgtagatcagaggttttgagggcattgtttccaggtcacagaggtgccaagagaccagcctgcctctctagaaacatgggtgggttctggggccaacatgagggagttaaacacatggagaacttcactgtcactctagatcatccactactgcccaaccttttcactatcagtaacaataagttgatcattattggttctctatgctttggaagtttactaaatctcacatccttccaatattcattacctagatcttttacagatatacagaatcagagttccgagtcagctttagttgagctggtagtggctccaaactgagctactgtcatttccagccaaaagctaagcatttccaagttttaatggctcgtgcagctgcctgacagacatgtatgtggtttcacaggcatacaaaatagtgaaaaaatgttcaatgcactccatgcctccagtgggttcaggaaaccacttacatcaattcagagccagccccagaaattcccagcttctaggatttcttagatagagtgctgagctggacagacagggaactccaccctggagtaatgccaagctagatatgcactccaaggaatcccttaattaaaccagcatttccaaacacgatttcatgcccccacacaaacaaggcatctgccatctttgctctgacactaactttaagagcccttgcactagccacttcatctctgtttcatttgtactgggatatctccctcctaaggttgttgcagggaccaaaggtaatgcaagtaaagtacattgcacaatgcctggcacacagtgattgctcaatacatggtagctattttatgtctttgtatgcttttacatatgcatggatatattattacctcctttggaatttggttaatatttagacccaatggttctctaggccatgagatgtatcacagccacataattataaagagtttaatattttcttttacattttgatgcagctgtgttcaatcttctttwccacagagatggatgtatggatcactgtgttattgtcaacagtacctgtgtgtcctctcctatgcaattcatgcttcttctgtaatagaagaattcttctattcatgcttcttttatagacagtaaaaaggagaaaaaaagtgctccaattcaagtctagcaagaccattgttattactattatgaaatacttgctgaatgtccactgtacatatattgttgagagggtcactggacaagatgagcatataataaagctggaactccattagcaaagacttcagtggtctttggcttctctagggaagctaaaagcgagctaatctaaaattttacccttaccttacccttacctaaaactggcactctctttccccttatcctgatttatttttcctcatagcatttttcactacctaaaatcatacatttcctgatttacttgtttattgtttgtctcccccaagagaatatatgttgcatgaaggcagggaccttgttcatctctgttatctcctgtacctagaaatctgccaaccaagcatatagtaaagtagacccttgaaaaatatttttcaatgagtgatttaattttttcctttctgcaaacacccaattgcaaaagggaatctagatctgaggtcctgctctatgtattccttatgtagctgaccactgcaatccaatgcagaagatagggagtaaacacacacacacatacatgtgaagtggtgccaagtgatacgaagaaaaatgaagccaaataaagtgatttcctcagggccttacataccatatactattctgatttttgcctctgtgccattgcagaagctatgtctcccatcataaatgtccccctctttggatattcttcttctttcaagatctcactcaggttgtttctcctgaattacactcaaactgtaagagctcccactgactttaccctgtctcacactgaggggtactgcacctactaccagtgcctcagagtcctacacacaattataaacgttctaaagttttctccttcatggaaaaaaaaagcagacactccaaatgtattaggctccttaagcacaaaaagacgtgctttacgcttctcttacatctctcaaggaatctagcagtgttgggtacttattaagtggccaaaaatatccctgtaaatgaactgacaaatatcctatttgaaccccacctctgccgctctggccttatttcatttatgccccaacaacatctattgcctttttctccctctccctcccaagtgtccgagttagactgattcttgagacctacaagaatctaagatatttacatcccagatgagacaaagacattgtctgagaccctcagaccagcagcttctcagaaggtggcaatagttccagagatataagtcataaacaagtcattattcagtatattttaaagaggggaaaaaaaaaaacccatgcaatccaagaaatacctttagcacttcatgaattaacatgaacctcttcatcaaaccaagatttgcggaatcagtttctactttcttgaaatgccacctggtttcagtgacattcttgaacctatctgggtaacattttagcactgcaggcaattgagtattagcccatgaaactaattccactttctaaagtactcagggtctctgacaactcaagggaataatagtaatgactttatcttgcttaagtgcaggaataaaaaagctaagatgggatttctggaatgaattcaccatggaaaatataaattttctaatttgagagccattaaactccatcactgactatatactatctgctcttccatattttatacagatttaccaaattctctttatagttttcaccaacagtcatttctcccaaaattatgatccatagacattattcagcagagtatgtatattttatgtccatcttcgcctggttttgtagctcacctccagtttcctgactacggatttattttgaaccttttggtattctcttggagtcaaaagagcaggtgttaaggacagggcaaatacagagtttcacaatattgttggaaagtactcaattctctattctttgagaatagagatttttttcttcttctttgctccttttaatcttggacctgaaaaggataaatgtcaccacctctactgttagctgtgtctcaaaatcaacaaaaagctcttaaatcaataaccctagctctggtctttctcaaattcttacagccctaggaactgagggttgattaaagtcaggaaccaggtcaccctggaaagagaggtgaaccagccttgggtcttccctaggtgtacttgtcttgaaattttgaagtcacctattacctccattgtatattaacatttatcataattattatttgctcattcaaaaaatattgctctgatatggtattgaatattcctcacataggaaaatatgaacagtttatttgccacccagatggtttggaagcctataccctccaagacattgagaaaagaaaaatctttctctcaggagagagaatgagtgccaagcaatgggagaagccccttaaaaaaccatcagatctcgagagaactcactcactatcatgagaacagcatggggaaaactgcccccatgatttaattatttccacctggtcccgcccttgacacgtggggattatacaattcaaggtgagatttgggtgggagacacagagctaaaccatatcactcttcatctgttaaaaaaaaatcagtatatttgctctttatgcctcatgggatggtagcaaaagtcatatttgagaagatatataaaactactttgaaaactgtccagcagatgtgcacacagaaatattgaatgaggtaaatttatcagtattaattaaacacctctaaggttctaaaacaatgtttttcaaactttgaccacaaccaattagaagccaacatatacccaagactaaacaaaagtttaacaacacttacgttacttagatatttttaattcccttttcttctttttttttaaatacaagtcatgcatttcacacggcagtggtccttgaccctcaactcacacccaaaaattaaaaaaatctgatacccaggtgctactcaccttgactcgcaaacaatggtctggggtggggctagggcatcaatattcttggacaaccccaggtgattctatcctatagccaggactgagaaccacagtaccaatggtttctagatcacagctaagaaaacactgttacttatttacatccttatctgctaaacattctctgtgcccagaatttgctccacttgcccgtttgctgaagatctgcttgttactgagttgattactcactcatgtggctcgtgtgtgtgtgtgtgcacgtcccaagtagttgggactacaggcacgtgccaccacacctggctattttttgtatattttgtagagatggggtcttgccatgttgcccaggctggtcttgaactcctggggctcaagcgatcttcccatctcagcttcccaaagtgctgggattacaggcatgaatcaccatacctggctaaagaaaagcaaaggggagggaaatggccagacctcctcacctgctcacacagcaaaggaaactctctggtcatgtctagacaagggtctgagaagagccttcagaagcctgggagataataagttcaatcagaaggagcttcctggcctggctatctcccccttccaagtgtagcccacatggaacagaaagctcctccatcctcatctttcctctacacaagtctgggggactgtcctgtttgcgtggttgatctgcagagtacacttagctgtctggcagaacctaggacaaaatgcagaaggtaccagagacgctggaggccctacatctgtgcccctgccctatccttgggcacacaaatgaaaacaagaaacctgaattctttctgtacataataggttaagaaacaaaagctgtgtctgtttaaagcacagtctttggattttgacctagatctaccagtcatgatactaagagttgacacttattgcgatccttctgtgtgttaagcatttcatacacactctaactcacatctcttcagatatgcatcctatggatactcagattaagtaacacacccagggtggcacagttaagaaatggtggtgtcagggtgctaatgcaggtttatttttactccaaatcccacgctctagccaagggcttctcagcactactgatgttttgaaccagataactgtttgttgtgcggggctgtcctgtgcattttaggatggttagcagcatctctggactccactcattagatgccagtaacatccctccccctccaggtatgacaatcaaaaatgtctccagacaccaccaaatttcatcctctgggggaaaggggcaaattcaccacccacttctccccattaagaatcacagctccaggctgggcacagtggtttacgcctgtaatcccagcactttgggaggccaagatgggcagatcacgaggtcaggagttcgagaccagcctgaccaacatggtggtcaaaaattacaaaaatacaaaaattagctgggtgtggtggtgcgcgcctgcaatcccagctactcaggaggctgaggcaggataattgcttgaacccaggagatggaggttgcagtgagccgagattgcgccattgcactccagcctgggtgacagagggagacttcatctcaaaaaaaaaagaatcatggctccagtctaagccacaatgtatattgtttcctggtcctttacaagtacataaaccgctactcagaagacagagcaagaaccaaacacaacattccaggaaagtttcgtatagcaataataccaccccatcctgcagatatactttgtaattcactaattatagctattttctccttttatggcctctgagtacatattgggatctaattttgaaagagttaatccacctcaaaaatatgaacactattgagagatccacctatttacccttctttgagaaaytgaaggaaaatatcatgtagtaaaatccatatgaattcttagctccacaggccattaggagaagaagcttttgttcctgcatcattgtaagagagcacatgatgtgaatgaacttctgaagggcaaagcctgtgtctcaagcctctccatctccagcacttgcttgcctagaacagagaattctcactaaatggtcaacatttcatgaaacattaactatttcatagcagcccctaatcatctgattaaaattaagatgaaactttcccatctttctaatatatgtacatatatatataaaataaaatttataaacttgaaaaaaaactagtgttgacatttacagaagagctgagatttcagtgccaggctattcttccctattgtttaaaaaacacagcagagcaaaactcacatttggaatgaagggaatgtttaccagaatcgtctctttcaatacgtgccaagagaactgtagctgtttcgttagaataatattttcattggatgaagggaaaaaaattagagaagaggcttttaaacttttttctttcagatttgccttaccacaccaaactgttatacataatatacaatcataacaggaatgctcatttaaaaaaaaaatctgaattcaaaagaaagtaactgggagcactgactccacttatttggagtctgtatttcctcgtttctgaataaataaaaaataactaattgtcgttgcttttcaggttaccctttaaaaactcttaaaagaccaggagggcaaaaaccaaaatgttctatttgtagttagttgcaaaacctaactgaagggaatatcattacctgggaaatgataaatttccacatggcttcaaaggaattttaacataagactatcaataaataatattcctaacaagaataagtagactctgttgagcactcatgatgtgtccggcaccgaactcaagtgttctacacgcatcaatgttatttcatcttcatcacagccccatgaggtacatactcattaatatcttcattttaagaaaactgaggccaaaagagatgaaacaacttgccccaaaccacagctagatcaagattcaagctgtggctgtatgaagctttatgcaacacaacctgaaaaaaaaaatgcgaattttaaaaagggatatgttcagtacattttttactgtgtgccatgaaatcccaaagttgaaatgaatgttcagaaatcattctcttccctttacttctgtggatcctttcacatcaaaaatcaagcaccaggcattacctacagctggggcaaatggctttctgggtacctttttttttttggtgagacaacaagtcttttgtatttttgttttgctttctgtaaaaatccacaatgacagagactgcctagtaacaagtatcaggaggggcaaagaaaggcttactttttctagcccaataagccataagctataacaataaagtgacaggaccaattactttacatacataccagagcataaacaccaaaatgaaggttgtgcttcaaagtagttaagtttttgaggagttaaatgttgtactcaaaatttccactgtggagatgatgggagcccctaaccccggtgttgttcagggaccaactgtaattccttccaatcctaaatacatactccatgccattactaaatgccccttttagaactgccagtccttcaagagaattttcattactttaatgagcatacttattgacaacctcgattccccacctcggaagcccaagttggccccgcacagtgcctggctgtttcccagctgaggaaggtttgccaccactgaggcaatcaggaaatgtgttgcaaactcggaaggcaactccaaagcaggagctccaaaattattctcagtagtgacagcatcactagaattagtacacagcttgccaagagcaggcttttgaaggggagaaatrctgatttgaatgtataaatactggcatatttattttaacatttggataaagaattggaagcatcagcaagtgttacgtccaagtgaataagtacactgctgcaggaatgatagtgcagattttgatgcaaggtcctgaccactcaataaggtatacacacacccttaatggaaatatgcttatcctgaaatgattcttgtaaaatgaataaatcgctttctatcctgttaacttgcataattattaaagatttccttttcatgaattaaaaacagacccaacaaatgctagttgccaaaataatccttgtttatccaatgaagctcaaatctcagtgtgtgtcagaagatggacctatatgcaccagaaggaaatctggtgcatacacacacccgcaaaaaaaaaaaaaaaaaaacatatctttcaatggatatatccacttaataagattcctctactctgggtcttccagaattggttgttacgccaaataactgaaataattaccatacataattaacaatacaagatgggttaatgtaagatagtcaacatttaactaataattgaaggacacgcacccaaggacaaacagcagaaataaaaaacaaaaacaaaaacaaaaacaaagccatgccttggtcctttgtttttagatacacacttggatactcatccactgaggtcctaagcagtctggctcccttccagttgacctggtcaagggtgcagcagctcagggctgggtacacgttgtggataaccttaacagggcagtcaagggcagtctaccttccatgcaggcaactcctattaacttcagtaacaggagtcttcactgacaagcaaatactcccaaactgtacaatactctcatgtttaactcgactggaatgcagtgcgtttgtggacattgtttggtgtgtgtatttgttgtggattttcctcgtttttacccagaaacagcttctcagagtactggaacaagtagtacacacgtgggtctaaaaatcacacatacagtgtattgtatgagttatccctaaggcgcgcacacacacgggtaggtattacctgyacatttgaaatctcactccataactaatttttttagcccaggctcttctcattgggttcctggacaaaatcatttctaacccagctaagaaatatggaatgcaacttaggtcaagacaatgagcctgccaaggctcctggacttcccactagtctgccagtgcctggagcacccacagctgcacaggaagctgctgtgcccggctacctccaggtccccgcaccgggtcggcaaggtgcagcagcccccaaacccaggctccgaatattccccaagcgcgctgagtgcgaggtccccacccgcctccgtctggggatgcccggtcttgctccctagactagattccctctcgagttatctacgaccctgttccaccgagggcgctgcgttcccatagcctagacagacgttcccagcgttccagccccaccagccacctccgacaccccaccgcggcgttcccatccagccaagccccagcatccgcccattagccagctgccggcggttcccatcacaactccgctcctcgcgcccaccctctcagagaagccccctccatctttccccggcgaaagcacatgcctagacccaccctactctttccggggttcccctacctcgggctgcccttcctcgggctctccctaccgccccgggcttcctctcctccgcactcccctcccaggttccgttcccctccgccctgcggagggcgccccacaaatgcggacaggacgcccctcgttctgccctgtcggactcccccacgtcttggtcctgaatctcccgccctccgggctcagccttcccaacatcgcggtccccacacccccgccagctctccaggctcaggctccatgactccccagcatcgcagtcctggccaccccactacagccgttcagagctccagggctccccagcatcctaacccgtcgtccccccttccgggcttggattcggagactcaacatcggggccctaaactccggcccctggcctcaggttcccaacgctgcgactctggacctcccctctgagctcggggtgcgaggactccccaacgccgcgatcctgacgtccccgcctcccgagctcgggccccggggctccccgacctcgcggtcccaatacccaactcgacccgttccgcgcctcccgcggcgggactcaccggcaggggcggcggccgagcccgtgcgcgtagcccagcccggcccagcccgcgctcccgcctcggggtcccggccacgagcttcccgcgggtggctgtgaccgcggcgggctcggctcgggggagcggccgggaggaggagaccgccgggggcgggtgacgcccagctccgccccttcccgacccgggggcgggatgcgcagacccgcgcgctccgctgcagcccgcgccgctgccgccgctgcgaggaagttgactgacgccgcttccttccacccaggacgcagaccctcgcagtccctggtagctgcaaaaaatccggagagtttgagacagagacgccttaaccgccctcatattctttccaagaattcacctctcagggggccatttccgaagtccctcgggaagggcggaaaacaataacaaacttcatctgcgctgtcaagactgatttaaatcctggcctttctctcaccactctcgggtgaacgttcagggtcatgcccatgatataaataatgtgatgacataccacggaggcccttgcagacacttccacacccctaagatacacccgcccaagactcgcgcctctcccatgactacatcacacagacacatctgacactgacctgcagaagatcccacttctaccctgtgtcctcaatccacagccttcgtgggtcccagcaatagcgacccacacatacaatctattggaggcagggtgcgggggtgggttccacctcccgacttgctcctcacccacaatgttctcggtattttaccatgagaaaaagacagttaagaagttggatgatcaattaacaaatcaagttggctttgcttttaaaaagccttcttcattatctggagaaaagagaaggcctgggaagatggcctgcttactgtaagattttgtcagacaggcctaattctggtctgcttactgtaagattttctcagacggcctaattctggtctgcttactgtaagattttctcaggcctaattctggtctgctggttcccaaaacttctcttataccaccgtgtttcagtgacatgttgcacaacatctcacrtttgtacaatgtttccatttttcaaaacattttagccgagtgtgatggttcacacctgtaatcccagaactttgggaagccaaagtgggcagattgcttaagcccaggagttcgagaccagcctgggtaacaaggtgagaccctgtctctgcaaaaaatacaaaaattagatgggcgtggtggcacacgcctgtagtcccagctacttattctcaggcaaacatcacgaagcaaagaaagtaatcttagcaggattatttcagttccataaatgaagacatttagactctgagcagttgcacggcaggtttgaagctgagtcagagccaggaaagagcccaggggcctgtctttagagccactgatctccccagggaatcatagtccagcacttacttataggtggatactagtggaaatgtcacaggaggtctttggcagctttgytccctccatctcttcttcaccccaaagatgtcagggaactctcccttaacctcaaaaacccgggctctcctttatcgtcaaaaacctatgataggccagaggtcacaaccgtacaagagggcttattgagagggagtgaaaactccttccactttgggccactctagaaacaaaattacaggttagcacatctaaaagcctatccacagccttcatccaactaacgtgagctgtcagccgggagctgatgagcctccgaaatgcattgctgattatttttgcagtgtttttctccctaacagttaatccatgtggaatgtgaagaagtcttaaaaggagactaacaaggcttctaattctttctcaatggtaaatgttcctttcttcttgccctttatccaaaaggcagatgtgaacgtgcatgtaaagtgtaatgggtgtcaggcattgttatctgtgcatgaggcagttctgtttscaagtgacgctgtccagagccactaaataagaatggtggttctcatccttcatgccttttaaaactaccttggtctcaagctagcttcttttattttctactgtgaggtaatggcctacttccgtttgggcagtaaaagtgatgttttggtaacactggaaaaagtcctagggtgacctggctatttttgaattataataaaagcctgttgggtccttcataaaagacagttaggatggcctttggtatatggaaattcacagccaactttcctctatgtaataatcccatctggcaacacaattttgacctgagatttttccaaaacctggaaacagccaagatcttgggtactgcagtatttcctcaataaggagaatgctaaactgcgaatccaatcaacacgtatcagacctagttccctttcagattgcccttgaaagccacagacacaggcagtatgcaaaatgatgaaaaaatagataagattaaagagttatttttgtccgaatctctaataaaataatttgatctattttacattggatacataccacattgacactgtttttataaacactctactttgtgtttacatatcacttttccaagaagctcaaagtatgtttgatgacatcatattactcaacttcatacacttatatgaagtaggaaaggggtaaaaactggtagtcttattgtaacatggagaaatggaagtgtgaaatagttaaaaccacttgcctggaacattctggtatatatactggtttatacwaaaagtagacctrtttgtgaaaactgctacagtgaagagttatttaaaagctgtactatttttgttttctttttatatcttatgaaaggactgaggactattaatttcttcactatcttggcagagaaaaggagaggcactttgcatagtggttaaaagtgtggccttgggagtaagagccttcagtaggtaacttaacttttcttcttccttttttttttttttttttggagacagtctcactctgtcgcccaggctggagtgcagtggcatgatctcggctcactgcaaccttggcctctcggggttttttttaagtaattcttgtgcctcagcctctcaggtatcgggaattacaggcacacaccaccacgcccagctaattttttgtatttttagtagagatgccgttttgccatgttggtcccaaagtgctgggattacaggcatgaggcaccatgcctggccagtaacttaacttttctatacttcagaatccttatctctaacacaaaaataataattgtacccacatatcttataatgaaggcctgattaaatgggtgaaaagacaatgacttcatttaagtgggtttttttttttgagacggagtttcgctcttgtcgcccaggttggagtgtgatggcgcaatctcggctcactacaacctccacctcccgggttcaagcaattctcctgcctcagcctcctgagtagctgggattacaggtgcccaccaccacaccctgctatttttttgtatttttagtagagacaggggtttcgccatgttgggcaggctggtctcgaactcctgacctcaggtgatctgccctcttcagcctcccaaagtgctgggattacaggcgtgagccaccgtgcccagcttaggtggttgtttatgggatctttgtttcaatgctttctacttgcagaaaagatatactatcccagtggactacataggaagaatttggggaaacttgaatgtctgtatttttttaccgtgaagtcaaatccatcattccttgacattccatgatcagttagccatccatacttagtttttctatttagatcccctgccaaatggccaactgggaaaagtaaccatgatactaatttcacatacaggatgctaaagaactgtggttagtcagattaaaaataaaaatcatgattttcttgtactgtctgtctattttatccatttaatggtggaatggtaggggctcactaaagctaatttgattttcattaggaattgctcatgccattttttcctttttgtttacttttaataataacaattcagggagcaaataaattaacccatgtagacaaaaaagagatgtagaaattgctcctgggccctccgtaagccctgggcacatgtgaggttttgaggccttatatctgatctctcattctctaatgtaactagttcctagttgaagagtttcagatggcaaactataagaataaatgataaaaggacttagcattattttaaaagtcttatctaatttatttattttaaaatttttaatcgatgctaataatggtacatatttatgaggtacatgtaaatgttgacatatgcatacaatatgtaatgatcaaatcagggtatttagagtacccatcacctcaaacatctatctttttaaaaacatttttaaattaatttttttatttcaatttactttttatttttttgagacagggtctcactctgtcacccaggcaggagtgcagtggcacaatcacagctcactgcagcctcaaccttctgggctcgggtgatccccccacctcagcctctcaagtagctgagactacaggtgcacaccaccatgcctgactaattttttgtattttttttgtagagaccaggtttcacgatgttgcctaggcttgtctcaaactcccaggctcaagcgatcctcctgccgtggcctcccacaatgctgggattatgggcgtgagccaccattatcacttattggtgttgggaacacttcaaatattctcttccagctgttttgaaatatataatatattgttgttaattatagtcaccctactgtactrttgaacactggaactcactccttctacctaactgtgtgtttgtacttattaaccaacctctcttcacttccccctccctttccagcccctggtaaccatcattctactccatacctccatgaaatcaactttttaagttcccacacatgaatgagatcatatggtatttgtctgtctgtgcctggtttattttacttaacataatgacctccagttccatccctkttggtgcaaaggatttcattttttatggctgaatagtattaataaaataatatgaattcctacagtccaacaacatttgatgtgtgtaagtgttcattttaacacctgttcctaaacaaaacccagatttaggaaatacagtgtgtaattggatcatggtaatttaacagcaaataaaagtgtagatatcaaaacacaaggcctttccttattctccagcagaaatttgcaactaaaaagccttagggtaaatggacttggtttccctcctctttaaaaggtctgacaattttgtttcttctatccactttgctcctgattctcagtcattttatcctgggggagagagggaggtgggcaattcctgagcactgggaaaatcagaaagattgaacttcagactgataccaaaagcttcgagaagttaacatttcttttcttttcttttcttttcttttttttttttgagacagggtctcactctctcaccaggctgatgtgcagtggtgcgatctcagctcactacaacctccgcctcctaggctcaagcaattctcctcctttggcctcccaggcagctgggattacagacgcccgtcaccacacccagctattttttgtatttttagtagagacggggtttcaccatgttggccaggctggtcttgaactcctgacctcaaatgatctacccacctcagcctctcatagtgctgggattacaagtgtgagccactgtgcccaaccagaagtaaacattttttactctgcccaacttcagttcaatctggactgtgttctaaaagaagattttggagagaaatttctcaggcttaggactagaaaaggaaagccatatgaactcacccaggatgaaaaaccgaggcttgaacctctggactttgccacaccccagctggtatactgatagcagcctggaagtggacaactccctatagctcayttcagtttgtcacctatcatctaagttaggctaatgagcaaaggcacagaccctcctctgttggacagctgggggtcaaaatcccaggaagtgacagagtgtccctgtccatagctctttagttgaagcctttctcagggatacttatctcagttctctctttctttaaataggatgggacrgtgaaaatggcaatcttggacaagatgagtagcaattgcattattcatgcttgactctgccttggtttcagggttttaattatctaaaaagaaaaaaaaaatcaatgcaacaattggccagtttaattcagcttgtgtttactgagtctgttttcactacagaggagtaagtcagggggccagaactggctgtccatgtgtccatctggaaggcccctcaggatagatgagacctgggctatatcccagcccagacctcagggcagggcagataaattggggtcctttccagtccatatttgcacccctggggacaaggcactggatgttgggccaagtttaaagttgtggttttagtcaagggtgacttctgttctgatgggaaatagcatcttgagttgacctctcttgtgatactttcattttgcagatctctttttacttctttggctcctccgctggactgtaagctcctacggagagaggtttgtatacatgataatcattgtcctacccatatgacatagcaaatagtatgtgttcaaaatatatttgttaaatgtrtgaaccaaataatgtaaattcttggcacattgagaatccacttagtccaggagtccatcatcatttactattgaacccttagagaaggctagaatkacctacaaatgttccagaagaaaacatgccccggggtggaaacaaggaggacaagaagaagcagttaaagagaagcatgtcttccaatctgagaggaagggagagagaagggaaaagaatgagcaggggttaattctggtcccagcaagcagtgctatggtaatgaaccgctcaattttttaaattgtcaaattgaattaaactgaagtaaattggccaggcgtggtggctcacgcctgtaatcccagcgctttgggaggccgagacgggtggagcacgaggtcaggagttcgagaccagcctgaccaacatggtgaaaccccgtctctactaaaaatacaaaaaattagcctggcatggtggggcatgcctgtaattccagctcctcaggaggctgaggcaggagaatcacttgaacccaggaggcagatgttgcagcgaggcgagactgcgccactgcactccagcctgggcgacagagtaagactctgtcttaaaaagcaaacaaaaaactgaagtaaactgagttgcaagaatttgacatactgaagaagtatcctgaatagttcaaactaaagtaaaattctcctttgttctccctctcaattaaattaaaattctctgattatccttcccactagcctgggatcctccagccctgaggacatccaggaagaaccctggaagctactctgagtgtgaaagccaggtttatcgggtctttctccctaaacgttccaggtaacctccaaaaatcatctgacagcctgggggttttgacaagagccttcaaatcctggcaatgtcaaggggaagttccagcaggaggcttacaaagcaagtattccctgcaataaggtatgatgactgaggactgactaaattaactagggtctatgcatgatgtgaaatactgtgcagtcttcaaaaatcacatagactgtatggcacagagaaatatgcagtctgtggttctatggtttagtaaaacagagcaggttrtagtgcagtgtgatccaattttttttttctttgagacagagtctcactctgtcgcacaggctagagtgcagtggcacgatctcggctcactgcagtctccacctcttgggttcaagcgattctcctgcctcagcctcctaagcagctagaattacgggagtgtgccatgcctggctaatttttgtatttttagtagaaacggggtttcaccatgttagccaggstgttcttgaactcatgacctcaggtgatctgcctgccttgacctcccatagtgctgggattacaggtgtgagccaccatgcccagccaagtgatcctttttyttttcaaagaagatacgctgtacatgcactgcaaaaaaaaaaataaataaagagaaagaagctgtacatttatartgacatttccaggataacatttaaaaaattatttccaatattttccaaatattctttataaaataaatacatacgtaaatggctgtcgctaatttctcggtatgtacatacaactctaatgggctataattagctatagattattatacaacaaaaatacagtaaagttaattatagcaattgtgatggtgatgtgtggggtgctttgtgaacatcctgtgcttctgagctcataacaacaacaaatatttattctcttttaaattagatgttaaaagaggtaacttgctacaggcaaccaaaaactgtcagagtcagttcatcatctgtggtacagcaggtgtgggtggcagggaggtcagtcttggcgtgctcagacttccaggaacctgagattcataggcaatgagcccccttctaacggccactaatgggtacatctggtcctttgactagcagcattggatctgagcagtctgccttctacctatgcttctctttaatggtgcatttgacatctcttgtcccctctattaaatcaggactggaaaagaattgtgccagtggatgcaattctattgagattgagtccagcaaacgctgcagcaggatgaggcctgactgctttaaatctctctctttttctctttggacaaatccaattagccctgatccctccacatttctgacaaggggtcagcaaattgtttaggtcagaagggaagtaccttattacaatgccatgaagacactaaataaaatttagtctggggacaaaggggacacatggctattgctcagtatgcaatattctattattaattatttcatccattcagaatatatttattgaaaaccacctaggtgctaaaagcactttgctaagatctcaggacaaagaaatgaacatggtgcaatcttcactctctgatctagtggagaaaacatatttaaagaaatgatgacaatgcagtgttacaagggctacaagaaaggtacactagacactatgaaaaaaacagaagaggcaytcctagctctctagttaccaagctttttagtgttgggagggtcagcaaaagcttagggtgagtcatgaaggmtgagactaataagcagacaagaggggaggaaagcattcagggctgaggaatagcaggtgcaaaagcacagaggcacacagcagtatgacacttacaggaaaaaaatcatgggtgcaactcctgcttatacccctcagcatggaagagagagctatacagtccgtgaccaaatagtttgaccgttagtcacctcatcacacacatggagtataaaagaaagtaaacacagtcctttactttgggttcccatggcatgctctgactcatataaaatcctcaggggaacagatattcaggagcagctcctcttcctgtttcactcaacctaccagttcctctaactagcaccaagatttagtatcgactttcgcagtggctgtgtggtcagcaccttgtgtaagcaagggcaggagagtcatctctcctctgggctctctgcttcctttctccttccccatttctttggcccatttaaatgtttgcattccctccactcccagctctgcccagtgtcatcgttgtcctcctcctcctcctcctcattcttctttcttcctcttcctcctcttgcccttccctttccccttccttcccttctcttctctctctctctytttttttttgttttgtttagagatagggtctctttctgttgcccaggctggggtgcagtagcacaatcatagctcactacagccttgaactcctgggctcaagcagtcctcctgcctcagcctcctgagtagctaggactacaggcacataccagcacatctggttaactttttgttcaaatggggtcaccatatgttgcccwgtctgggctcaaactcctggcctcaaacaaccctctcgcctcagcctcctaaagtgctgggattacaagtgtgaaccactgcacctggcctcttcttatgttcagtcttaggtacattttaagtcactcaatttcatccactgctgctactggactgggtcaggagcttcaaatcaagtaggtggggggatagagcccatgaactggccttaggctcaaatatctgaaaaagatcatcaggcctttcatgtggtctagtttagccacctgataacttatgatattaaaagaaaatctgtcaacttctctgccttagagagcattctcagcttggtgatgtgcaaaccatgaagcctggggaaggttaaagagaaagaaaatctatcctaccaaatgggaggaaccatcgcaagatatgagactggagaagtaagccgggctcacattttgaaggactttgcatatcctgagaaggaacttgaactacacaatgattttccaccagagctggggaagaaggataaacccccttcatgtcctcaagctctattgatgtggacctctgctctgatgggagcaagttatagccctcaggtgctgggttgcttgctattggagataaaaaattataagcagggaattcacacgaagagatattttgtttttgaaaaatcttgctggcagcagtgtgggagaaggatctgagacttagcaaggctccaggcatgagacactgggacaaggacactggttagaaagcagttgtaggtgcgagatgctaasagcttgaaggaaggcaaggttactgtggctgaagagcaaacaccagatccaagaggtattcataattaaaggcaaagtcagtagcatttggtggctaattataggtaggaagctggatcctatgctgtgcattcatatagatttccgtattttccatgtcgtagttttttatctcactatgttggaatttcttattaaagccttctccatgacagctaaaatcatgtgaatcttgttcrcggctatgctcccaggacaaagcacactgcctgatagatacaagtcttttaaaaagttagctaaatgtataaacaaacaaataaatgagatgaagaattacctgcacatagaaggcytaagtgactggtggttagggaaattaccaactaacagaggaagtagaggaggaaaaggagatttgattcaaaaattgcagtttcattttggtcatgttttatttgaggtatctatggggtcaccagggaaaatactcagctgcaattgaagactggggcgagttctggtctggtatgatagatgaggaggttgttagtggacattcatagcacaggtataagtaggacaagtacaggttgagagggtaaaaaaagaagacaaatgacaaagaagttacttcttttttttttttttttgagacagagtctcgctctgtcgaccaggctagagtgcagtggcgcgatctcggctcactgtaacctccgcctcccaggttcaaacgattctcctgcctcagccccccaagtgggtgggactataggcatgtgcagccatgccaggctaattttttgtagttttaataaagatggggtttcatcgtgttagccaagatggtctcgatcttctgaccttgtgatccgcctacctcggcctcccaaagtgctgagattacaggtgtgagccactgcgcccagcccaaataagttatttcttttttttttgagatagagtttcgctcttgttgcccaggctggagtgcaatggcatgatcttggctcactgcagcctctgcctcctgggtacaagtgattctcctgtctcagccaccatgcccagctatttttttttttttttttggaaacagaatttcactcttgttgcccaggctggagtgcaatggcacgatcttggctcactgcaacctccgcctcccaggttcaagcgattctaccacctcagcctcccgagtagctgtgattacaggcatgtgccaccacacccggctaattttgtatttttagtagagatggagtttcccatgttggtcaggctggtctcgaactcctgacctcaggtaatctgcccrccttggcctcccaaaatcctgggattacaggcatgagccaccgcacccggcctatttttatttttttatttttttgtatttagtagagacgaggttccaccatgttagtcaggctgatcacaaactcctcaccttaggtgatccacctgccttggcctccccaagtactgggattacaggcgtgtgccaccgtgcccggcccaaagaagttatttctaaccagaaggctggcaagttattttggttttgtcacttttttatttctatggagttataattcacataccataaaattcacctgtcttttttctttttagagacagagtctcactctgtcgcccaggctggagtacagtggcacaatcatagctcactgcagctttgatatctggggctcaagggatcctcccatcttagcctcatgagtacctagaactggaggtgcacactaccacacccagctaatttgttcacagagatgaagtcttgctgtgttaaccaggctggtcttaaactcctgtgtcaagtgatcctcctgccttggcctctaaagtgctgggattacaggcatgagccaccatgcccagccaaaattcaccattttttaagcgtctaattaagtgggttttggtataattagaaggttgtacaatggtcatcattatctaattccagaatatttttgtcatcctcaaaagaaaccccacatccattagcagtcactctgcattccctgttgcccctagctcctggcaaccactaattatgcttctgtgtctgtgagtttgcctattgtggatatttcatacaaatggaatcatataatatgtggcttttgtgtctgtttccacttakcataacgttttcaagcttcatccattttgtagggtgcatccrtactttattcagaagactggtgtttaacttttagcaaaagtttttgcattcccatccttgacttagaaggctttcccacacctttagagtacatccttcaaaatccaaatggaggaatgtctctttattaatccatagaatttggmmaatctttatgctgaaaggagctgtagaaagcatcctcagctgctccctgaaggcgtccctgactagtctagccacaggaaactcttttctgactcctagggcactcgctgtgtaggctatacaattaaatgcctagttctgtaaatgttcactgtgtctgacttctcaaatcagtgtgaaaacttctgggggcagagtgtaagaggtatcttatgctgtatttttcctttattgtttgcaatacttagcacactattgtatggaactcttacctataatcaaataaaaaccaaaatggcacttaatccctctaattgctaaaaagtttccaggaacattattacttcattttttaaaagggttgactgtttctttcttatactctgtaatgtactcttggattcttccttatactcttggattactgctcaattcacaacaattattctccattttctgaaaattggtcctcttttttcctcatcccaggctgatatttagctagaatgccctggtctggctctggaaccagtggattgttaatggcttgtgtccattctcaatggttctgcccataacataccaattgttaaaactgtcagtatccctcctatgccaccatccacatagtaatatcaacaggatccyagccttgtcacagttagattgtccaagtaagggtacctggcccaagctttgccaattagatacccttcaagaggaatttggattaggttcatccttgctatgtgatattttgaacaacaacaacaacaacaaaaagtaaactcaggcgatgttggcagcatgctaactggaaaaccaggtgaaacttgtctcagcagatgacagagataagagagtgaactagttctaaagagaagagcagctgcaagagatgaatctaaattcttaggggcattcaagtccctgcttccattcattctggcaagctggctgtatctctgcccttgacttccattacatgcccatgtatctttatgtgttgagctaatgtattgaggtacccatattcttgtttattggaggcaaagaatcggaargaagaagagctatttgttttatccattctccttcactgcctcctctgaccatttcaccaacccccaaacactttcacccagaccgatgttcccctggtatgcgtctttgtagttatagcagttgttaaatactttgaatagcatcccttctcaacccttgacccctgcacctacacacaccctatcctacatgctcctcccagcacaatgagatggaagaacagaattagatcttgtttgagccaaagaaaatttactaatgtcccattccttgcaaactagagtttctaataaacatctcttttgatctttagctagctcgagtttctgttgccaataaccaraagagttaaaagcattcagaatgcttttaatataggcataaagatttttaaaaatagagtcrgaagagacgttagaagtcactttgtcatttgacagatgaggaaactgagacccagaaagctaaagaacctggtctgatagcacacagatgtgtcagagtgaagactgaagggcttcttatattcactctagaggcctgtcccttcaatactccctccttcttagtctcatacccccagcatcatggaaatctggaatattcttgcattatttaatggcaaatatgaattggtgtttgtgctatttaccctgattattgtcactagtaaggagggtataactgcattttagggagtgtgtgtgatttttttgaatcaaatcttgttgaatttttaggagattttgactgtggctgacaagtgagaatttctacatgctgtggcatagtggtttaatttggtaattgttaaataaaggcaacattgaactggataggacacattaggaggattttctgctctttgtttttgttattaccaagtcctctgaccatctctacctaataaccccaccttagtgtgacatacccagcaactatctactctttgccttrtggtttccactgccacttaccccttcctctgtcctagtctaaacttggcaaaggaaaaagaagaaacctagaatgtcttgagtcatcaaggatgtactgtatcactggttgttaaatggttctttcatggccgagtcccaaacaggctgcagatagcatgtgtcttgccaggcacagaaaatgtctaatgtctagccagatgctttgagcatgccaaggtgaaacatgatcacagtctgtaggtactccctatgtctgccaggatagagtacctctcatctaagggcctgtttgaaaaactccaaactggatgaactcaggaagtttaatcgatccttcccmggtaacaactctgtattttgacccaacctgaatcacgactttcagtgcacctatagatacatcatttaaatcttctctgtttcagtttgtttatgcaaaatatacttttgacttctgagtccctgttattcagaatctcatggctttgtctatgctatatatttttctttttcttttttgagacagggtcttgctttgtcgcccaggctggagtgcagtggcacaatcatggctcatgacagtctcaacttcctgggctcgtgctatcccacctcagcctcctgaatagctgggactacaggcacatgccaccacacccaactaattttttggttttttttttgtttttttgtagagatggggttttgccacattgctcaggctggtctcaaactcctgagctcaagcaatccacctgccttggcctcccaaagtgctgggattacaggcatgaaccactgtgcccagccatatatttttcacttgtcaccaaaataattatttatagctaaataaccattgtttattccaggctgtgtactttttttttttttttttttttttgaggtggagtctcaccctgtcacccaggctggagtgcagtggtgcaatctcagttcactgcaagctcctgcctcagcctcctaagtagctgggactacaggtgcatgccaccatgcccagctaatttgttttttgtatttttaatagagatggcatttcactgtgttagccaggatggtctcaatctcctgacctcgtgatctgcccacctcagcctcccaaagtgctgggattacaggtgtgagccaccgtgcccagctggctgtatacttcttgaaagcaaatactatcaagtattttgtgtacagcccagaatgctgccaggatagcagtatttaagaatccattaaaatcttgcatataactacttcattatcatacttcaatttaatttggcaaaagcatattgactcccttctggagtacatatttgtttctgcctggcacattttcctttagaaacacaccctccctcacaccacagcactgacaatcacatcccctggcttatgggaaaggaatagacccaggctggccaagcactgtttcttacccccttggccacagggatgggaatgtaactcaaactggaccatttgaactggaccaccaggactggcaggaatcattagtaaagagataaactttttttctgctttgtctgctaaatgaggaccacagaagcccagtgctgccgtggcatgcagatcaccattttgagagacattgagaattaagccatggacccagttctggcccatgcgacataaagagaatctgctggtcatggctctggaaaaacatctgttagtaaaggagacagtctatggtcccttctrttttatcctccctcctgaattgaatgcaaatgttaaggttggatttgaagcagttatcttgagaccatgagggaaagaccaagagaatcacagaatcacagagatgtcagtcctgatatcttcaagctacccaaacaataactagcaattacttgctgtaaacaaggattggcaaactgcagcccccatggcaaatctgtttatatgcctcagggtgcgcctgagcaggctagcactgggagccaagagactaagccaaggcatcctctgcccctactttcccttctgctcccagcacttgcccccaggccagtaggcaggtatgyattgcagtgcctagggcccagctgattgccaccaacacattggggactccattgttgacagctgttgggcactgagtgctggaatctcactccaggagttggtgaccctgcaagccaccttgtctctggttagctgcccaaattgatgtggctgggcttgccaggagtagagaagggtgcacagggcactggatgttaccggggtggagagtgaaactgaccatggggggttggcaatatttattacacacctggctggccaggcccctccttgggctgataagctctttcttccaagactgtctgcagcagaaggcaactggatgcaaagcatgcccacctcaagcaaataggacagggargattttattttctgttatataagtgcctacacaatatcttcaattttgccgcttagtctgcaaagtataaaatatttactctctggacatagaaaaggttgtcaacccttgctctaggcaatacttgttatggcaaaagaaaaatctcttcttttcccaccctccctccctctttctccttccttccttccttccttcctctttcttcctttcttcttttcttcctttcttctgtctttcctttctttcctgtattaggttgttcttgcaatgctataaagaaatacagccgggcacggtggctcacgtctgtaatcccagcaatttgggaggccaaggtgggcggatcacctgaggtcaggagttcaagaccagcctggctaacatgacgaaaccctgtctctactaaaaataaaaaaattagccaggtgtggtggcgggcacctgtaatcccagttactcagcaggctgaggcaggagaattgcttgaactcagaaggcggaggttggagtgagctaagatcgcaccactgcactccagcctggggaacagagcaaggctctgtctcaaaaagaagaaaagaaagaaatacttgagactaggtaatttataaagaaaaaaggtttgattggctcatggttttgcaggctttgctggaagcatggtgctagcatctgcttggcttccagggaagcctcaggaagctcacaatcatggcagaaaggcaaagggggagcaggcaggtcacagggcagagcaagagagagagtggtggggggaaggtaccacacacctttaaaaaaccaaatctcacgagaactcactgtcacaaagagagcaccaagccatgaaggatccacccccgtaatcaaaacacctcccaccaggccccacctccagcattggggattaaaattcaacatgagatttgggcagggacaaatatccaaatgatatcaaatatttttgtccactttttctgcggtttgtagtcaaaagcattcctaacttatattaataagtgagacttcaatagccaaagatgcttcagggagagaatttttggcacaaagcacagccttaacaggagtacagaaatagggagcctaagggccatgtatgaggaaagcaagacctctartgtggcttgagaacaaggttactaaggccaagtaactgaaaacattttttaaaaattgcgggtcataggccgggtgtggtgactcatgcctataatcccagcactttggaaggccgaggcaggcggatcgcctgaggtcaggagtttgagaccagcctggccaacatggcaaaaccccatctctactaaaawtacaaaaattagctgggtgtggtggcaggcgcctgtaatcacagctacttgggagactgaggcatgagaattgcttgaacccaggaggaggaggttgcagtgagctgagattgtcccactgcactccagtctgggtgacagagtgagactctgtctcaaaaaaaaaaaaaaaatgcaggtcatgcccattcattggccatgcaatcaatttagtgggctgtaaccagcatttgtttagttttgttatctacatgaatttttaatagctttatttataatagcaccaaagtggaaacaacccaaatgtccttcaactgggaaacagttaaactgtgttacatccatgtcatggagtactactcagcaayataaaagaatgaatcattgatacaggaaacaacttgaatgaatctcaagggaattatgctaagccaaaaaaaaaaaaaaaagcaatattaaaaggttatttactaaatggtccattttcacaatatcattgaaatagcaaaattataaaaatggagaacagattagtccaatggtccccaaactttttaacaccagagaccagtttcatgggagacaatttttccatggatggggagtaggggtatggtttcgagatgaaactgttccacctcagatcatcaggcattaggttctcaggaggaccatgaaacctagatccctagcatgtgcagttcacaatagggttccactcctatgagaatctaatgcggtggctgatctgacaggaggcgaagctcaggcagcaatgcttgctcacctgccactcacctcctgctgtgcagcttggtatcagaaaatggccggaggttggggacccctagattagtagatgccaaaggttaggggaggaggaagagcaggatgtggctgtggttttaaaagtgcagcatgaggaatccccaggatgaaacttctccatatccgactgtggtggtggtcatacaattctacacctgtgataaactatgtagaactaaatgtacacacacacacacacacaagtgggtgcatgtaaaactggtgaaatttgaacaagatgagtgtattgtatcaacatcaacttcctggttgtaatattgtactatagttatgcaagatgttacattgagggaaactggtgaagggtatgggagatttctctgtaacatttcttacaattgtgagtctacaagtatctcaaaataaaaagttaagaaatatatgaaacacaacatggtggctggaggttggcaaggtcyatgagaaaaggatacaagatgttactgaaagatagaggaatgtgttcataacagagattgggagtgctgagaatatcaatgtgcagcaagccaactcctttcaactgaaacttgttatatcaacactaatgcaaacttcctttttactcacttaattctatttcaagtgactaaagatctgctatattttaggtaacttgacagaacattttctactggcttcccttgaattaaattttaaaaaatgagctcttcttgggggaaactttgaatgtataaacacttttttttatattgaaaatgstacttacttcatttcctgttcatatatgtaaatgacaaaaaaagacttttcttaaaatattcaatatgtcactaaacaactgattcttaaaattaaagacagaaataggccaggtgcagtaatcccagcacttcgggaggccgaggcaggtggatcacctaaggtcaggagttcgagaccagccttgccaacatagtgaaaccctgtctctattaaaaatacaaaaattagctgggcatgatggtgcacgcctgtaatctcagctactcggaaggctgaggcaggagaatcgcttgaacccggaaggcggaggttgcagtgagccgagatcacaccactgcactccagcctgggtgaaagagcaagacactgtctcaaaatacataaataaataaattaaattaaagacagaaagaaaaccttattactatgatgcatctcaaggtaaggtaggagctcttaatatttttgtaacaattgaatataaaagtttaaaatgcatcgtgccactgcaccgcagcctgggcgacagagtgagactccatctcaaatraaataaaataaaataaaagtttaaaatgcttgtatatacaatatttcctattgtgagtgatagtcaaaagtgaaatgtttaagaaacactgtaatagaaaatgttgaaaargtaggctggggctagattgtgaatgtcagtctgaggaattctggtttctagctgccttccatgaggagccctgagggcttttcaggagggaaatggctaaccatatacagagaaacaatagactaaagggtgagagagacaaactagtgggcaataaattatktcagtgggctgcaggctctagaggggcagaaaagaaagtgtattmttgggttactttcagtgcaactgatagaaatagagcacaacctcatgtaagcaaaagaatgcatttattagttgacataactggaaagaatgtgaggtaatttaaaagaaccaaacaaaatgagctgcaggaaaccaaagcttcagtgacagcatggcgacttattactgctatgtctttcctctctccataagtttggcctcattcatttctgcacagaggccctgtgattgtggtggtaaagacagtgcccattagtctgggattcacttccttctccaacttagcaagcctaaagaactttgtccagaatccagacatcaatcagctccgagaggccctgctttggtgacatgcccattccttgctctgaatcttttacaaggtttcagttagagtgcttttggctgagagttactgatacccatttaaaaatggcttaaataatgaggatgatataatactttacttacaagaagttatgaggttmatatagtgactcaggctaggcgcagtggcttgtgcctgcaatcccagcactttgggaggccaaggtgggcggatcaagaagtcaagagaccaagactgggctaggcgcagtggctcatgcctgtaatcycagcattttgggaggccgaggtgggcggatcacaaagtcaggagatcgagaccatcctggctaacatggtgaaaccctgtctctactaaaaatacaaaaaattagctgggcatggtggcgggtgcctgtagtcccacttactcaggacgctgaggcaggagaatggcatgaacccaggaggtagagctagcagtgagccaagattgtgccactgcactccagcctgggtgacagagggagactccaactgaaaaaaaagaaaaaaaaaaaaaaagagatcaagaccatcctggccaacatggtgaaaccccmcctttactaaaaatacaaaaattagccaggtgtggtggtgcgtgcctataattccagctactcggcaggctgaggcaggagaatcgcttgaacccaggaggcagaggttacagcaagccaagattctaccactgcactctagcctggcaacagagcaagactctgtctcaaaaaaaaaaaaaaaaaaaaaaaaawawatatatatatatatatgtgtgtatagactcaataacatcagggtccctggtagacttctctgctgttctcttaactttcccttcaagggcaagatggctcctgcatatcctagaatcatatcaagtagcaaagtctagggcaggaagaaacaagtccttgacttgcatccatattaagggtgaggaaagtgtcccaggaaatatcctcttaaattttatggaataggatacacatgttggcatagcctgtcgttggtgaggcaaactggataaaatatggctggcttggaccaattaaccctatacccgctagagttggagaggtgccctcaaagcacatggtttcccaatatctaaaacataattagtattctaacagaaagaacatacagaaaaatagtcagtatgtatgcaactaacatatcttccaggcaatgagaatgggacattgtayttgtttcctattgctgcataaaaatttatcactaacttagtgacttaaaacaagatgcgtttcttttttattttttattatctttatttttctatctttggggggcacaagtgcaggtttcctatatgcatatattgaatagtggtgaagtctgggcttttagtgtacccatcacctgaataatgcacattgtaaccaataggtaatttttcaacccaagatgcatttcttatygcacagtttccataggtcaggagtacagctcctggcacagcttacctggattttctgcaaggctgaaatcaaggggttggccagtgctgggtttttacatggaggctcaattgcaaaatatcttattctaagctcactgaggttgttgacagaatttgtttccttgtagctgtaggactgaggtctgtggattcttgctggctgttggcttgaggctgttttcacctcctagaagctgcccacagttccttgtcaggtgggctttccccacatggctacgaatttcatcagaacagcaattaaagtctccagagcaagtctcctagcaagatgaatctcatacaatgtaatgtaattatgaacgtgacatcgtctcacctttgccatagtctattgcataaaaggaagttatagtttctacctacacttaaggggagagggtcacatgaaggcatgaacgccaggaagtggggatcctgtgggggtcaccctagcatctatctgccgcatacastatgagtagccaggcctgggtcacatacccagctcagttaccagaagaagaaagatgaaaaagctttctgggaaattaaaaatataattccttcagttcacataaaaatggaagagacattctgaatatataattgccgtgacttggcagccattgagtgtcgtgtagggaagggaggaaataaagatgactcagggccccaaagccagtcagcgactggaaagaggacaatgctattattgaatttgaggacttaaacagaacaagaagagaagggagtaagatggagatttatctgaagttcccataggaaatcctcatggagttgcctacctggagctcaagacaaggcccgagacatagattgggacctaatctacctagaagtagaggagatttacagctstgggaatggatgacacatttgtgtttgcagcagtaggtgaccatttcctcctacgtgcctgctcaaaggctttcaaattgccactgaaactccttaagcttacagagtctttcatggtttagctcttgcttacctctctagattcttgattgaccttctccctagaacactattacacttcttacaggtctccaaaaatgccatgtgctattttctctaagcctttgcttaccatttctcactgcatgaaacattcttcacccctccccttatcattgcctggccwtgtatcttttgggtctccatgtagattatacactctggaaagccttccatgacaccaacttagattgtcccctctatgggctttaagagcgtgtggtacagcccctttctgtagttccaatagcactgtattgtcattacctacttacttttctcttatgaaactataagcttcttgaagatagggatggtgtctagccactttcttagcacagtgtttagtaaatggaagatgcttagtaagcatttgttaaatgaatgaggagtgagtgttaacttatttctctctcagttcaaactcctttgcttctaagtgtcagaaagcccaatccaaagagcttaagcaaaaagaggaattcgcggctcatataagcaaagaagtctagaggagtstcgtgcccatcattgaaccaatcgttgttctttcaggagaatgcaaggctctgattggccaaacctgggtcacatgtcacccccatttctgctgtcccaagaccactcaggctggggatgagggatggtgctggaagtgggaaggggcggggtctccaaactacagtcctgaactttccctggaattttggtgaggggatcctgggtaaccctcaaaaacaaatttctattaagtaatgcctacaattcagggggatagggataacacagatccagcaaagaaattctaggttaagcagtctgagaaatgggcaaagagctaagaatgtatagtgtcatgcaaggaaaggtgactaatatttgtttagcactgaccatgtgacaggagcttttcacacgatatatcatttaaccctcacaataactctcaaatacatagttattcccagttaacagaatcttagggtaaactgagtctcagagggaatatgtaactcacttaggccacacagttcctggtgtcaaaaaaggttagggactgcttcattaaaggaacaaggctttattcatttttgtctccagcgtaggaaagggccttactcatactgttcatcactaaatatttgttaaattaatgaatgaataattaattgcatgagcaaaagatgaaaaactgtatcccaggaagaaatgaaggtagagaaagaacagtaggggtgggttagattcaaacatgtttttagggcaggtggaaagaggttgaaaatgaaagaaaatgttgatgatgaagcaatgttccctatgcagttcaaattctaggaaaaagccttagataaaaaatttcaatatttcttcccccagagtgagagagagagagaaaagtatggccttgggagagtctggggtagagggaagaaaaccaaaagcattcttttcagcttcctcggtcttcactgtgaaaaagtaaaggttctcatttctacaactgtgtcgagtatacgctgacctgatgttttaattcatggctmatcctcacagtaccaagcatagaatagatgctaaaataaatgtataaactcactgggttgaactgaatgaaatcaaattatcttttagaaaaatttgaatgtagccttcagaaagggcagctacctataagcctaatttgatggcttgccaggactttggtaggtgctgtgggaagatggaggaaggcagtacaatgtgcccatgttatctgttctacagaatatctttgctgggcaaatatctccttatcattttcctttttcaatgcaagcttccaccctacttcttcaggacacctgggcttgggcagtgattactaggttgactgtttgtaataacaggtctgtcttgggaaattataggctgtgaggtctcagaggttagcaatcagaagagatttactaagccttctctgaccagttccagggctgtcctccttagcagactgactcagccagcagtgccacctgtgaaacaggtggcaaggctggtcacactgcctctttccacakgctattctgtccactccctaagggtccctgacaccagctgagagagtgaagccttggcctgctggggatgcctccagctgcagaaggcagcctgaccttgaattcragcaggctttaaattcttcgcctcacagaatgaggtaacagaaagatggatgattactgattagaacactgtgacctaaaaaaattaagtaatccacagtgaaaactcattcccctgtctctgtttagtctctgacaggaataaaggatgggataaagggtaggrtagggaatggggtggtggcatcagagagccccctttggccaccagtaggtgcctttattgatgtgttcccatgagaaggaacaaagaaaaggggttggaataaaaaagaagaaaatcctgtcattcatggcatagatgagcctggaggactttatgttaagtgaaatacaccaagcactgaaagacaaataccgcatgatctcactcatgtgggagataaaataaattttttgagcccatggaagtagagagtagaattgtgagtattagaggctgggaagggtgggtgagggaggggaggagggtgagagttctggtgctttgcgaatgtggttaattataatttattgtatattctcaaaaagctacaagatgattttgaatgttcacaacacaaagaaatggtaagtgtttgaagtgatgatatgctaattaccctgatttgatcattactcattgtatgcatgtattaaaatagcactccagctgggygcggtggctcacgcctgtaatcccagcactttgggaggctgaggcaggctgatcacaaggtcaggagattgagaccaacctggctaacattgtgaaaccccgtctctactaaaaatacaaaaaattagctgggcatggtgatgcgtgcctgtagtcacagctactcaggaggctgaggcaggagaatcgcttgaacccgggaggcggaggttgcagtgagctgagattgcaccactgcactccagcctgggtgaaagagcgagactccatctcaaaaaaaaaaagaaaaagaaatagcactccatatcccatcaatttgtacaattattacatgacaactaaaaataaaaggaaaaagcaaagcaaagaggctggagagaaaggagtgtaattccatccctttgtggtagtgggggtccagtaggaggctgggctaggcagggaagcaaggaactcacttgcccaactccagggatttcagatcttcctgtttgtacaagcaggtggtttatttctaaataagctattttggattcttactttgcatagagtttgtacatgttttctgcaaaagcccaggcagaggcctctgggaggggagtttggtgatgaagtcagccagaatgaggcttttgatatayggaacttttgcctgatttcaagcaatatatcttctgctccctttattctttccactttctcagctccaccagccacatggttttcttttttatccaacaggtataggtgaatcaactgcctctctatggtagagtgtctattattctaacaagggccagccccaggaaaaactgcagcagttgaagttcagcttctcctcttcctccctaccctaccaactctgtagcacaatctagttgtcaaggaacccaraacatttgtggtttaakgtgtgacctttctcacagtgttttcatcctgataggcctgttacattttgctttcctgtgcattttctcatttggccagcaaccctgtgaataaaacactcgtgagcattatctcccaaaaggtattttggaccacttatgaaattaactgtcatcttctgagagcttgctacctgccagtcactgtgctgaatgccttacatacctcaactaatcgtcataatcactgtgaagctgatactcttatccctaatttccagaggagaaagctaggtatacataacttgcccaaggtcacacagctaactagcggcaaaatcaggattaaagcctgggtctgaccaagtccaaatcctgtgctcttatctctttcaccattctgcctgtgcagaaggcaggacaggtattagtatgcctgttttctttgtcttttctttctttctttctttctttctttctttctttctttctttctttctttctttctttttctttctttctttctccttccttccttccttccttccttccttctttctctctctctctctctctccttccttccttccttccttccttccttccttccttccttccttccttctctctctctctctctctctctctctctctttctctctttctctctttctctctttctctctttctctctttctctctttctttctttctttcttgagacggggtgtcactccattgcccaggctggagtgcagtggctcaatcctagctcactgcagcctcgacctctttagctcaagcaatcctcccacctcagccttctgagtagtggggactacaggtatacatcaccatacccggctaatttttgtatttttttttagagatagcgtcttgctatgttgcccaggctggtcttaaactcctgggctcaagcaattctcccaccttggcctcccaacgtgccggaattgcaggtgtgagcagctgcacctagccatatgcccattttctaaagaactttttctcttttaaaatggaatttcagagaactatttcacagaactcccagtggcagagttggggctagagcccctttaatagatgacgacagaagaaaaattcctacctcctgattgggccaccatgtaggcttctaggcacagtaataggaaatgtaaaaaccttcctgtacctctcacatcatgtagtcagcacctgactcttacttcataaattgagtccacgtggggcgtggtggctcactcctgtaatcccagcactttgggaggctaaggcggatcgatcacaaggtcaggagatcaagaccagcctggccaacatggtgaaacaccatctctactaaacatacaaaaattagccgggcgtggtggtgtgtgcctgtaatcccaactactcaggaggctgaggcagagaattgcttgaacccgggaggtggaggttgcaatgaaccgagatcacgccactgcactccagcctgggccacagagcgagacctgtctcaaaaaaattaagtccaaataaaatggaagactctcctcaaccacctgcaatatggcttcctcccctgccactccatgaaatggctcctctccacatcatctttgacctcctggctgaatcgtttttacttcatatttgtgtctgtcttggcctctctgcagtgtttcattgcttattgaaactctcttctgtcttgattgtagggtagcagcctgtcctggttttactgctacttttctggcttctcctcagctttttctcaaaggctcaggtttcgctgactacattggtcatggttcaggtgcagaaagcatagccttccctagctagtttaagccaaaaagattattgcaaggtattaattggcttacagaatcagtgggagagctgaagaagtggatttgaggctgaattactaggaacaaagtcacactcagaactgagttgccaggggagttgctgcttctgccacagttagggagtgtcagctgagctagcaaactcacaacctagggttgctgtgctccgcacaagcagaatagatgcttcctgccctgcccgccttghgccccaacaactcattcaactctgaatttggagtcttatgtcagtgtgtctaattgtcacaacctaagtcacatccttagaaactctacctggggaatttggaaaatgtagtttttggcttcccaattctgcagtatgggaaggcatactcaaaggagattgaaatagacattgagtcactcagtcagttaggttttatttttttttcctgttgcaatataccaataacagataatattcaccatgcattactcactcccttgacttaaattctgatgcagtttcctaaaatttagctggaaagtaaagcatagaccacagactactcagggaaggggtattatattcataaaaacattttataaacatgtgagtaagtaaaatattcacttaatgatatacctgtcctatgaatgttttcttcctttctattttttctcttttttaaactaaaaatgtaattattggaaaacataaagakaaattggaaataaatataaagttataaagaagcactayaatacttaaatctccattggtattagaggttatatagcgttcttctctaagagctaggacaaagacaagctggaaygtgagttatatgtgctatttcctcagctctggcattaacaccattcaaaataatatttaaaagcaagtagcaggacgggcatggtggctcatgcctgtaatcccagcattttgggaggccgaggcaggtggatcacgtgaggtggggagtttgagatcagcctgaccaacatggagaaaccccgtctctactaaaaatacaaaaaattagccgggcatggtggcacatgcctgtaatcccagctactcaggaggctgaggcaggagaatctcttgaaccygggaggcagaggttgtggtgagctgagatcacaccattgcactccagcctgggcaacaagggcgaaactccgtctcaaaaaaaaaaaaagcaaaaaacaggtagctgagagtgctgttattaaaggcatagcctggtacctattttaatttatgtaaagcaagtcattcacaattttaattctttattattttccagttttaaatacaacgtatatagaaacaatccccatgtatgggtgtgattaccactgtaccttgccattctgcatgcaaatctgattacatcatgccttgctaaatagctttcagaggctccacaccccattgagataaagagtaagttcctccaactagcatttcacaccctgtgtgaagtggcccttgctccagctcctgccatgtctccatatccacactccattccagccgaagcaaaccaatgacaagttttccaatgcaccatgctcttttctgactctggctctttgaaagtattgatccatctagagagattatctttctcccactcttgccttctgagaactctaagaactcccccaagatacagtttatgtgtcaccttctcccagaagctccgcctgaaatcactctcagcccatacccaactcccaggctgaattaggtgccctctccacgccaccctcccctcacccttcrctttctccaaggctccctcagcaccctcagccatagcacactattgttaactgtctatttacatattggttcttcccattaactggtctgatttttaaagttggaggttgattttacataaatgtattactccaaaatagtaatgcctaaacaaatatttgtaaaatgaatgagtaatcaacaaatgaacaaatgaatgaataaaaatgttggcttctctagtacacaatctacacatgctttatgcaatttataaagactattcacttgccaatacagaaaaaaaaatgattttgcatcttattgcaggcatctaagtgtgtattaggttagctaaaatttggcatcaaagatcaggtacagtcactcaggcctgttatcctagcactttgggaggccaaagtgggcggatcactgaggtcaggagtttgagaccagcctggccaacatggtgaaatcctgtctctactaaaaaatacaaaaattagccaggagtggtggtgcacgcttgtaatcccagctatttgggaggctgaggcgggaggatcacttgaacctgggaggcggaggttgcagtgagctgagatcscgccatcgcactccagcctgggagacagagcgagattctgtctcaaaaaataaaaataaataaaatcttggcatcagaatttcaggaactgagagcttgttaggcaagaagactaaataagtggtctttaactggagcttatccagtggtccatgaactccctgaaatgatatgcaaaattatatttatgtatttgtgtaagcctgcacctcacattcatgtgttctcctttatagggcaggtcagcaaggcttctttgaaaggaggagtggggcctggtgcggtggctcacacctgtaatgccagcactatgggaggccgaggcaggtagatcacctgaggtcaggagttcacgaccagcctgaccaacacggagaaaccccatctctactaaaaatacaaaattagccaggcatggtggcacatgcctgtatgcccagctacttgggaggctgaggcagaagaatcacttgaacccaggaggcagaggttgccgtgagccgagatagcgccactgcactctagcctgggcaacagagcgaaactctgtctcaaaaaaaaaaaaagagaaaagaaaaaagaaaagaaaggaagagtggaaagcagccaggtctattgcagacaaagcaccatggaaacactttaataggcaatgagtagaccgagaatggggtgggtgatcataagaatgagatggcagctgcaaagaagggacaattcaaacattttaatttattattgggttctcacctggtgaagtgtgccacagtcaaatatagcattaaaaatatatttaccaatccaagtgtgacaggatcaaacttcaccctccccccacactccactctattaaggagtctgtgtttgccctttgtgtgatgtttactatgagggagggagaattgaaaagtgcagagaaagacaaatttaacttacaaaaattttctgcgtatatacttgtaaaggaaaagaatacattcagaaggtagatgaaaggggcttttaggrtttgccagcartagataagacagatgtagagagcagcagcttggatgkagggaactcagaaatgagctgtccaagtaggattttttaaagtataattttttttattaaatgtgataaaacttccttttcaccaggcttcctaaagacataaattatctttcaaggtcttgggaggtagattcgtgtgtctgattagcgtgggttccacatggcaacaggcctcaaagcagaagcacacagtacttgatttatttgttggggttacacaagcttccctgcctgttctgctgtgggacagcctggagtccacacccacactagcctatttttggtctgggttgggtagcttacaaggaaggtaagaggccaattgaccccttatcagtagtttcattaaccaagccactcccagatttttatttgtttggtgggaggtctgggtcatcaagtggggaaacttccccagaacaagctactaagtctccgaacaaaggaacacaaaaggtgttaccattttttcctgaacaattggtgggttttttgtttttgtttttttttgacagagtcttgctcttttgcccaggctggagtgcagtgatgtgatctcagctcactgcatcctctgcctcctgggttcaagtgattctcctgcctcagcctcctaagtagctgagattataggcgtgtgccaccatgcctaagggaggagaccacccctcatattgtcttaagcccaatttctgcctccaagaaagaagtaaaaactaaaaggcagaaatgaaatccacaggcagacagcccggcgccacaccctgggcctgtagttaaagatcaacccctgacctaatcggttatgttatctatagattacagacattgtatagaaaagcactgaaagtccttgtcctgttctgttccgttctaattaccagaacatgcagcccccattcacgtaccccctgcttgctcaatcgatcacgaccctctcacgtggatccccttagagttgtgagcccttaaaagggacaggaattgctcacttggggagcttggttgttggagacgtgagtcttgcygaagctcccagccaaataaagcccttccttctttaacttggtgtctgaaggcttttgtctgtggcttgtcctgctacagcccggctaatttttgtatttttttttttttttagtagaaatggggcttcactatgttggccaggctggtctcgagctcctgacctcatgatccgcctgcttcagcctcccaaaatgctgggattacaggcgtgagccactgcacccggccactaagccctttttcttgtagttatcctcctatgaagatagcaactttatccaaggttcgttccccctcccagggcaggctccattcaatgactggtcaatgtccccaacatggggacaactcttcagggtcatcccagttccagagacccatgtggtgcaagaaagcaggcgctgaagctggtcacccaccaactggctggaaagaaggaaaagaaaatctggggacccaattcactatgccaaaagaaaaaaacattaagctgaaagctgagttatggaagaaactgcctttccttttgttcctaagcaaataactacaaatacaaggctaaatatctccacaggagatatttaaataaaaggctaaatacctccattctatgttcaccttatataaagtgccgatttactgagcacaatatgaatacatcattgactatccccctacctactccttttcccttgcaacatgtagactaccataccctccttctttcccctccagcccactttccctctttggatattgaagacctcaaattcatctttagagaaagkcacagaccacagattacttctgtgattctgtgtttctttcttctgggcatgtccttaaccttggcaaaataaacttctaaattgatggagccctgcctcagatactttctggttgacagacccatcacgggtggttggtagagcatggataaagccttgcacacagtagcagaatgattgctaacactttctggaagggcatacctttggaagggaatgcactggctggggcaatggaaccagtatttgagaagcatgaggaaattagcaattataaggacagtaggatcagatgactgttgctgagggcaaaagatgttctggagaaagacaaggaaaggctgagggtgattaacccagcaattaaatcagctwaacataaaagtcagagggctttcttgtcagtacaaggagactctcatctatagctggagaacagacaaggttgaagatcaggctaggcactgaagcacaaaagtacaaggttccaaagaaaaaagattaaattctcagcagctaaaggaggaaaaggactacaggagctgcaggacctggtcagtctgcaccagcagagctgaaagagattgaggcaggagaatagggcctagagacagcgaacttaaggccaatttgtgctgacttcctaaaagagaaaacaccaagttctgggagcaggaaatctaaggccaattcatgctgacttcccaaagctggatcaaaaggaaaacaastgggactgaaggcaggcaacctgaagccaattaacacaaacttcctaaggctaaaccaaacgggaaaaactacatctccctactccgagtaacaaaggatcaaaggctactctccctgcaaccctcccccttccaccacataccagatggaaagggacagtgccttggattagctgcaggccgagcacgggccgtcccttttatcttcatagggccccaattcacctcagcctttctttctttttgttttgttttgttttttgaggcggagtctcactctgtctcccaggctggagtacaggggtgcgatctcggctcactgcaacctccgcctcccgggttcaagcgattcttctgcctcagcctcctgaatagctgagactacaggagcacaccaccatgcccggctaatttttgtatttttagtagagacagggttttaccatgtcagccaggctggtctcgaactcctcacctcgtgttccgtccgcctcagcctcccaaagtgctgggattacaggcgtgagccactgcgcccggcccacctcagcctttaattagccacagacccaatccttcatccaggtaaggggtatccgataagaacttcaaacggggtacttaaagcccagaaaactttgtaactgggcccttgagctgcttgcttgagaccactcccaccctgcggagtgttttcttgctttaataaattccagctgtcaggggccaggcacagtggctcacacctgtaatcccagcactttgggggggtcaagacgggaggatcacctgaggtcaggagttcgagaccagcttgaccaaaatggtgaaaccccgtctctactaaaattacaaacattagctgggggtggtggcgggcacctgtaatcccagctactcagaaggctgaggcaggagaatcgcttgaactcggaaggtggaggttgcagtgagccaagattgtgccattgcactccagcctgggcgatagagcaagaatgtctcaaaaaaaacaaacaaaaaacacaccaaggacctggacaactagtagtcaagaccctccactggtaataagatgatgtatgggtttagattctgaggttataggatcaagaggaagaggctgagggagagttgattgatatgggaccatttttctgggatataggatttaatatcctggcatggaccccagtacactgctgggatggctctttacacatttggagaaagtgatgcccacattaaatgagaagtaaatatcagaacttctgttgcaaacagtggaaaaaggaatcaaatatctcatagaaaggggtatgtttgagtggatttgttatgtaaggatggaaaacccaccagaggacaattttccatggtagggtccagaggacatttcatttaccaaagcaataaagaaagctctgataagagggacaattcatcttgactggaatcaacaaatattttagctttgcctccgtctttcctgtttacaaggccccagacagcaccactgtccgaggtttacagagtgtttgatccactgggaggagatcctacaaaagatcaaactggaataaaggacacactttacaacccataagatgtgacagtgagtacatggkcataggactcaatggctctatccatactgttacaggtagataggcatgagcggggcaggagagtgctctccccgcacccactagaaatgttgagtgatggctcagcaattatcgcattgcctctctaaaaatgataatttggaagcaccagggagaggccaattcctgacggtccacacctcttaacatcaaaatgttaattgaatgcaggccctagggataagcaacttcctgggcatgcgtgttaagagacaaaaatgtggacgtatgatcttccaggtacactccactggaaaagggaagaaagcctcagatgggcatgcatataactccctatacacacagtgcctgctcaattccaaagggtaaggaaagtaccacatatgaggaaagcccaccctaagggaagagttrtgggaaagaggtgagcctgtaagtcctgggatcaaggttaaagacccccttttttctgtcttcttttgcacccttttctttcttggacattcaggtgtccggctgagtctctttcaagagaattttccattctctcctgttccaaagacttttaaataaacttccactcctgctctgaaacttgcctgggtatttttttctgctttatgcccctcagtcaaattctttcttctgaagaggcacagacttaagttgctgtggaccctatggattcactgccagtaattcgtggtaactcagatcttttccatcsctaacaacactgcaccacatagagcagcagaatggcttgtagaggtgcaaatgagaggccagcttgaaggtgatactttataatgtatatcctttttttttttttttttttgagatggagtttcacvttttcacccaggctggagtgaagtggcatgatctctgctcactgcaccctccgcccacggagttcaagtgattctcttgtctcagcctcccaagtagctgggattgtatgtgcccgccatcacgcccagctattttttgtattttcagtagagacggggttttgccatgttggccaggctvgtctcaaactcctgacctcaagtgatccacctgcctcagcctcccaaagtgctgggattacaggtgtgagccaccaggcccgacccttacagagtatatcvtaaagcaacatcatcatatggtgtggtgtcccaaataggtagaacacacggttttgagaaccaagcggtaggagcaggagtggccctgcttacccacactgccagggacccacttggagaatgtttgcatcctgtccctgcaagtctgggccctgtgagtttagagatctccactcctgggaagaggatgttccaccagggtatacagtgagagtaccattctatttgaagcatcgtctgttgccctgttactttaggtccttcctgccaagaaatcagcaggcctgaagaggtaactagttttaatcttctggaggaggtagccctgttgttataaaatggggaaaggaaagaatatttctgaccccaggtgatctacttggtactcccttgcagcagccagagcctgaggagggcaaggtgatcaggagctcagtcccctgagggacaagtgtctgggtcataccactcaggaaagccacagggttaggggactctatcatggatagaagacagagatcgtgaatacaagtatatcttgttttattgcacttagcagatactgtgtttttacaaattgagtgtctgtggcaaccctgtgtccagcaagtctatcagctccatttttccaacagcatatgctcacttcatgtctctgtgtcacattttgttaattcttgcaatttttcaaactttttccttatcattatatcttttgtggtgatctatgatcagcgatctttgatgttactattgcaatcgttttggggtgccatgagccatgctcatacaagacggtaaatttaattggtaaatgctgtatatgttctgactgctctaatgactggctgttccgcatctctcttcctctgatgaggccttcctattctctgagacacaacaatattgaaattagaccaattaataaccctacaatggcctctaagtgcttaagtgaaaggragatttgcacgtctcccactttacagcaaaagctagaaatgattaagtttagtgagtaagacatatttatagctgaggtgggcagaaagctggaccttttgcactaaacagccaagtggggaatgcaaaggaaaagttgttgacggaaatgaaatgttctactctggtgaacacatgcataataagaaagcgaaatagccttattgctgatatggaaaaagtttgagtggtctggatagaagatcaaaccaactacaacatttcttcaagccaaagcctcatccagagcaagaccctaactctttttaattctgtgaaaactgagggaggtgaggaagcttcaggagaaaaattttaagctagcagaggttgatgcatgaggtttaaggaaaaaaaagccatctctgtaacttaaaagtgcaaggtgaagtagcaagtgctaacacatttagaaggtgcagcaaattatccagaagatctagctaagatcattgatgatggtggctactctaaacaagaggttttcagtgtagataaaacagccttctattggatgaagatgacatccaggattttaatagctagagagaagtcagtgcctggcttcaaacttcaaaggacaggctaactctcttattaggagataatacagccagtgacttggagttgaagcccagcactcatttaccatttcgaaaatctaaaggcccttaagaattatgcaaaatctactctgcatttgttctataaatggaaaaacaaggctgagatgatagcacgtatgcttatggcatggtttactgactattttaaaccaacagttgagatctgctcagaaaaaagaattcctaatggaaagcacacttgacttggagacttggaggcagtggaagtagcctcaagttgtggctgaggtcagttaccatctgtgggttttttttgtttgtttgttcgtttgtttttttgagrtggagtcttgttccattgcccagactggagtacagtggcgcagtctcagttcactgcaacctccaccctccacctcccgggttcaagcaattgtcctgcctcagcctctcgagtagctaggattacaggtgcctgctaccacactcggctgatttttgcatttttagtagaggcagagtttcaccatgttggctaggctggtctcaaactcctgacctcaggtgatccacctgcttcggcctcacacagttctgggattacagacatgagccactgctcccagccccatctgtgttctggcatggtggctcagaacaccagctttggcatcatacaaactggattccagtcccaggctacctctcattatttatgtgtttgtccttgaagaagctgcataaccttcagagcttcagtttcctcatttgtaaaatggagacatagcagtgtcttctgcacagaaattcttgcagggaggaaaggatatatggtcaaaatgatttcagtcccctttcatgccctacaaaatgctgtgtcaagctgtactcagaaaaatccacattactggccgggcgcggtggctcacacctgtaatcccagcactttgggaggctgaggtgggcagatcacgaggtcaggagatcaagaccatcctggctaacacggtgaaaccccgtctctactaaaaatacaaaaaattagccgggcatggtggcgggcgcctgtagtcccagctactcgggaggctgaggcaggagaatggcatgaacccgggaggcggaacttgcagtgagccgagatggcaccactgcactccagcctgggtgacagagcgagactccatctcaaaaaaaagaaaaaaagaaaaatccacattacttctgccctctacctgaaggttggagtcttcaactttctgggttgtccagcgcactggagctgcccagcacagttcatgtggtcttgggcagatggtgtttggtgatagagaaaagttgttgggtatctaaagcagatactttgttggcagaactgagatctaggatgaagtgagaatgtgttgtgacctaaaaaccatattatgttccatggtctcaaaaaatttgagaaataaggcttgttgacattcataccagacgacattagcagacaccgtataaatgatagttattttaacctatttatagtggcattattggtttttctttaatttttcaraaaaccatttgtcaagattacaaagctaagtgctggggacatgaaggtgaataacagttcctgccctccaggaagatcataatttaataatcgagacagccacttgaaagattataactacagcatataattataaccataaaacaatgtagtaacctctgctgtaaaaatggctttcttggccgggtgcgatgactcatgcctgtaatcccagcactttgggaggccaaggcgggcggatcacgaggtcaagagatcaagaccatcctggccaacatggtgaaaccctgtctctactaaaatacaaaaaaaaattagccaggcatggtggtgcacgtctgtagtctcagctacttgggtggctgagccgggggaatcccttgaacccgggaggcggagattgcagtgagccgagattgtgccactgcactctagcctggctggagacagagcaagactccatctcaaaaacaaaaaaaaaaggttttattctcttgttgtaaattacatgttttagatttttggttttgtaaagtatcttgtactcaatttaagcaaaattttaaaattagaggcttaaaaattggaaaagaagaggcgaaaattttagtacctgcaagtgatataactgctatttgacaactgtaagagaatcaactaaaaaactatcaatgattagagaatacagccttaagaaggactggtggatgcagaaaaagggttcaggagagagggtarggctttcagggaacctggaatgttggagactctcccgctccagaaggagacaattagaaagggcagagttagtgcagaatggcctgagcccaggaggggaatctcctgggcttgagaagaaaaacccttcctctgccaggcctagggataggagcagagcatgcagggacttagggcccagagggaaagcataaacccaagctgagtcagaggggaatttgtggggctccttctgtcagataagccaagaagtaagttccaaatatatcttggagttgaagtttctattctttattggtcttcttcctggtggccacggagttggctggaagaaatggctcaagtcccaagcaaccagaggtaaagccacaccagacagaactactaaggctacactccatttatgagatgcaaactcagagcagatggagcaggagtttgcacagcagcctctaagagagtgcttagcttaggccgggcacagtgtctcacacttgtaatcccagcactttgggaggccaaggcaggcagatcaccttggagaggtcargagttcgagaccagcctggccaacatggcgaaaccccgcctctactaaaaatacaaaaattagctgggtgtggtggcacatgcctgtaatcccagctactccagaggctgaggcatgagaatcacttgaacccaggaggtggaggttgcagtgagccaagactgtgccactgcactccagcctgggcaacacagtgagactctgtctcaaaaaaaaaaaaaaaagagagagagaaagtgcttagcatgataatttcatcatcctgtggctgattctttgagagtctagtaagaacatcctaataattaaagtcctggggtcttgccatggactgacaggcaagagaggtcttgccatggactgacaggtaaggagtggagaatattgaaagtctgcagtcctggttagaaaatgggcaaagaaggaaagaaaactagaggatcctacaggaaagatatgaagtgtggcatggtggctcagaacaccagctctggcattatacaaactggattccagtcccaggctacctcttgctatttatgtgtttgtccttgaagaagctgtataaccttcagagcttcagtttcctcatttgtaaaatggagacatagcagtatcttctgcgcagaaattattkcagggaggaaaggatataaagtatctaagtgcttggcacaatcccaggcacacagtgtatgtgcaataaatgctagaaatttttattattatcaatcctctttcttcttgtcttgaaagtagtgagattgtgcaataaaagaacatcagtggggcatttcctctttcacaagcagcaaataactatcagactacacttccaggtgaagtccacattccttgtggacatcgtcctgaaatgctggtcccaaagggcatggccaaaatcgaggtgcaggtgttgaaagacgttttatttctcactctgtctctctaaccttgaaatcagccagagttaaggcatctggatgactcataacaagcatctgtagagaagagtactttctgctctggtcagaggaagaattaacaagccatttggtattgcaaccttctcagtcagaatgccaggactggctcttgccctgtgcctgaactgtcaccaataatccattttaactccttttaaattctgaatagtggcttcaatgactgtgagagtttggggtggggttgaagggggcaactttttgaggcttgaatatgcacaaataaattaggtggctatttaatattgggtttgttaatctgtatttgtaatacaacagataagatatatgcattatttaaaatgtcctgtggtttcaattttgtaagattgataagacggtggatgtatttgcacttgaattaaattagaaatattggtcatcatctgtcatgtaaactaaacttaagccttaggccatgatttcctgattttataatcaagaatgccttcagccctcatgggcatgccaaagtcaccaaattgtgcctttgctcmaccaggatgtttagtttccactagatagttccactttaagactacagaacttaaacttcctcaggaatgtcagttttgcaatgtggcctctaagtcacggtgttcacaccctggaaaattctatgattttcccaatactttatttatttatttatttatttgagacagagtctcactcactctgtcaccctggctggagtgcagtggcacaatttcagctcactgcaaccttcatctcctgggttcaagtgattctcctgcctcagcctcctgactagctgggattataggcacaggcatgcaccgccatgcccagctaatttttgtatttttagtagagatggggtttcaccatgttggcaaggctgatttctaactcctggtcacaagcaagccgcccgccttggcctcccaaagtgctgggattacaggtgtgaactactgcacctgacccccaatacttttaaaataaatcttttttgtgctaaattagctgaagttggcttccattgcttactgcagagagccgtgattgacatacatcttctgtgcatcagtttttccatgtgacatattggtactattaattatatattataaaactgggcattaaaatgttaaataaatagtctaaatattttttgtgcaaataattgccaagaaaattatttcacatttaaaaatgcaattatgccacttgcttttttcttcattattccattttctttcaaagacatacacaggtattaaaataagtaaaaaaaagttcttgagtgtgttggaaagtgttttttttttttttttgagacggagtctctctctgtcgttcaggctggagtgcagtggcacaatttcagctcactacaaggtccgcctcccaggttcacgccattctcctgcctcagcctcctgagtagctgggactacaggtgcccaccaccacgcccagctaattttttgtatttttaatagagatggggtttcaccacgttggtctggctggtcttgatctcctgacctcgtggtccaccagccttggcctcccaaagtgccgggattacaggcattagccaccatgcccggccggaaagtggttggtttttaaaacagctgtaaaatatcttggtgatagaaatattataatatcttgaacattatgaatattgaaattttgcttaatgaaaagtgttatttttgaaaacaaaacgttttgagcttctaggaagaatgacaggatgagatataagatattcttatttaagcatgttactatagacctataaaggacttagacacatgtccacatgcagctgcaagaaatggcacgaccagctcatcatgggggttctactatatgaaccaaaggaagaatggacatgaaggtctttgccacatgggtttcctccmcagcaaaaaatacaaacaacattatcatttttaacaaatgcatagatatttatatttcacattctcctttaattcaatattgttttagtatcagctttatattttacatggagtaagcatttttctcacttgataaggtctgtatttcaaagagaaacttgaaaagaactagataagatgaggaaatatatggagacacccagtcacagaggccaatagtcgacccagtggcagtcagagcctccgtaattagagatttgtgcttagtgggcagacgatgctgtattgggcagtgggagaaaaatggcagcaatattagggcaacaaacacacgacatagtcctgattttctccgtctgtgtccctattaccatctatgcaatgaagattgaataattgtttctttttttatttagaaagaaaaaatgtaaactcatgctttaattatctcaaatacttgatgataaaaaataaaacaaaataaacccatggttcagattgttctgaagtttcaaggaaatgtatgcttctgttttcacatttttccaactaagtattatttagtgaattaatgtcagattttgttttcttgtctatgtcacttatggttcaaaccatagagtacatagaatttaatatgggatagtgttggatataaaataatacaaaaaataggatccctgctttcaaagagcccttagactctcaactatagggcccggcacggtggctcatgcctgtaatcccagcactttgggaggctgaggcaggcagatcacttgagtccaggagttcgagaccatcctggccaacatggtgaaactgtctctactaaaaatacaaaaattaactgggctggtggcacacgcctgtaatcccagctactcgggaggctgaggcacgagaatcgcttgaacttgggagagggaggttgcaataagctgaggtcatgccactgcactccatcctttatgacagagtgagactgtttcaaataaataaatgaatgaatgaataaataaataatctcaactatgagtaactgcaaggatctgctagttgatctccctgaacactgtctctgttctctgtccagttcaccatccactctgcagttaatctcccactgcttttatgatgtctcatcactatcatcaatggcttcccatttctgttaggacagctttcaaggccctccacaatatggcctgaacctacttgtctgatgtggtcttctaccacccgggagagtgaatcaggcagccaggccagtgtttcaactgttcccagaccagcaatccaggctcttcctcacgctgttgcctccaactcagcatgcccagcctcctcctttccatctatccaggtcccagccatccttcctctccattgaaactctcccaacccctcccttatatatccatatcttgcttctgatttccttttcatcctaggcattttcacattgctatttaactgctttaagagtgtgtgcccttccttttttgtttattaaacaaatgcttaatgaacacttactgtctgccagacgatgtgatcagcacttgatagacagcagtgaacaaaaccaaccttttctctaccctcattctacccttaagtgaggcaggataaactgtaaataaataagcaagcgtaaagtaattccaaatgctaagggctacaaaggcaaaaccaaaaacatttggaagctatgaaagaatagcaggtagaacctaaatkagatgggttagcgggtgaaggcagggtgttgtcagggaaagtctctaagggagtggcatttatttttattttatttttattttttttgagacagagtcttgctctgtcgcccagactggagtgcagtggcaagatcttggctcactgcaacctccatctcccgggttcaagcgattctcctgccttagcctcccacgtagctgggactacaggcacccgccaccaggcctggctaatttttttttttttttgtatttttagtagagacgggggtttcaccatattggccaggttcgtctcgaactcttgacctcgtgatccgcccacctcggcctcccaaagtgctgggattacaggcatgagccactgtgcccagtgggagtgacatttaaaatgaagaatggataggagttaggaagttgagcaaatggtagcaggaaaagtattccaaggaacagcatctgcaaaggtcctggggtaggaaggaagaaactcagtgaatttgargaactgaaagaagcgaggggaggcaaaggaaagtggggaaagataaagctgcttcttaccaactagactttgaactccttaggcccagggcccccattttatcttttgtgaatcacccctcactcccaccctaagtactgaacacagtacttaacacatggtatagcaatatgttaaaggatttgactacctatttagtagcatgatgctactaaatcatcaagaatgatgtaagaaattagaacaaagcatagagtaaaacaatcaagcagagcagttttaagactccagtaggtcccaggcatttctaatctcagaggctctgctacccccacatagtacaaaatatattgaacccacattttacatcaaacaccacgtatatcaccacataattagagtagaattgagttgcagttaattaattttcatcatgttaaatttatggacatttaaagatacatatattaattttgattttgcaaacttttttttttaatgtcattctcccctcatccctgaaagtctcagacatttttgtggacctagaaagaactgtaggtccaggaatactcattctattttgtagaatgagatgttgcctgattccagatttgccaataagagccaattaaaaatagaagaaatgtaggtcctgagcactttgcctaatggatacaaggcccagcaatcaagggctaaactggaaggaataaacaacaaatgctagagcaattcggggagaggaggtatcagtaagggcaggaaagcttacgcgtcatatctgttaacctgttgatttgcctggccaagaactgcagctcctaggaagcagaggaagtaaggggacactgtagtctgggcataacttggaccccaaagtttctccaagcagaaactaatggggtcaacttgaaggactagaagcctaggtaaaagtatccatgccttctttctttttttcactatgccccagaactgagcagacctgtatcttttcaaagtttggagtacacaagaatggacactgtcagatgttatgaaggcaaatgtcaaaccattcagggaaaaatcacagatctgattacatggcctgagacactaaacaggaggatgtctccagagaataagagaactgtcaaaaactgaacactgaggatacaatgaacaatggggaaggcaggaaattgagagctggagagacccatcaagctgaaatgcaaactcattagtcagctcagatttgaaraatgccgcattgagaaaagagaatgtagatgcaatgaaggtggcttagtctgctcaggctgtcataacaaaatgccatagacttttcgatggcttaaggcacagaaatttatttcttacagttcggtaggctgggaagtccaagatcaaggtgctggcaaggcaggtctcatcctgaggcctcttctcttggcttgtaggaggctgccattactgtttactcacatgacctcctgtttgtgtgctggggctatggtggagtgagctctctggtgcctcttcttatgagggcactgacttcagtgtgacagtcccgctgtcagacttcatctaatcctaagtacctcccaaaggccccatctccatagaccatcacattggggattaaagttcattgcaacatatgaattttcagtggacactatttagtgcatagcagaaggatacacctaaaagacggacacctaaaagagggactttcaggacagctgacaaaatggataaagccaagaatgagctgtttgagaaaaataagaattttttttttaaaggccatgtaatattgcagaaaagagtaggagcattggttacagacagacctgggctgaatcctgtttattaactgtgtagccttcgataagttacttaatatctctgagcctcagtttccatagctgtaaaaggaacattaaaaacgtatcacagggttgttgtaaggattaatgagataaagggtttaaagtactggcacagagaaaaggccttctaaaggttttgatgggggatggaaggtacaggcatgttgttgaggagcgaatgggatggtgataggtgacagggagaagctggttcatgctgaaatgtgctggctcatgagtaccactctcgctgagcaggaggtaggactgggtgacttctctagtgctctccaactctgaaatcccattaatccccatatctatgaggaagcagatctgttcatctcacctgctttgttgttactatccattcgtgctctgcatttttacaaatattatcttattcaatcttcactacaacctgaaacctaatagtaataataatagcgattattattcccatcttacagattagcaaactgaagttcaaagaattggataacctagcccaagatcagacctttggagaatgaaagaatctggatttgcacccggaacttactggcttccacctctaaacaccagcttccctgttccaacttttctaaagttgaatgttcttcatacaaatatcagcaggaagacattgaggcacaaaataaatggggtattgtatgagaatgcctagctttcaatgagcttatgtctccaagcttggacaaattccggctggrgtaccaacagaatttatatatgagaagactgttggcagcttttcagggactgtggggccggggagagacgccagaagactgtggctgggtacacactattccattttgtgaaaaggggaagaaggttgattctgcaaaccatagatgccagagtcctgggcaaagttcttgaagggcatcctataaacataaaaaaagggaagtcattgctaggcaccaacaagttttcattgagaagagattattccaaatgaacctaacttccatttctcataaggtgaaaaattggtatggctttatttagacaatacattttgctcattttcatgaaccagttgaaaaatctattttgtaaaaaaattaataaaaaataataagactgtttctatgagaaatataattttttggttattcattttaaaaatttgatgtaattacagatttacacatgcttataagaaatagtacagaggccagacacagtggcttatgcctgtaatcccagcactttgggaggccgaggtgggmagatcacaaggtcaggagatcgagaccaacctggccaacatgatgaaaccccgtctctactaaatatagaaaaattagctgagtgtggtggcatgcacctgtaatcccagctacccaggaggctgaggcaggagaatcgcttgaacctgggaggcagaaattacagtgagtcaagatcattgtgccattgcactctagcctggcaacagagcaagacttcgtctcaaaaaaaaaaaaaaaaaaagaagtaatacagcgagctcccctgtacacttagctcagtgtccctagtggttacattttgtaaaactgtagtatgatagtaccatcaggatattggcattgacacactcactgatgttgttccaatttccccagttttacttgtattcgtgtgtgtgtgtgtatgtattaagttttatacaattgtatcacttatgtagtgttacctatccactattacagtcaaggtactaaacagctccaactgaataatctttcttaatgggggagatagaactttaaaccttgaaggacaaaagagagaaatagtattttaggtcagagaagagcaaaaagaaaatcagaggcagggatgaatgttggatattggggagagggtctcggctctattaaaggaaaggattgctacattatagacatagtcattgggtcagttaggtaagatgcataaccccattataaatggccttgaccatcatggaccatgctacttagatataaaaacagtaggccggacgcggtggctcatgcctgtaataccagcactttgggaggctgaagcgggcggatcatgaggtcaggacatcaagaccatcctcgctaacacggtgaaaccccgtctctactaaaaatacaaaaaattagctgggcgtggtggcatgcgcctgtagtcccagctacttgggaagctgaggcaggagaatcgcttgaacccaggaggtgtaggttacaatgagccgagaccgtgccactgcactccagcctgagcaacaagagcaaaactccgtctcaaaaaaactaaaaaacaaaaagcagtataccacctaactcttagaaggtgttcagatactcatccctaatggtacaaagagtcatcaatattaaggcagttgctgttcctcctgcatagagcactcttctccagatacacttagtccaggtccgtctcactattcagatctcagcttaaaggtcacctccaggctgggcacggtggctcacacctgtaatcccaacactttgggacgtggtggtaggggactgcttgaggccagaagtttgagaccagcctaggcaacagagcaagaccccatctctacaaaaaaatataaaattagccatgtgcaatggcatgcacctgtagtcctagctacttgggaggttcaggtgggaggattgcttgaacccaggagttcaaggctgcagtgagctatgattgtaccaccacactccagcctgggtgacagagcaagaccctgcctcaaaacaaaaaagtcacctccacagggaagccttccctgatcacctatcctacctatcctagaatgctgcctctgcctcagttccctgctttatttctttcatagaacttattataatttttgtaaaaaatcatatgtatttgtttacttgtttattatgtctctccccccactagcacggagttagagctgaggaggagcagaacccctcactcccaaatgcctagagggatctggcaggtagcaaagtgtgaatctggcttgrtaaggactgtgtctatgtgtctaataactgtcttttgctgatacgtgggaaatatcggcccagtgttgacaaaaagcatattttttttcaaaaggctggaaatccagattttttttttttttttgagacggagtcttgctctgtcgcccaggatagagtgcagtggagcgatcttggctcactgtaacctccgcctcccaggttcaagtgattctcctgcctcagcctcctgagtagctgggattacaggtgcccgccactgcgcccggctgatttttgtatttttagtagagacgggatttcaccatcttggccaggctggtctcaaactcctgagctcgttttccacctgcctcggcctcccaaagtgttgggattacaggcatgagccaccgcacccggccagaaatccagatttttataagcaatctcctaaaatttaatgttatcaactaattttaaaaattacaacaaaacagttaccctggcagaattgagtccacaagccatgagcttgccctgtgagtattcagtgttgcaggtgccaatagtctttcagtccacatccttcctcacagagaaggaagggactctggaggccacacagctggttctagaagcaacaggtcaagaagcctgctgacaaagccagaacaatcttgttgcaggtcggatttaagcatttatttctctaccagtcaaagtcttctagcagccaacttgccacaccaaggaatatcaggtctgtgaattttgttttgtattcactcagggaaatctttactacaaagacaggaagtggaaagccagaacatgtggttttaatggtttgctgttgttttacttttgttttttagactggatacttttttctttctttctctggtctcttcctttcccctgacctatccctgcagatcaactcctttgctgcaaggatatgctttcagctaagagtcagcttgaaataagtttgctaaactcattcattttaggtgttaatagcagcaaggtagcccaggtatctaagrtccaaaaatgataccctgcagtcatgtgttacctcctctgggggacatttgcaattgactattctttttastttcttcttcttcttcttctttttaaaaagttcccaagagctgtaaatgcagtttactattctttaactctaaagtcaactttctgtgtctggaagtgcaggccsctcaacaacagatgacgcagagagatccttcaggtgtcccggggagtgagggagggaccatccctgaggttattaaaagtgtctgaatatggagagaaaggaaacaattggtgaatccgggaaaagggcagatgggagttccttggacccttttggaaacttttctaagctggaaatcatagaaagaaggggaggggaggggcagggagagaaayggggaggaggaggaagttacttaaaaaagtgaaggaggcttggaggaagctaggggaaggtagctgaaggagtgagagtggggaggccgggagagggagggaggtgagcggaggcccggggccagcgcggtggctactgtgcgacgctctgtggctgcagtgctgtctgtccatcggtccgtggggcgccaagcggccaggaatgcaggatgtccgtgggataggggtgaacacctggcaggccccctggctgacaacgccctcatcgggttgggggcgggacgggggacggccacctcctcgtctccgaacctgaagttcaggttccgcgaacagaaacgcttctcccaggtgagctgggagccaggtgagcgaggcatttgaggtcagtcctcagttcatctgggcccggacacatgaagtgcaggccttgacataccgaggttttccagtttaagaacacactttttttttttttttaagacggcgtttcgctcttgttgcccaggctggagtaccgtggcgatctcggctcacctcaacctctgcctcccgggttcaagcgattctcctgcctcagcctcccaagcagctgggattacaggcacgcaccaccacacctggcttttttgtatttttagtagagacagggtttctccatgttggtcaggttggtctcgaactcccgacctcaggtgatccgcccgcctcggcctcccaaagtgttgggattacaggcatgagccaccacgccctgccaagaacacactttttcctatagaaatcgcagggagtaagatagccgggcgaggtggggggtacgggtggagaacaaacctgtgggagaatggagatgagagcaattcgtgaatgcagcctggggaccrgttcccatgagagaagctccaaacctcagtgggaaacctaaagctctcaaactgtcttcatgtactttattatcatttttttaaggtgttgggggtaggggatggcgatttaagaggagggcaggggccaagatcccttgtttttcttcctcttttctccaagcaattaacagatggaaaggtctcaaccaatgaacagatagaaagcagcagcaggccttgctcctaggtagaaaatggggtggggaagaatcagcctaaggctcccctccacctccacctctcctggtggggtccagtgagagcagtctagcactgcttggagggactttaagtggctttatgaaaaggcctgccatctaagatggtaacttgagttaataactaaggaggaagcaaaggaattcatgtagcacagagttgtgagcccgatgaagaggcggtattgctaaagtcggatcatgatgtcttacatcaaaagaaatcataaggcaaagaaaggagaacagaaactctcatttcctcttgatcactgtcggttggctaagttgtcattttcaagtggaagatgccaaaaagtccagtaatagagtaatttttcagacaggtagacaggaagcatactattacaatgagactacagtaagtctcaaggtggtggcagtgactcccacctagatagaattttaggaaatatgtttaattactacatgaaaagattcatggaaatcattaaagtcctaagtgccagaatatgcagtcctgcccacgtcaagaatttgccagcaataacaagcacagactttccagtcacaaacagctacctagaaagaaatgacaaagtactgattctttttccaagctgctgatccgataacsaacatgagatttagtatctataatggctgtctcacttcatctcctgtgcctgtcataattcctagcacattaaaggggctcaataaatatttgtggaatgcgttgctgagttcataatatttaccacgttgtatttattttactaccttagaaacaatctctaagacgacaagttatagccatcttagcagagatcctgtgagatctggtcttttgaattaattttaagatgttacagcaactaaaggccttagttaggattaggtgagtccaacatgcttgttttataaggagaacacttgggacagagaaagggagggtaactttcctaaggtcacacaccctttggagctagaatatgcatgcatcttctgactcctagccccacctaggatggacaccagctcttagagaaagagcagctcaaaaaacacatcatgatattatggaagtagattttcattaagtaagaaacagcaggaaagcactgcagtatgaaagagaaagcactgcagtggtgtgtcaagaatgctttgcagtctcagttcctccattaggcagctgattagacattccaagtgacttggcaatgtgagagcgctgagatctagaaatatccaatgctaatgttaaagtctattcttccatgtggtttttctttctgaaaactttaaggaataattgatttttttttcactcctgtcaagcaggtccttcctcataatagattgaaatatagagtgaattttttaactaaaaggcagaaacccgagattgaaaaaggtcttggctttttgtcttaaaacaaaacaaaaacaaaacaaaaaactaaccatcttcatgtgcctgcttgtgggggacgttagatgatcagggcaagtaaaactggtgaagcagtttggtttgtcagggcactctttgaatttagtgtgtgggagggacttcctgtagaattttgccaatttttttttttttaatttttatttttgagacggagtctcactctgttgcccaggctggagtgcaatgatgcaatcttggctcactgcaacctctgcctcccgggttcaagggattctcctgcctcagccctccctagtagctgggattatgggcatgcaccgccacgtccggctaattttttttttatttttatttttgtatttttagtagagacagggtttcttcatgttggtcaggctagtctccaacttctgacctcaggtgatgcgcccgcctcggcctcccaaagtgctgggattacaggcatgagccactgtgcccggcccttattttggtttttcagggcactccttgattttagtgtgtgggagagacttctgtagaattttgccaatgtgtttgcttggtgaagagagtcagaataagggaggagaccacccctcatattgtcttatgcccaatttctgcctccaacaaaagaagaagtaaaaactaaaaggcagaaatgaaatccacaggcagacagcccggcgccgcgtcctgggcctggtagttaaagatcaacccctgacctaactggttatgttatctatagattccagacattgtatggaagagcattgtaaaaatccctgtcctgttctgtctcgttctgattactggtgcatgcagcccccagtcacatacccgctgcttgctcaatccatcagaaccctctcatgtggacccctttagagttgtgagcccttaaaagggacaggaattgctcacttggggagcttggctcttgagacaggagtcttgccaatgctcccagccgaataaattccttccttctttaattccgtgtctgaggagctctgtctgtggctcgtcctgctacaagaaggccaggaaaaatgaaaagtcctttagaaggaaggggtcattaaggagaggaagtctgtgtgaggaaaagaatgatatccacactaagaatgagtcttattttctctgagctgttttactttggctcttgtattgctgactgattctgtaagaacatggagggaagatactgatgtgtggttacacagatataatttcattcatacctgcattcacttcataatggaaggcctgatattcatcaactaactcaaccctgagcttccacggttacctgggggaaaatttcattgacttttattaggaaagtcacacacactcacacatcactgtacccaactcaactcaaaggcctccaccaccctcaaagcatgctttcagcatcaagctcaggggggactgcaacatcttgcacaagctgtcctgcaaaggagagccattgctgctgtgcttgtggctgagagtgaagaggctgagcaggtggcttccctggcccagaccatgcaggtcaaactgaatcaatattggagaaccaaagcaggtcatctgttctctgttcatagagccagatgcttgatctcttagagcccacaggaccagagctctctccacattgtcccatcttcagcaggacctctgagtgggcagacatccccgacagttggaggcaaaccttcctgatgtctaaggagacattttactttatctttgaaaagctggccacacatcttcaaaggaaaaccatccacataaaattgcctctgtctgtgtctcagaaagtagctactgggttgcattgctggcctccctggtgcctctgtgtcttgctgctaagttccttggggtagacagatctattgctgagcatgccttctatgaggttgtggatgccatctgtgctatcgcctggaaaaccagyctgaytttgaggaggtgctgaaagatagcacagatagagaagttctggaccaaagatggcttcctaatgtgtgctggggcttctggaggtacacatatcgaactgtcctgccccaaagggcaggaaagtaactattggaactggcatcaatactttttctgttagaagaaatttaaaaatttaataaaggaaatggatagataacaaagtgaacaaaaggaaaataaatgtaggattttaattaaaagatccttaaatgaattgtgtttcttttttttttttttaagacaaggtctttgtctgttgcccaggctagagtgcagtggtgcgatcatagctcactgtaaacttgaattcctgggctcaagtgattctcctgcctcagcctcccaagtagctgtagctgggatcacaggcatgtgccactacccatggctaattaaatgtttttttttttttgtagagacggggcattgcgctatgttgcccatgctggtctcaaactccgggcctcaagtgttcctcctgtctcaacctcctgaagtgctggaatttacgggcatgtgccactgcacttggctcttatgtttcattctgtctcagctttgaagcgtggaatagataggcctctggatcagggcttttaatgattatggctaagccttagctaaaaaaggtcacggtggagaggcctaagtctgtgtttttattacccttagtctcttctgttattatttatgtattcaaaaagcatttgaaggtctcctttatgcctaggcattatattaagtccagggtattcaccaataataaaaatgcccatcatcttcggaaaacagtatggtgggtactcaaaaaattaaaaatagaatgatcagcaatccacttctgggtatatatccaaaagaactgaaaacagaatgtcaagagatacagaatgttcacagcggcattattcacaatagccaagaggtggaaacaacccaaatgttcactgatggatgactggataaacaagatgtggtgtatacatacgatggaatattatgtggcctgtctattatgaaggaaatcctgtcacatgctataacatggatgaaacttgaggacattatgctaagtgaaaccaattgcaaaaggaaaaatactgcatgattccaataatatgaggtatctaaagtaatcaaattcgtatgtatgtatagaaagtagaatggtgattaccaggggctaggggcagggggcaaagttgttgtttaatggtgctatgatctgaatgtgtgggtyctctcaaaattcatgtgttgaaacctaactcccaaggcgattatattaagaggtggggcttttggggaggtgattaggtcaggagggcagtgttgtggtcaactatcttcaggggcctgttgatggctggcttctccatgatagtgagcctgtgtcatatctctgctggggctcagcagaccccatatagatcccactgttgtgcctgggatggtcccactatttcttggcctgggagcatgagggctgaggccattggtggaaattccagattggtcttgttgaagagaagagcatcagtcactttttaaagaaagatattttattcgaaccactgcagtattgaagagagactttagtataaactgagctcacctccaactaagacaatggtaaatgggacatttaaagggagatcatagaggtaattaaaagggggtatggggaagtaaaaaaaaagagaggacaaagaaagtctgggaaaaatggaaaattacagaaggagtgagtggaaaattactgaaaactgtttggcaaagtgggttgggacacagtacattttgcagcttagcagcattgtgtttttctgagcaaagacttcgcacaggggctggggccacctttagggactgctgtggtctgaatgtctccccaaagtcacatgttgsaacttaatcaccaatgtgatagcactaacaagtggggccttcagggggtgattaagtcatgatggtggagctctcataaatgtgatcagtgaccttataaaatgtgattagtgaccttattagtggctggaggtaactagccccctttcgctgttctgctcttctgccacgtgaggatacagcattctaggcaccatcttggaagcaaagacagaggccctcaccagacactgaacctgctaatgccttgatcttggacttctcagcccccagaactatgtggaaataaatttctgttcttttataaatgacctggtttcagacattttgtcatatcagcacaaacagactaagacagggacacagtctagtgtaggcagaagccaggctgaagtctggtcaagtctcttagcatagtgtttgggcaagtcctttgtgctatgtgaaagttcacagttcacaactccttcctgctgcatagccttcctattggggcagtttggaggctgtgggtcggtaagtttggaggattcctcttctttctttccaaccccagtgggtgatgggagggtcagggtggacctcacttagccaggctcaacttgaaagatcctgcacctatttctacctttatttcagagagtggctggtcatgcaataggtgagggacaatgttattgaaaaaagactcccagggatgcccccaactgctgcagaatttgctgaggctattgttttcatcctcctttaactgctggagctcatcagggatgctcctagaaaaacacatgcttctgtgaaggctccaatatagttgaacttgctaatgtcctaggcccctgtgctctgctaccactttgctcaagctagagcctaaggcagggaggaatggaaccagagagttgttctcctggctgtcattcacccaggctgtgacccatccagagacccaagtcctgtccagagcccagtgagactggctgtctcatgagtctatctcatggctgtgtccttggccagccacagccacccaaatctgctgacagggagagataagtatggacctgttggttttgtcctctcttgaagcaaatagcagccttcctctaagtaagccacaggtggctctgcccacacgtatctgcctcactgtagtgtacgaagactgtgccaatatctcactgacattcagctttcctccttacttgcctccacctcaatatggctgtcaagcagctcactgctgcccggtgagcaggtcttgtatgctggttggccaatgaggaaatgggcccaaggtgagccagctggcctccaggagacattgcaccccatgtcttcatgagaaaatcccttgagctacaacttaacagaacagattggttcccacagtgcagttgacagaaatatcttgccaggctagacttcttgctctagtaagacagcaccaccccacccacagctgtaagcacagctgatttcttttgaaaagagaggattgtggccgggcgtggcgactcacacctgtaatcccagcactttgggaagccaaggcaggtggatcatctgaggtcaggagtttgagaccagcctgaccaacatggtgaaacccgatctctacttaaaaatacaaaattagccgggcgtggtggcrcatgcctgtaatcccagccacttgggaggctgagggaggagaatcacttgaaccctggaggtggaggttgcagtgagccgagtttgcaccattacactccagcctgggcaacgagaacaaaactccatctcaaaaaaaaaaaagggggagggaargagagagaagtttgttaccacaaagaccagggctggctttggcaggccagggctgggtgtgagggaatgcttgtaggcctctatgcttcggcctgggacaaagcggtgggaaggatatgaaaacttggtatcaggaactgccacattcctctcctctatcctctcaaccatagctccctgtcaaacccctcacaaagtaaaaaaagtcaggctcaggaattggtgatactgatacttctggggccccagaaagttcctgttcccagacactgtccccagcctgtttcctttgtcttcctaagaaggcactctgtgggccacctagaactagtttaagtgtcccaacttagagccaaaaatggaaaaagcataaaagtgccagatgcggtggctcacgcctgtaatcccaacactttgggaggccgaggcttgcggatcacctgaggtcgggagttcgcaaccagcctaaccaacatggagaaaccctgtctctactaaaaatacaaaattagctggatgtggtggcacatgcctgtaattccagctactcgggaggctgaggcaggagaatcacttgaactcaggaggcggaggttgcaatgagccaagatggtgccattgcactccagcctgggcaacaagagtgaaactcagtctcaaaaaaaaaaaaaaaaaaggaaaagcataaaggtttacaattttgagggcctgaaagggggaccatgaactcaatgaagcaaaagagaaaggctgggagggctcacagaacaaaaggaagctgtatgaatggaaacaagagggcaagaaatcaattaagatctgaagttgtgtattcagtgttaattcaacagacattattaaggcctactctgtgtgtgtcaagcactgggctaagtgctcagggtaagaagcagaacaagacatggttcactggagtaaacaggcatgtaaacactaattgcaatatgatgaaagaagcacccagtgaaaaatgtcaaagcaagaagactaggttgttccatccaactgtcatttatagggatatggtgctggcggcttctgtgtgagcaaaggcaattgggagccctctaccacaaccctttctccttctttccccttctccctttctatccttatccttttcttctgtctcttctttcctcctcctctactgccataaaatggcacctaagggtactcactaattccgttaatagaacagagttgaatacaagtgtcccccctcatctgcagtgttgcttttcttggtttcagatactcacagtcaactgtggcctgaacatattcaatggaaaagtctagaaataattcataataaattgtccttcattctgagcagcatgatgaagtttcttgctgttccctgtgttctgcctgggaggtgaatcatccctttgcccagtgtatctaccccccattagtcacttaacagggtcttggcgatcacatcaactgttgaggtatygcagtgcttgtgttcaagtaaccctgttagaacaggcagatggttagatgtgagcatgagagggagcccctggaggaggaagtgctggaaaatctagcatctcagagactgcctgaaacatgcatgctaaatatgagcagagaggaggggaaataccgaaaggaatgtcccctccttgaggggacactgagaaatgttacttcttcaaggtatgcaaaaaggaataccctgaaactccccttaagatgcccagtaatcgcctgtaatcccaggactttgggaggctgaggcgggtggatcacttgaggtcgggagtttaagaccagcctgaccaacatggtgaaaccccgtctttactaaaaatacaaaaaattatgccaggcgcagtggctctcgcctgtaatcccagcactttgggaggccgaggcgggtggatcacaagggcaagagatcgagaccatcctggccaacatggtgaaaccctgtctctactaaaaatacaaaaattagctgggcatggtggtgtgtgcctgttgtcccagctactcgggagggtgaggcaggagaatcgtttgaacccaggaggtggaggttgcagtgagccgagatcgcactcgggcatggtggcgggcacctataatcccagctactcgggggaatcgcttgaacccaggaggcggaggttgcagtgagccgagattgcgccaccgcactctagcctgggcacgacagagagagactctgtcaaaaaaaaaaaaaagcccagcaatcgttcattctgtggttaaactgtcagaaagtagctagctacatgctaataggagggggaaaagagcaaaaggggaattcctaagagatacacatgagcaataagtacagatttgaccttcctggggtggtggttatgagacacactgccattaggtaggattcatatggatcgctgggccccaatcatgcacattaaccaacagtaagggagggtcccataagcctggtcgggaaactagatggggacaaaggcagagacttaagacagaagccaggaaactagacaaagacaaaggcttgagacagaggccagaacttaaacaaaaagtccaacgtaataaaaactgcattgcagaactcttggggctgttcccagccaggtcagcccactcctctcttacagtgtacttttatttccataataaaccatttttgcttgcttcactaattggtctcttggctgaattctttttgtcgagaagacaagaaccaaggagccccacacttccctacaacaacccttattaaatttaatgctggcccaaaatgtaagagtagtgatgctggtatatcataattttctattttattattggttattgtttttaatctcttactgaacctaatccataaattaaacattatcatatgtatagcaagaaatgtagtatatataggatttgtactatctgccatttcaggtatccactgggggcatgggaaggttttgctaaccccatgtattagtccatttttgagttgctatcaaggagttcctgagactgggtaatttataaagaaaagaggtttaatttgctcatgcttctgcaggttgtacaagcatggcacaaatgtccacttggctcctggtgagggcctcaggaagcttacaatcatggcagaaggtaaagggggagcaggcacatcacatgacgagagtgggagcaagagagacagataggaggtgccacacactttaaacaaccagatcacagcaagaactcacttatcaccagaagcatggtgctaagccatttggtgaaggatctgccctcttgatccaaacatctcctaccaggccccacctccaacctccaacactggggattacatttcttttttcttttcttttctttctttttttttttgagacagaatcttgctctgtcatccaggctggagtgcagtggcacattcttggctcaccgcaacctccgcctcccataytcaagtgattctcctgcctcagcctcccgagtagctgggattacaggcatgtgccaccacgcctggctaatttttgtatttttagtagagacagggtttcaccatgttggccaggctggtcttgagctcctgacctcaagtgatccacttgccttggccccccaaagtgctaggattacaggcacgagcactgcacctgggctggggattacatttcaataggagatttggaggggacaaacatctaaaccacatcaccctattctaaggaaacaggaaatgggatatccagctccttagtcctctgctgtggggagggcattaataaaatgttagattattattttgtggacagaactttcctaatcaacaagaaaccaagtttaattcctaagatctaaaccagtcagatagaaataatccaacacaaagaaaagaggaaagtatttggatagtttggcctaatgtgttccttttgaatttcagtttttatttataaaagataatagcttgaaactattatcagtttcaaacagaaaatggtttgaaactcacactcactacccagattttgtatatgttaacattttgcttcaagtatttttttttaaataaaatatttatactcaaccaaagacctgcccttcttttgtccctcttctatgagtgggtttgtgtcattcatcccaggaatattgttatattttgctatatttttgtgttagcaaaataaatagtaagtttgtatgttttgaaactttatataaaaaggcctaatactgtgtatatcttttgttacctgatattttcacccagtgttctcatatggtagctccattaaacttctgtattctaccaaaaaataaactagttcattgcttatttatttccattgtatttcttgtgctttctacttaccatgcttttctttaattttttccacctctcttactatcttctgtttatttatagtgttttctttgtttccttttcctctactactttagaaatgatacattctctttttatttttctaggctttatccttaaatttttaacacaaacaactgccttcaaaatctgcattctcctcccaaataatacaaagatcttagatttttaactttgattggctctagtcacttgccatgttattattgtctaaagctgtgctaatacaatagctacttgccatatgtggctatttaaatttaaattaatcagtgttaaataaaattaaaaattattttccttagttgcatagccacatttcaaatgtacaatagttacatgtggctaatggctaccagattgggcagagcagatacagaacttttccatcattgaaaaaaaaatactgcaagacaatcctagttatttacatctagtttttaactctctgcctagtcattatcatttatttatttatttacttatttatttttgagacagagtctcaccctgtcgcccaggctggagtgcagtggggtgatctgggctcactgcaagctccgcctgctgggttcacgccattctcctgcctcagcctcccaagtagctgggactacaggcgcccaccaccacgcccggctaattttttttgttatttttaatagagacggggtttcacagtgttagccaggatggtctcgatctcctgacctcgtgatccacccgcctcgacctcccaaagtgctgggattataggtgtgagccactgcgcccggccttctagttattattattagtattgatttttacagtcaagactttcttagatttacctttgtgtttaccaatttatttgcttaccatcgttttttgcatttatagggatataaaatataaatcctaagcaaagaatattaaattatttttcatattatatctccatttcccccactctgccatctcatgagcaatttcctcagctccatctcctagtttatctcttttcaaataagtatgctctgctttcacccagtccattaatttagtctttcaataatgtatttttgaatcttaaaagtatgatttgctcaaatctacttttctttgagggtcttgttctgtcctgagtatttctctacctttaaaaaacatttcattttaaatatgttaattttagagtgtaatcgatttttctggacctcagttatctaaactatgaaatggagctttagactaaatggcctgtaaggtgacttccagctctgaaattttaatatgtactctgacattcatttatttttttaataaatattgttggagtactttgcatttccaagtaatgaaggtggcactgaagcatgccagtgaataaagaatgattattttaaaagccaccttccccagacctctacaggctctgagccaacaccttcagttttctcatatccccttcctgtattaacagagaaacaggtggctgaccagatggacagaggccaggaaaaatttccatctgggtttggtttcagatcagagatattttttggaggctcatcaaagaatccagtgaaaggctgggcaaaagaggtgaacattagatctctaagcttctcagatatttttgttttgatccttatagtacataaaatgtaaaattagagttccaacagcttttctacactctctaaaaccagcagaatacaggagggctggaagaacagtaacgaaggactgtgtttctttttatctaaagattcctgaaattgacctggaagaatgtagtaagatgctggaagggaactgtgggtatgatttgaggtgagggataggaaggatgattttattatatttctctgaagggcaagtgattgatcaatacaaccatttctgcagcttgtatctcacagtgcctcacaagcatctttcaggttttgctcctgtgttgtcaaatgttcggtgagtaaaggatacaatgagattcagttgtcccaagccctggcttctatcagcctatcacactgatggtgtgaatgctgtggataggagctacagtttctcaggcaaataacatggaaacaattaaaagaaatattcaactcatttcaaggagcattggmtctccagccccctttctaaccagatgcagtcatgaggcttttataattttatttatttcctttgcttaggtttttagaataaacttgattaaggcatactttatgtatactttcccttattgagacatactttgtatatggtactttgttttaaaattcaacaaaatacaacttctcttccttttctatactgtcccagacaaagtttttttttttgagatggagtctcgctctgtcgcccaggctggagtgcagtggcgccatctcggctcactgaaagctccgcctcccgggttcacgccattctcctgcctcagcctcgcgagtagctgggactacaggcgcccgccaccatgcccggctaattgttttttgtattttttagtggagacggggtttcaccgtgttagccaggatggtctcgatctcttgacctcgtgatccgcccgcctcggcttcccgaagtgctgggattacaggcgtcagccaccgcgcccggcgccaaagttttgaaactaaatgtcaaggttgaattcttcctttgactaccgatgttttgggagacttgactgtctctgaaatttcttttcctttgtgttaactataaaacaactcttcattctaactaaagatctaaataaagatctttaacattgtatgctttctgtaagccctcgaggcactgtgtctaatttatgctacctacatataatttttatccctctgtattagcctgttttcatactgctgataaagacatacccaagactgggtaatttacaaagaaaaagaagtttaaaggcttcacagttccacctggccgggaagcctcacgatcatggtggaaggtgaagggcacatcttacatggtagcagacaagggagaaatgagaaccaagcgcaagctgaaatcccttataaagccatcagatttcgtgagacttattcactaccaccagaacagtatgggggaaactgcccccataattcagttatctcccaccaggtcccacccacaacacgtgggaattatgccagttacaattcaagatgagattcgggggtggggacacagccaaaccatatcaccctccttttccctcactcctgcttctatccaaatagcttttctatctgtcggttttccctctgaaatgtcttgccctcatcctttcctttctgatccacttttgaacaacttttcctggcctcatttctttttgttgttgttgtttgcttttttttgtttttttgtttttttgttttttgtttcgctcttgttgcccaggctggagtgcagtggtgcaatcttgcctcactgcaacctccgccttctgggttcaagcgattctcctgtctcagcctactgagtagctaggattccaggcgtgcgccactatacccggctaatttttggtatttttagtagagacagggtttcaccatgttggccaggctggtctcaaactcctgacctcaggtgatccacccacctcagcctcccagagtgctggaattacaggcatgagccactgagcctggccccagcttcatttccttttatttgattgaaataattaattctacacatgctctggccagattaatgttcctaaagcacaactttgatagtctctcctttgctcaaaagccatcaatggctccctttttcctactaaatcaggcactgtgtacttattctgttggctgtgacctctagagtcaggcccaatgtacccagctgctttcagtcgtaccctgtactcacctttcctgtggacccttcattctagtcacattagtatctcctaagggcttggccatgtctgcctttacttaaaatgtccttgctgccacatctctctagaggcaatattgcccacttttgatcctcaaatcaaatactccctcctctcattagccttccctcaatcagtgcaaatttatatgttatttttaataaatatgatgttttatactatgcccatatcacatatttttaactcaattaaaatattttaaaataagaaatacctgttcacttaatattgaagtaaattctactgagtgtaaaggatcagattctacgtttgaaccttaacatattcatttgtttttttgtttttcgagacagtctcactctgttgcccagtctggagtgcagtggtgcgatcttggctcactgcaacttctgcctctcaggttcaagcaattttcctgcctcagcctccggagtagctgggactacaggtgcacaccaccatgcctggctaatttcttatagagatgaggttttgccatgttagccaggctggtcttgaactcttgacctcaggtgatccacctgccttgccctctcaaagtgttgggattataggcgtagccaccgtgcccagccctcatttgttcttaaatgctatttggtatagtaataaagatctgggttcaaatcctacccctgcctcttgctagtacagaattctgagatcttttaaactttagtattctcacttgtaaaatgaggattaaaaatgaccacttcacaaggtgaggtaaaaattaaatgagattttatggtttataaagtgcttagcaaagtgtctggcacatagtacatgctcaatgaatggttactattatttcaagctaaatcataaactatttcaagagagatttttatactctaaagctttctgtctaatgtagcagtcaatatccacatgtagtgatgaaacacttgaaatatggccagtctgaattgagatgggggtagtacacacaggatttttaagacagcaaaaaggaaaaaaaaaagagtaaaagtaatcccagcactttgggaggcctaggtgggggaattgcttgaggccaggagttccagaccagcctgagcaacatagccagaccccatctctacaaaaaattgaattagccgggcatggtggcacatgcctgtggtcccagctacttgggagcctgaggcattgcttgagcctgggatgttgaggctgcagtgagctgtgactgagcaactgcactccaacctgggtgatagagcaagatcctgtcaaaaaaaaaaaaaaaaaaaaaaaaaagaaaaagaaaaaagaaaaaattctcaacactttttaatattgattacatattgaaatggcaatattttggatatgttaggttaaatatattactaaattaatttcaactgtttcttttttactttttaaaatgtggctactataaaatttagaattatgtatgtgtcttgtatatttctatccagcagcactgatctaaaagtctttgttccaggacagaattaggtatacagattacagatgcttaactaatatttgattgtttggtatggctaaagctcttcatcatttttaaaaacatttatttcttttttcccytaccatgccaatgtacatcattttattacattaagggactgtatctttaaaaatgcatgcttacaacaaatctagacagatttacagaatggagttattatcagagcatttcatatgctatattcatattcactcaatttgtgtttaatcatttccttctgcaaatctgtggttctaagcattgaagcaaagctcttcagagcatcagtaaagacttgtacaattaagaatgggggctcagccgggtgcagtggctcacacctgtaattccagcactttgagaggccgaggtgggtggatcatgaggtcaggagttcaagcctgaccaacatggtgaaacccagtctctgctaaaaatacaaaaattagctgggcatggtggcgcctgcctgtaatcccagctactcgggaggctgaggcaggagaattgcttgaacccgagaggtagaggtggcagtgagccgagattgcacactgcactccagtctgggcgacagagcgagacttcgtcaaaaaaaaaaaaaaaagaatgggggctgggcatggtggctcacgccaaggtggtaggatcacttgaggccaggagtttaagaccattctgggcagcatagtgaacctatctctcagaaagaaaaagaatggggatgacttcttacggactaagaaatcagattactgaaattaaccttggcaaataccaatgaatcactaattgttggcaagccaactgtgttgttatatttaatgggaaaatcatgatcactgatgttctctgtctggctcctggattttccggctctttttagcatatctaaccggaaggactccaggaagcaacagaagagtgcaaaagggagacaagaaaggtgatcagactcgtttatttatttattttttgagacagagtttcacttttgtcacccaggctggagtgcaatggcgtgatcttggcttattgcaacctccgcctcctgggttcaagcgattatcctgcctcagtcttccaagtagctgggattataggtgccggccaccatgcctagctaatttttttgtatttttggtagagacggggtttcactatgttggccaggctggtcttgaactcctgacctcaggtgatccacttgcctcggcctcacaaattgctaggattactggtgtgagccactgtgccggctgaccagactcttttaaaagagttttataaaggagtccatttagtattccataatgttctttgagcatggagtaaatgcatctgatggcttccaacactgtcggaatccgagccaaacaacaccctgcctatgttattttttttagccaattggacttccagcagaaaaaggtcccactcaaggaagtgtctgggttggttgtattgtaagttttttggtggaagtgggaagggggtttgaatttggttgtctgaattgtttcagaatgcactacagtgcttcctccccttctcctatcccttgactcctctccaactaccattcaccaccactaccaatggttaacatttatttaatgcttactacataccaggcacttttttcagtagtttacatctgttatgacttcactggatacttaaacatttgagttagatactactaacctaatttgaaaggtgaagaaactgaggcacagagtggttaagtaagttgcctagtcgtgcaggtaatatacagagcagccagaaagagtaaccaaatctgcctgtcttggtgcttgaaactctagatgctacagcatctgaagattctgacttcacactgcagaactgtgaggttagggcaagcctgtgcctacagattattccttgagctgctgtgacacctggaggcatagatttgctcacctccaagctttggtggcctttgagtaaatgtcaaaggactgctaatgaattatggcactttcctgagtgcctaaacaagttattaattacagggtattatttgaaatgttttgcaacatataatgttcattagtttgaacaaaggtatatataatttcttgtaataatatttattatggatttgtattgtgtctttgggtattttttggaccctgaggacatagaaaaatggcagtattacatctattttgcaatctctttgcaatcttgttttctttccattctcttcctgtatactctgctctccagggagccccctagcgtttaggcagccttggagatgggcttgagtccattaaagtctagggtggaaagaaaattgaaatggaggaaagcaggaatgtgacccaagtatggaaactgtagatacactactttattagattatatgtgctttttaattttgaatcaggatagaggaggactacgggctaagctcagctggactttttatgagatatgtacaaatgcccctaatttttctgtagcaacaacctgattgattttgggcagtttgcaggtgtcggggataacaaaggaaatacatttcctctgcttaaagatttcatgccctaatgaaagaagggagaaacaccaattaaatagcggtgtgtccttcacagctgaagatgattatattgggacaaatcaagtctttatcaaagaccatggcatgattaattcattaaatagaattgtctttacatagtttccaaatttgccattagctcatggaatgttagagtaagacagattatcagagatattctaattcagtttcttcatcttatactgtatataaggaaacaagcccagaaaaaagtgtgagaatcaaagatgtggttttcagatttccactcttttggactttctactacaaatgactcgacttctttgctagtttgaactaagcttcccggttcttttagtgttaatttcaaattgtttccagagcagaggatatctcagtactctgtccaataagttcataaaataagagttatgagtaaaaagtcttaataaatcagtaattacctcttgctatataacggcaaacagtatctttattctagaattttcttttttttttgcccgttaataaacataaaagcaagcagtcaaatgacagcctttttgctttggctaaggatcgatttatctgcccactaggatggcacaaaacatacagtaactataaactgaataataactagaaatacatatasccacacaaatagatggcctatatattttgtttaggcagattattcttagaatatttatcagtacatagtgagtcctgaagactttaaaacataagctaatagttggctgaaatttcagataaagaattatcaaatgtctgatgttgggcaatccagtatttcagcttcttgttcagtaaaattaaaaacacatgctggggcaatgggcttgctctttattgtgcagagtggttacatgggtgtaagcacaggtaaaaattcactgagctgtacacttaagatttgtgcattttactgtatatacattatatctcaaaataaaactagaaatataagaaaaagccaaccacgacggactgaaaacaaacatacaaatttggacgtgcgatgatcttttagtcattatggtttcagatttgctgttagttactgattgatatttaatcaaagtgacgtgaaacactttttcccctcttgagctgatcgttcagtaagctaagttacttaaaaggatcttgtgatctttttataagaccagaaagcctttaatttacctgttattaagtaagatggagtagtaacggtttccaaaatttgtataacacacgatgaagtctctagggggcagggtaaacacagattttttttttcacttcatccttctctgcggcgatgtctttatggagttcgtcaggcaacggtatcagatagcaaatgggtttttaactaatctttccctaaggtactgtagttctatattctatcctatagattctcaaaatccacttttacactaggatgccactggagggcagttctgatttggatatatcttaaaaatgatttgcttttatgttttcatctccctgcgttataaagcaccatcctctgaatttggtcgttgcatcgggtcaaaagttctgcagcttgaaaaaccctgcaaaaacatccggaaaggagggagaacactacaactcccagaacgcaatgctttccctctcgccagcctgtcccctccagctgctcaatgaccagcctctgtgagcctcctctcagccctattggtcagtttgctcgtcagtgagtgaggcggagggaggggaggaacagagaatcccggatggtacgtttcccgccaccgcggggcgcgcagcggaaaacccgaagaagaagaagcttttgattggacagtcgctagtccgacctcagagaactcagccaatcataatgcttatatgctcccaaggtycccgcctcttcctcgaggtaacctttggtggcgggaagagttcggaagttttcgcgccggggtggagtcatcctgggaacctccacgcgactttggtggaggtagttctttggcagcgggcatggcgggtaccgtggtgctggacgatgtggagctgcgggaggctcagagagattacctggacttcctggacgacgaggtgagggaggcgccggcgcgcgggctstagcgctcggagcccctgcggacgcggcccggccgggaagccagaggcccgccagacctccagaccgtgtgccgcagcggagcctgccgggcccgagcctccagccccaatsttgtaacttctcaacgccggactcgctagtttgtgttcgataagtgaactcttaggaagccagctttctcttaagtacaagcgatggtccgggcgcgcaaaaggcgacaggttcccattaagtgcaagcagattggcaaagcccacctcggccttttgcatttcactgctctctcttgatttgaggagactgtgggggaggggctgccctagggctatagtgaccagccgcgttgcagagtgctcagattttagggactgacgttttacctggaggaaaagactccataattcggctgcattctttttcaataccaactaagatgcagataaaaagtgttttgtgtgcaggccaaggggattttatgtgcaacccaagacttaaagccatagaatgttgaaaaaaccatcttgaagggttgatgatgtgaccaaatagctgagattctctattcctttaggtcggggtatgagaaccctttccgtattatagagatgattggaaaaaatattactttttacataattcttaaatgaaaagccattttaatgtgactattaagagtctgttttatttacatttttattgtatatatttgaagtgcacatgttttgatatacatggtgaaatgattactacagtgaaacaacatatccatctattcacgttgttacctttaacattcacattgctaggtttaacttaacattttaacaaagtttgcacttactgtccatttagacttctcatgagctcattttaattctccactaaagacagaaattacagcmtgcagaaaagttgtccatsatgatgggaataacagcatggaccttgaggaagtcattataattcttatagtcccctcttagggtgttatttcgaatctaaaaacagtgaatgaaagggagaaattgatgagcacatacttactggggattcagctctgctgcagagattgacttagctatctggctatgagaactacttctgtttagaaacattgtttttaaatttgtggctatggtgatatgtggtggctgttttgcaggaagaccagggaatttatcagagcaaagttcgggagctgatcagtgacaaccaataccggctgattgtcaatgtgaatgacctgcgcaggaaaaacgagaagagggctaaccggtgagaggcaaggggatatactggctgtcagtgagaatggctcccttccctcttggccagattggaacagcctctcaggagaggacttgtatgaaacaggattgatctacaagccctcgtagctcacctgcacctatttttttttttttttcaaaaagtgggtggttggcattttcctcccaaatgcccctccttccaatgtttagctgaatatcatttttatatctttgataagttgaggtgaagttggtccttagttctggtattttactgagtcttataggatggtgttttactgagacttataggagaaagcagaagctggattttctcattgtttttaatgatctaagaatgtctgctgttttgaggatccatttttttgagttctgcccwgtctaatttttctttctcttgcttatgtacaggcttctgaacaatgcctttgaggagctggttgccttccagmgggccttaaaggattttgtggcctccattgatgctacctatgccaagcagtatgaggagttctacgtaggactggaaggcrgctttggctccaagcacgtctccccgcggactcttacctcctgcttcctcagctgtgtggtctgtgtggagggcattgtcactaaatgtaagtgggttaaagggggccgcttaggaaatgaatagacagggagatggggaaagcaggagaggcaaagtagatctgggtagcttgyggcttcaaagaggtggagcattggaattacgtggtaaaacttggagggctcagtgtgtacaatgattgggggaccttgagtaatcacatgtrttagtagaatgatgaattctgctgagagctggaggagtcttggttcctggcaatctctaattccaacctctaactccacctatttattagttgggattggtggtacttaaaattttacatggatatggtggtggtctatatataaataaaaaagtgaataaaaggtaatattgaaatatcgtaacctagtcaaaaaaacacagtatttggagtcattataggcttgcatatgtttgggttccacctgtatcatcgtctagttgggtgagtttatatatgcacattttccatccctaggttctctagttcgtcccaaagtcgtccgcagtgtccactactgtcctgctactaagaagaccatagagcgacgttattctgatctcaccaccctggtggcctttccctccagctctgtctatcctaccaaggtaagggggataaatcagttgagctgtcttggaggttggaatcaaagatacctgttttaaggcaaggaattgtgtaatatctgaagtcttttttctgtaaagggtgaaaaataaggattaatccaaaggaaagattgattgcaggccagagtttaatatgaaaagcccacaattcttatttatttatttatttatttttaaagatgaggttctcctatgttgcctaagttggagtgcagtgggtatttgcaggtgcagtcatggtgcactaaatttgcaaactccggggctcaagtgatcctcccaagtagttgggattgcaggcatgtgctacgccacctggcttcacaattcttatttttttttttagagacgggatctgtctctctcaggctggagtgcagtggtgccattatagaacactgcagcctgaaactcctggactcaacgaatcttctcaccttagcctcctgagtacctgggattataggcatgcaccaccaggtccgctaattttttttttcacttttttctagagacagggtctcgctatgttgcccaggctggactkgaagtcgtggcctcaagtgatcctcctgcttccatcttccaaagtattgagattacagacatgaaccaccatgcccagccacaactcttattatttttttaagaaaacacttgttcattttagaaaattaaggaatagtcaaaagaagaagtcatctacatagatgttttaacaacgttataattttagaatctgctttttaaaaagtagaaaaataatgctagactgttatgtaatctttacaaatattttgttgcgggtttgggagcaggttggcataggaaaatgctttcttcttggtgttcagattgatctggattgaggacaatgcaaggttttcctctggagacaaaagatcatttatatggattacttgatgtctgaactgattctatcaaacaattcctctcctcccctcatcaaattttaattgagaactactgtattcaaagcactattaggcgctatggaggacaaggatataaataagacccagtcctcgtcattagtcttcacagtggtggagaaatgaaacataaacaaaaacgaatgaatatcttagaattataacttaaacatactttagcatcatttagtctacctccagatgaaatgctgagatcagagaagttaaacaatttgcttacggtcccagttagtgatggccttaaggactaggacctgtgtctctttaattcatgccagttgtattttctaagtcattctgttgtcttcttcggaccttaagatctccacttttttagaatttcctcttcaggaagtacttgggaagtactcttctgttgattactgtggscaagcttctttacttgaaaagtgaaatacattggaccagatcttctggaggttgtctatggtgatgcttaagagcgtgggctttggagttaacacctgtatcaagtcaagactctgctacttaactgtgtgacctgggggaacttacttaatctctcctagtctcctggtttccttgkgcatgacgtgtgaaaataccttctttacaaagttgttgtgataattacatgagataattttgtgaagtaatagcacagtgcctggcacatagcaaacactcaataagtgacaactgtgtttttagaaaattcaaatgtgaaggaagtaaaactttaatatacgtacaggaaagctcacataagtgtatagcttgatgaatttttacaagctgagtacacctgtgtaaccagctccaaatgaggaaatattagcacacagaagtccctcttgagggctcatgttacctaggggtaaccactatcctgatgtctaacagtatggattactttcagctgttttttatttaaatacttatgggctttttatgctcaacattgtgtttatgagatttatccatgttgtgtataggtgtgtttcatacatttttattgctgkatagtattcatttatgtgaatataccgtgtttaaccattacactattgatggcatttttacactttaaaatttttgactactaggcataatgttgctatgagcattacaatgcatggctttgggtgaatgtttctgttgggtattacctaggagtggaaaaactgcttcagaatgtaagcatatattcagctttagaggggaagtaagaatcttaatttagatgttaatataaccatagtccattcagactatgggttgccccttccattcgatggttgttactaaaacagacaggaacacaaaaagctagagaaggtacttggctttttttgttactgaataataaaattttatgaagtcatcttatttgccatgacaggtgagtgtggcatttttaagacaggacrgagatcactctgtccctctgtgtgcctttttctaggatgaggagaacaatccccttgagacagaatatggcctttctgtctacaaggatcaccagaccatcaccatccaggagatgccggagaaggccccagccggccagctccccmgctctgtggacgtcattctggatgatgacttggtggataaagcgaagcctggtgaccgggttcargtggtgggaacctaccgttgccttcctggaaagaagggaggctacacctctgggaccttcaggtaaagggtctgccttaaagtayatggaatgctgttgacagcttccatttctggtaatatcctttctccagtttgccntattccagagagttatatctgataggtggagcactctacctgcctgggagacaggataccttcaatacctcttttctatcagataaagctggtratacttaaccatcatatgccaaaaatgagagttattggtgacaatgattacagcctcatggctttcctgggagtttctcatttaattacacttcgtccccatacacagttctgtctgaagttctgtgggtcaattccagaggtggggcatgatcagcatatttggatcacagacagaaccagttgtttaattcacaatagctacctgcyccctccccaccaactctaattggctggtctagtttggcagcctaaaaaggcttactcctgctaggggtactagctactgatgttaggaattgaatataacgggtttcctctttattctgnttgtcccaggactgtcctgattgcctgtaatgttaagcagatgagcaaggatgctcagccctctttctctgctgaggwtatagccaagatcaagaagytcagtaaaacccgatccaaggtctgggcatcctttagaaatttgagggtgggaatggatttctaagagttgtgttttggtgcatggctatwtttgtactagatcagaaggaagggttgaggtttggtgttagctttttctatttttgtctcaatcaacaaatgaagggtgtttttgctgtttgttctttagtaattctgttgttattaaacaattttaatacctgctacctgctgggctgctaaatgagcctagtacaaatattaggataggtgttaacttgcccgtgtaccagtaagtctatttattactgaaggcgttagtgatgcattactacttaaacattttttctttgttttagttctccaacttgtttttatctttttaagataggatgtatatccacatttagaattgaactacatatatgaatgtgtgatgataaaggttactgttcaagcacagtacatgttcttattaaacctaaaatgttttgaacctggggatacttttttcccttaaagattaaacctctaaacaagttttggaatccaggctgctctgtgcctactctgataatggcctgatagtgtaatttgtcttagaaaataattttttgcagttaggaacaatgtacctgtttgtgtgtttcttyaagtattttctttttttttttttttttttttttttttggtgagacggaatcttgctctgtgaccgaggctggagtgcaatggtgcgatctctgctcactgcaacctccgcctcttgggtttaagtgattctcctgcctcagcctcccaagtagctgggattacaggcgcacaccaccacgcctggctaattttttgtatttttagtagagatggggtttcaccatgttggccaggctggtctcgaactcctgacctcgtgatctgcctgcctcggcctcccaaagtgctaggattacagacctgagccactgcgcctggccctyttcaagtattttctataggccaaagtatataaagtggagctccacaaagtcccattgaatctcactaggcttgccattggttatttctcctgtaggatatctttgaccagctggccaagtcattggccccaagtatccatgggcatgactatgtcaagaaagcaatcctctgcttgctcttrggaggggtggaacgagacctagaaaatggcagccacatccgtggggacatcaatattcttctaataggtacgatgttggggatttgctttagactgttgttctgatggagtggttgtggagacctataatatgtaagattgtatattctgtacttagcagtatttcagtcctatcaaaggacaaaaggctaaaatgaatcttttttttttttgtcatctctggaattcctgatttatagtatataaatattcttccgtgagtggtgaagggaaaagcgaaggaaaaatattaaaatccacttactgtntgactctgttgtgtcaagagctgtgctagaaaggcagaatttgctgggggtgctggggagtttcctagagagtcatcactgcccccaccctacaggagacccatccgttgccaagtctcagcttctgcggtatgtgctttgcactgcaccccgagctatccccaccactggccggggctcctctggagtgggtctgacggctgctgtcaccacagaccaggaaacaggtaagggtgtaagggtccttggcaaaggcccagcagagagcctgagcatagatcctttgtgtgccctggcttgtgttctgaagatacagctgataggttagttgggtccagattatagaggactgagtaytcagcaatggtgggtgaattatttaagtctttggtgttcatctatttacaggaatgttttcgatwtaaaggattaagtcttagcacattagaaaggaaataaaaatgaagattgtactattttatgaactagaggaagggatttggagaccagtgaagagaaggcagaggtctagttggggtattacttgaggttgaggccgaagagagaatctatgaaggaratttgtgagaagctagttacttaggggtcaaagtgggacaaagagatactattaatatttagattagagctgaaaaggtgacccaccagggtttcctctaagtttctcggagccaacacaccattgccgcattctcacgtgcaaagtgagagattcctaggaaggagattgaaatccttcccttctggcccctataacctrgactgtagcacgtatttttaccttctcacttcccaggagagcgccgtctggaagcaggggccatggtcctggctgaccgaggcgtggtttgcattgatgaatttgacaaaatgtctgacatggatcgcacagccatccatgaagtgatggagcagggtcgagtgaccattgccaaggctggcatccatgctcggctgaatgcccgctgcagtgttttggcagctgccaaccctgtctacggcagggtaagtggaatcaggccccaaccattgtcctcaccttcatttggttttgctgactaactgggctgagaagtgtattctaggtgacccaggggaataataggccaaagactaaaagtaaggccattttcttgttattgtcctttgtttagagcagtgttcctcacccattcctgcacagcagaatcccctggaaagttccttatttaaaagtaactttttaacagtacagttaaacagtccatttaacatatttaaccgtccattaaataaaaggactacatgcatgtggcgggagaatttctaaacagaacaggtatatagtatgaaaacgaaaagacttgcttctctctcctgtcactttgccaagaaataacagcttcgaagtgttgcaggaaacaaaactttaagcatgtaccagcaaatacactatttccttgttaagaattatctctgtttttaccatgactgtgatgtgctagatataatcttttatatttgtctgtgcgtggggtttgttgagtttttccttttaaaaaaatagatttctagtattccgtcacagggatgtatttaactagtctccatctgatgggtatttagtggtttccattttttcctccctattttgaatgaagctgtagtggccatccctttatgtgtgtggatagatttgggaatatatctgtagtataaatacctagcaaggaaattactggattaagagttatgtgcatttttcttttggtagagattgcaaaattaccctctttaaagattgtaccatattaatacttctattaatgaatgctcataaatgctttgtatttaccaactccttttatcctatcagtaactacctcacaatgtgtagttatctttattttacagatgagaaaatggaggtacaaaagattatgtaacttgctcaagagccacaaacttgaaaatcgcagagccaggatttgagcccagagctcatgctgtgtcctggcagtttataatcaatcccacagtgtatgggaacaccttgttgcgatgcgatggtgttttttatacatacagttgcatggtcccccgttcagagtttctgaattaaaatctcttgagttggagctcttggtagctatggtttagargggctccacaggtttggttttaatgtgtagccaaggttgaaaaccatagcttttaaaattaatgatagggctgggcgcagtgtctcatgcctgtaatcctagcactttgggaggctgaggtgggaggatcacttgagcctaggagtttgagaccaacctaggcaatatagtgagacctcatctttaaaagtaaaataaaataaaataaatgataatgtatgtttatgtcattctcaagagtgattgggaaatacaagaaaaatggcaggacctgaaacgtgaacatggtcaaaatcattattacctaaaggttgttatgttctctgactgtgaagtgtatgtggatgggtaagtatcagtccagtaggcccagaattgaaaggagagtattggggtttttgaatcccaaggaaaaactcccttgattttttttttttttttctgagacatagtcttaccctgccacccaagctggagtacagtggagtgatcctggctcactgcagcctcgacctccctgggctcaggtgatcctcccacctcagccacttgagtagcttggactacagatgcgtaccaccatgcctggcaaatttttttttctttttaagtttttatagggacagggttttgcatgttgcccaggctggtctcgaactcctgggctcaagcagtccacctgcctcagactcccaaagtgctgggattacaggtgtgagtggatgtgcctggccagtttctaagatgttatgatatatagatcattgaccattttagttgaggttttacttgtatcttctgagtaagggactccaaaaagttctaagtgcttgtagcctaaccaacttgccctgtctttatgacaggtaggggaaagggatcatctttcagagtcaggtcctgccttgggaatgagaagagcagaataaggtttgggaagcaggggcctggttttcagacctacactcagcctgttagaggttcctgtagtagaaagtggggcttcctaggaagctcagttaaagaagggttgcaggtagaagagatgatttacattgtttaatggctttaaaacacttccctttttcactgctttttgtctgttttgctctttgaggtcaagcctttcattcccactcccagaactgcagcagccttgttgttctttcttcctattgatgtcatgtccacttctgttgtcctcgcattccccagtatgaccagtataagactccaatggagaacattgggctacaggactcactgctgtcacgatttgacttgctcttcatcatgctggatcagatggatcctgagcaggatcgggagatctcagaccatgtccttcggatgcaccgttacagagcacctggggagcaggatggcgatggtgaggccataagaatagtaagagtaactaatggaaaggcgctaaacagatggtagtttctcaggcccaacccaggtggtggtaggtgtttcagtgtctgggttgatgttgaagagccctcaactgtttagccacctccccttcttgcttagtggagggtatcctaaggtgtgtcttttgtccatttctgggtctgggaataactgagcatcttgtgtgagccaggcagttccactatctttatttgtgggttccatgtgtctgattctttttgggccctttctttatgaatcttggtgtctccccttcttgtsctatagaagaagcaatttcccctgggttaaactctttattactctcytttctcctaacttgggtataccagctatgcccttgggtagtgctgtggatatcctggccacagatgatcccaactttagccaggaagatcagcaggacacccagatttatgagaagcatgacaaccttctacatgggaccaagaagaaaaagtgagcattctcataactcttcctcaagggaacctgaaatatgtgttatattagagcatgtgtatatctaagcttagctaaggccttatatgcccaggtcaaagccatgcctggagtcataaccacgtggattaattttcttcttttctgggtccacaatatatcctttatcctggccagttgccttgtaaatgtttaggtgattcagcgcaggttcaggtcttttcttaaaatagagttttgatgatacgcctgatggtgggtgtgccttatatatgaaagatggcaagtgtcatgtagccatttgtgatgaagggtcagcagatagcaaacatttgagactttgtaggtagacttggtgaaggagacgtgtgatcaggtgctcaaagcatgaaatgtgggatcttacacctatttttggccatgatgcagtaagaagcatagcataatcttcaaagctgttggtttaagaatgtagaatttggagtcagaaaacttttagtcaacttkagcttctctgagctgtagttttcccacctacaaaatagagcaaataatacctaaactttctrcctaaactacctaacttacaaataatacctgtaataattaaataaaaatatgtgaaagagtcttgtctatgttccatataaatgggagttatgataatgggttctaggctttgttttgaccctggcttttctgagaggcaaagccactaatccaggcaggtggtaaggtgtggcagggagatggaattcactgtgtgtggctccagggagaagatggtgagtgcagcattcatgaagaagtacatccatgtggccaaaatcatcaagcctgtcctgacacaggagtcggccacctacattgcagaagagtattcacgcctgcgcagccaggatagcatgagctcagacaccgccagggtgagtgcctgggggagcctaggcttggggtcccttaggtatatggctgggcaggagtccctgctatctgggagctttgaaagcattttaacttagtgacttttttcytggtctgaagggcttcctgttatacaattttaatcatttccttttataaaggaaaatgaaataaggaccccagagataacatgtctcttattagttaaaatgacattggcctccagaagctgtgattcattcagcaaacataggagtgacttctgggaagtgacctagtctttcctcttacaagcaatgtaaaattaataaacactcttttcaaagagctcagatccggagcgggggaagcacaaaggtagatagaaagacttccgtacatatttataaatatttaccccagtgtggtacttacaaaggaatgaacgtgaaaggctatttgagcatagacgaataaactgttaatttcttttagacttccctgaaggggtatgaatgtcaaggaaggattcccagagagtatgatatttggactggactttgaaaaaatgactaacaggcaaccatgatggttattcaaagcaatttctggtaacctaatataggtgtccatgaatttgtctaaatcttttttttgttttgtttttgtttttgttttggtgagacagagtttcactcttgttggctaggctggagtgcaatggcgcgatctcagctcactgcaatctccacctccctggttcaagcgattgttctgcctcagcctcctgagtagctgggattacaggcatgcaccactacacccggctaattttgtgtttttaatagagaccaggtttctccatgttggtcaggctgctctggaacttcctacctcaggtgatccgcccggcttggcctcccaaagtgctgggattacaggtgtgagccaccatgcccggcccaaatttgtctaaatcttttaggggcagtgtagttcacataggattttacagcagaaagacccaagtccagaactcttattatgttacatagacatagattcttggattagacatgatcccagatcatctactcaagcctcacccactctgtcttttcaaatccctgctgggactttttttttgagatgcggtcttgctgtgttacccaggctggagtgcagtggcatggtctgggctcactgcaacctccgcctcccgggtaggtgggactacaggtgcgtgccaccatgcccggctaattttgtatttttagtagagacggggtttcactgtgttgaccaggctggtctcaatctcctgacctcgtgatccgyccatctcggcctkccaaagtgctgggattataggcatgagcccggccgggacttcttaatamccccagtgacagcatgcgcagagcatcactgttttgaaattttagaatatttattaagcttaaacctattttcccacaacttttacctgtgggtgttagtcttgttttctggaggttgtgtrtcgcctgtcttcctcattaaacagcttactttctttttaactgttcctttccacatgcgaacttctggtgtgtcccaggccctctcattgaacctagamctgagcrtcatacactattttaattgtcttagtgtggggtctgtaagtgaattccaagagaatttggattctctaggtctgctagtgcaggccaggatttcaccagctttttaggtggtttaagaattagaacttgtcatggagtgtatgacttccaaactccggtagctttctaaattattacaagatttgatgaatgaatttaaatgtgaatgtatttatttttgaatgtcattgtggatatacatggtaatttaggaaacttgaaacaagaagtgaccaggatacgtcagtgatggggtcatataatgggagacccgggaggtgtgacagaaggaagtagtttctttttttttctttttttttttttttttgagatggaatctcgctctgttgcccaggctggagtgcagtggcatgatcttggctcactgcaacctctgcctcccgggttcaagctattctcctgcctcagcctcctgagtagctgggattacaggcatgcrccaccacaccgggctaatttttcttttgtatttttaatagagatggggtttcaccatgttggtcaggctggtctcaagctcctgaccttgtgatccgcctgccttggcctcccaaagtgctaggattacagatgtgagccaccacgtccgggctggaagtagtttcatgtctgatcccagctctgcagctagcttttggactgtggacaaatcctttcacctgtcaggtcagctttcttatccataaaatgagaggattggatacatcagaatcacctgaaacttgtacacatatctagtcctaaacactgagatttctgattcattcatttccaattcattctgattgattaggtcaagaaaggccattcagacaatagcattttaaaagataaaggcatcccagtttggtattcatcggcccctgtgagaaacatttgttaggaatgtgtcagagttctccttctccggactgagtttactgaagttacgtwtttgtcctcagattacttctttcctatccctcctttagtgtgactttggaaaatctccttgaaggtctttgagtcccatttccttcatgtataaaacttctccaagttattaagagggtgaaatgacagaatgtatataaaggcaaacttcctgctgcattgcaggcctgcaatcactgatgatttttctcccttctcttttctacgctgtagctttttatctttccagttgttagatgcctaatcttccctgttcacttgctcctccttcctgcaacactcttgtgtatatttccttgatcattgctatcatctttctcatttttatatggtatctgtagagaacacagaactctgaattctttgcttgggcctcctggggcttttctggtagtgtcatttccctttctgtgcagtaggattgatgggcatgcctaaaagacttgggataagcaatcctcccttttcttccctagacatctccagttacagcccgaacactggaaactctgattcgactggccacagcccatgcgaaggcccgcatgagcaagactgtggacctgcaggatgcagaggaagctgtggagttggtccagtatgcttactttaagaaggtgaggattcagatgcctgggcatgagaggatctcctggatatattacagatgcatgggcttcccagccttccgtggctgacggctacatttggattgtcaacagaaagcagtatttgtcttccagtcatcagtctgcctcactctttcctctgaaacactcagtgattctcaaccctgactgcaccagagaatcagatggaaagctttaaaatgctgattccagggctcctagagattctggtttagttgatgtgctgtactttcagttagctgcttctctgtctacccctacttcctttgcatcttaaaaaaaaaagtaggtgttttcaaaagagctaccttggtaatcttccttgtcccactctacctttcctcttggtagtctcttcaaatgtcccattggcacctcagaagctcatgtttaaagttgaactctcaaacttgccactcatcctgtttccctatttctgtttgtgacattgcacctctgtcattttagatatcaagcctcaaagcctagactcccttttcctagttgcccactcccaccccagtctggtgaatgttagccttttggggttgagttgtgagtctaataaactcttccttgctttttgctaggttaagggttgagttgtgagtctgataaactcgtcctcactttttgctaggttaagggttgagttgtaagtctgataaactcttcctygctttttgctaggttaagggttgagttgtgagtctgataaactcttcctcgctttttgctaggttaagggttgtcttggatttcaattagacacctgatttataaggaaatggattgttttcacttaaccattatgggctagacatttgtttctttattcagtaaacatttattgagtacctactatataaacagcatttaacatacttcccagcattttgaaaagatgggtagcagtctctacttctgcccctggtcctgggacttagggacaagaggagctaggtaaaccattggaaacatggaagtctttcctgcttatgatgcagaagggactgggagttcttgawgcagttcccctgcatcagtgacccctctagcccagccacacttgccttggtcttaggttctggagaaggagaagaaacgtaagaagcgaagtgaggatgaatcagagacagaagatgaagaggagaaaagccaagaggaccaggagcagaagaggaagaggtaaggtggggcaagcaaatgrgattaaaaagttagtggccaagaagttgggggtgcacgcctgtaatcttagcaatttgggaggccgaggcgggtgggtcacttgagtccaggagtttgagaccagcctgggaaatatggcaaaactgtctctacaaaaaatagaaaaattagctgggcgtggtggcggacacttgtggtcccagctgctcggtaggctggggtcggaggattgcttgagcctgggaggcagaggttgcagtgaaccaggatcgtgccactgcactccagcctgggcgacagagagagatcccatctcaaaaaaaaaaaaaaaaagtagtaagttccagtgggactggggagagaagtagagggtagaaggtggaaccagcgctgcttattgatgtcaggttgttcatggagagtgttcctagacctgcggggtttgaggatgaagataacctgggtaggctgggcgcggtggctcacgcctgtaatcccagcactttgggaggccgaggcaggcggatcacgaggtcaggagatcaagaccatcctggctaacagtgaaaccctgtctctactaaaaatacaaaaaattaggctggcgtggtggcaggcgcctgtagtcccagctacttgggaggctgaggcaggagaatggcgtgaacccaggaggcagagcttgcagtgagtggagatcacaccactgcactccagcctgggtgacagagtgagactccgtccgtctcaaaaaaaaaaaaaaaaaaaaaaaagaagataccctgggtaaaagagaaggagagcgagtccttcttgtgtgcttttgacccctctactgaagaaatgctaaatagtaggaacagcaacccaaccactgagggttttgaatatatacttcaaaattctaagggaaaaaccttcatgcttatagttgaatttataagggtgagtgatgtggaaaagagcgttgggaagcagcgcctgtttgtgttctagtctggggacttggtctcgtttggaacaagcagcagtttgcaaaggcctaagcctagtgcttcactttgacttagtggttctgtttccttttctccgtagttagaggcacgtgntggggcttccttgcctttctgtctccaaactctttctctctcttaactgctgtgggtattttagaaggaagactcgccagccagatgccaaagatggggattcatacgacccctatgacttcagtgacacagaggaggaaatgcctcaaggtgagtgagcccacttactgatgaaagaggttgttcctgtgactcttggacttttccagttgctctgtgcactttattttcttgtggactcctgtttgtttggctccctgcttggggcctatgtccaagaggtttgtcccaagagagcttcaggrgaaactttggaaaaagctttgctatattatatacacctccttgatgaactgtgctgtgctgtttcacctggtataagcatttcagataatatatacattgagggtctcctgcctgactaaattccttcatcatccaatgaagatttccctatatcctaattgttctgcctggccccataagaaccctaggaaataggagtgttcagcaggctgagtgagagattgggagtggagatgatttctctagtgtttgtggaaatggcttcaccttgcttatcttccccatctctrcaaccatcaaccctctgaagtacacactccaaagacggcagactcacaggagaccaaggaatcccagaaagtggagttgagtgaatccaggtgagtacggatgttgctcctgccccttcaagaattctgtgtatcgctgaggaagggactttgttcccttggagagggtgggaaacaaactgctggtcatcaatagaactcaaaactagaggcctgcrgcttttaacattttatattctcatttaatttcaaacttactgaaaagttatgagaaaagcatgaagaacttctggatgtcctttacccagaatcttcagttgtttaaattaataattctctctttctgagagagaagagttttacaataaggataaaacttaatgtcttactgtaacctcagattcttcttggtgggwtagatacattttggccatttgtttttgaaatgaagaatttttaccaccagggttttaggaaacatttttatctatgaattttgtttactggacaccaagaaactccatagccaagttttacgttttttctttttatactttaaacacataatacartgtatttactgaaaaaaatttgaaacacattgaaaagtatttagaaaaaaaattaaaatcaattgtaactctatccctmaaggacaaccatcaactgtatcttaaaatgcttgaatcagctcgtatagatctcacttttttttttgagaccggagtgcagtgtttattttttacttttttacagtgtttattttttactttttgtagagacgggatctcaccatgttgcccaggctggtcttggactcctggcctcaagcagtccttctacctgagcctcccaaaaggctgggattacaggcataagccactgtgcttgtttgatctcattctttttaatgactgcagggtttccatggtatggatgggtaaaaatttaatgaaattctctgatgatagacatttgggttgttccctgtttacagtaaaacagtattaaatttatcagtgtgcactcatgcaagtatagctataaggtgagttcctagaaatgggctccctgggccaaaggatatacgcttttaaggktttagtaagtgctgttaaattgtcccgcattgacgctgaccgggttactattttacagtgaatgggaatgccartttcccacacgctagtacaatagtttagctttaaagggggctcctcaagggtagcactgccatcagaggcagatgtgtgtgtgagaaagaatattgaggggacgcctctactgtattaatantatggattttcctagtatagctgtttcctgagagcatttgggtttgtttactcctcttccccctttcttctgtctggggcaggttgaaggcattcaaggtggccctcttggatgtgttccgggaagctcatgcgcagtcaatcggcatgaatcgcctcacagaatccatcaacygggacagcnaagagcccttctcttcagttgagatccaggctgctctgagcaagatgcaggatgacaatcaggtcatggtgtctgagggcatcatcttcctcatctgaggaggcctcgtctctgaacttgggttgtgccgagagagtttgttctgtgtttcccaccctctccctgacccaagtctttgcctctactcccttaacagtgttgaattcaactgaaggcgaggaatgttggtgatgaagctgagttcaggactcggtggaccctttgggaatgggtcatgaaagctgccatggggtgaggaaagaggagacagtgggagaggacaatgactattgcatcttcattgcaaaagcactggctcatccgccctacttcccatcccacacaaacccaattgtaaataacatatgacttctgagtacttttgggggcacaactgttttctgtttkctgtttttttgttttgttttttttctccagagcactttggtctagactaggctttgggtggttccaattggtggagagaagctctgagkcacgtcatgcaggtcaagaaagctttctttgcagtagcaccagttaaggtgaatatgtattgtatcacaaaacaaacccaatatccagatgaatatccgagatgttgaataaacttagccatttcgtacacatggtcttaatagtcatagtgtgttttttatacataacattgaattgttttccttgagagcaatcgtgcagggtttgctgctcccgcatttgcagcaaactaccacaaggtggcagcagcctgctgtgatctctgggggtcatgtcttctctagaggcagttttcttcttcagcagcaccagcgtttatcagtcaaaattgatagtatagaccaaaccctgccaatttaaaatagctaaatggccacgggaggctagtgagtaaaagttcaggagaagaattgcccctctgcctggcgctttttgcctgaatctaaacttacccttcataaagatagaatacctgatacgtcagacacctcaaaatcctgggagttcttgcccataatgagatcttgttacagtatctttttttttttttttttttttttttttgagacagggtctcgctttgtgcccagactagagtgcagtggtacaatcacagctgatgacagccttgacctcctgggctcaagtgatcctcctgcctcagcctccctagtagctgagaccacagacaygtgccatcatgcccagctaagtttttatttttaatttttagtagagatgaggtctgtctgttgcccaggctggccttgaactcctggactcaagtgattctcccatctcggcctcctaaactgtgagattataggtgtgagccactgtgcccagcctacaggatgcttttgaaactacctgggtgtccactctttggggttggttagcctgtttgcacagaagcttgtgatggggccagggcgggacttctgtcctaccgttatatggtttgaatagcttctgaagaatttttcaagttacttagaagaatcatgtgactttatggggggcctyggtcacatggaccggaagctgctttctggtggcagatgtggctctgaagttgtgccagttcttggctgtaagattgctgaggtactttcttttccatttttgctgaggggtgatcctttaccacaaagcaggagatattctttggttcgttaggacaaagggatttttttcttaaagggagtagtacaaaattattggggaattctgttttatctgggatttttttttccccctcactgatgcgagcgagatctaagtcctactggaagtggtctagagagcacagtttcaaaagagagtgcagtggtaccagaaggaagaatttgccatttgttgagcattggcaataagtcagaagttgtgctaggtatagcagtgggtgcaaaagtggcgctttctgctctgaggcttctaggctggggatatgtcaatatgttggtgaaaatttcaaaatataaagtgtacagctgggcacggtggctcatgcctgtaatctcagcactttgggaggctgaggcaggcggattgcttgagtccaggagtttaaggccagcctgggcaacatggcgagaccctgtctttattaaaaaaaaaattaagtatgattatataccaaatgagggcacacacagagatataggaatccagggaggaccatgaggatgtcaggtgctactgatggggtacagctatgaagaacagttctaggagttcttagggatctcctcaagtgatttgttctagaaaggcaaacattctgtcaatgggactcttagtctgtccttcacctctgaggaaactgaggcacagagtggggggatatgtgcacctaccattgtgataatagctgtaatatcaggttgactttgctgaccatttcatcactcttcaagctagtcaaaagaatagtaggtagaagactatatagcagccacaatagatactaattgtattaaaatagcatgattcaacctttacattgagttttaagaaacttgtttatgtagttcccagcttacaagaacagaaaagagctggtaagcttttccaggataggttcttgcttgttgacaggtgatccactgcaggacctactgtggggacctgaaagaggctgctcaagtgggctgacatgtctcaagkccagtcacccctgagggtatcgctgttgccaccctgcagagattgcagtggtgacccagattcaccagagaaaaccgctaaattatctgcgtgcctcattccaaaagagaagtctgtttacatttaggtttgtggtctgaaatactgtagttaaaataatttggggagcttagagaagtaagtttttgtatcttgaaaaatggcaccttattccttaactcccctggataaatgaagtggcaaaatgaaagggtggttttcaaaaaggacaatttggtaaggattgttgaaattgaatctcttctccgccatttaccgaataacttcaggtaagttttatgctactctttatttcagctgtaaaatggggatgattcctgccttgtaggatgcttgtgaaacataattgggaaagcagatggcaggttcccacctggtgtattactacttcatggcagtggttttgattactgcaagttcgagggcccattaaaacaaagtgattcattttgacaaatgtttatgaaacatgatcctttaatcaaaaccatttacaatgatttcaccctggctgcattcctgaactctcatctcttccctgcctttccactctctgatggttcccacattccggtcagtgtggctctgaggcaagcacttcccccagagaggaccctctcggcgctagctcggcaatgcatttttcagctttctcctgaggacagtgttacctcacaacagggccgggtggtaggaaaacatcaagggggataaagaggagaaaggttcacagaaacgagtgaatctgccagccctctctttctcatgtctcctgaggagatttcagactacaccagttgtcctaatgattctgagcttgtgaagtgagctctgcctggagggtttggtcagtagaatatggcaagcacaagagtcacctgtgtgctggctgcctcaggtgctcagccctaacaagctctgtgcaagctctttcccttccttgccatcctttcctttccccacttctcaagagccaggtaacgccatgtctgctgtacatgtagggaagtggggagggtggagcgttaaactctggttgcataggaaatctcacctgagagccaaaaggttggcagggtgacatgagccctgcactggtaagcaaaggcatgtgcatctgagttccttttctgacactaggtaccagagttaacatgccaagctaggctggccacttagaggaaagtgcatggtttctacatctggaaaaggaggtggttgaactacgtgatttctgaggtcccttctggtaatgaatgtgattttctttctttctttttgaaattgagatagagtcttgctctgtagcccaagctggagtgcagtggtacaaacatggctcactgcagcctcaacctcctgggctcaagtgatcttccttcttgagcctcctgagtggctgggaccacaggtgcacatcactctgcccagctaatttttacattttttgtaaggacggtgttgatgttgcccaggctggtctcgaactcctgagctcaagtgagcttcccgcctcagcctcccaaagtgttgggattataggcatgagccaccatgcctggctatgattttctttacattcagtgccagttccacccacaagacgttagcactggcaccacttgataaaacctgggttggactgcttggagaggcaggtcagaatgagttgttggtcaccatgttaaatatgccttttagggacagtgatttctatgcttccttattttgtggatagtgtcccaggatgttgccagctatttcaagagattttattgaatttctagaaacactttttttttttttttttgacacagtctcactttgtctcccaggctggagtgtagtggcatgatcttggctcttgggttcaactgattctcctgcctcagcctcccaagtaactgggattacaggcgcttgccagcatgtctggctactttttgtatttttagtagagatgggggtttcaccatgttggccaggctggtcccgagctcctgacctcaggtgatccgctcgccttggcctcccaaagtgctgggattacaggcatgagctgctgcacctggccatcctagaaacactttagaacaaaattaattttaactccattttaaattcctgaaaagtaaacctggtttactttctttttcaggtctggcgccttagtgatatgtcttggattctggctggtccgttattaaccagcatgtaatcctagctcattctcttcagtctttttgtgaatatttttactgttaagttctaagtattttcccacagcctgtagggggatattagcctctgctgagatttaccattctgataatagttctcccagcaggtayattttgtagcaagctaaaccttcctagcttgaagtaccactatttaaccttgcaatagaaaggtcagctcctgtaatcttgcgtatgtgtgctgtgctgcttttctagtaatttcagtgcatgtagtcctgaataggaaccacaataaaacctgataaaaacctccaaaaacaaaagtgtgtggttattttttttttctctttgagacagtcttgctctgtcgtccaggctggagggtgcaaacacggctcactgcagcctcaaactcctgggcttaagcaatctttccacctcagcctcccagacagctgggactaccatgcctggctgatttttaaatcttttgtagagatgggggtctctatgttgcccgggctggtctggagttcctggcctcaaacaatcctccaacctcagcctcccaaagtgctggcattacaggcatgagtcactgcacctggcctatttaaagaaaatattactacgaatataacatggaatattcaggaagctagagaataaaaattaccttactaccctaatataactactataactcaatttggtgaatcttaaaaccagttttaagagtgacacttcatagtatatccaatttgtataagcaagtttcagattaggcacttgagattaacaaactggtttaggaatttagggacaaaaaatgtttttgaaactgaacttaaaagtcagatgtttgaaaatctgattgcaggagaaaggcaaatgttgacaggtcacatttaaccctaagggagaataaaaagctgagaaaattagagtttaacatagggatgatgtatataggttctaaactcccaaccaaactttggctcccaggcacaactttatgtactcgtgtgtggggcagatgagaagcgacggccctgctgctatatactaggcaccatataaattataataattaaatcttccactctgtgacgtggattttattgtctcaattttatagagaaggaaataggcctagaaagattagataatttgcccagggtctcagagctagaatgtggagatcctactggcactcttgattcttaactatggttttttttttttttttttgagacagagttttgctcttgttgcccaggctggattgcaatggcacgatctctgcttgccacaacctctgcctcccaggttcaagtgattctcctgcctcagcctcctgactagctgggattacaggcatgcgccaccacgcctggctaattttgtatttttaatagagacagggtttctctatgttagtcaggctggtcgtgaactcccaacctcagatgatccacccaccttggcctcccaaagtgttgggattacaggcatgagccaccgcgcccagccaactactatgttctaaccagcatactgtgtgctcccttcaaaggrctgggagtgctctggggagctggaggtggtcagagctacatctatgagtgaatctcgtggatgggatgacagaattctagtgtgacgaggcgtgtgggtactggcattcagagatgaagtggaagacc

SEQ ID NO: 95062 - DNA, 26773 bp, Homo sapiens
  misc_feature (1)...(26773): n = A,T,C or G
cacatgtaagcaagtattaaagatacggcattttgcaaataagtaactctttatttgtaaacaaatataaatacatgagacgtgaaaataatcaaggctctcccctgtcatctctgcaaataagtaaaacatttaatctaatctgggaatgaaatagtatagtcctcctctataacctaaatcccttaaaagaattttgattagctcatactgtattttttcaccaaataccacaatcattcaaaagagcttcataggtaatttagcagaatatgcaattgtattcatatctcgtataaatcagtttgatgtccaaagagaatcaaagctacagaagctttaaaattaaaaagtgaattcaatcttagttcattaacaatccactggcatatgaaaaatgaagggggtagaatctgaagacaggaaagatttccatccataaattaacgggcatgctaggtacacccaacaattaacaccatatattacatcaggcctggaagtaaaaatcttgaaagaatagcttgttaacatggcattcttataaaacaataataatactattcatggaaacatctgtgatttaagtttctcaaaaaaagtgttcaaatttcaattcttagaaaagccatgaaaatgtcttaatcagtaacagcaaagttttgaagaagtattgaggatctaatgattaacaaaataaaaaaatgtttataagcaactgtgcaatgtgaataagcttttgcagaaggggggttatggtactgaaatcaaaactgatttacctaaatatgtctgcatattctgccatcgcagtcatgatggcttcttctgccttagagaaaccgattttttttttttttttgagacatatcactctgttgcccaggctggagtgcagtggtgtgatctcagctcacaacctctgcttcccgggttcaagagattctcctgcctcagcctcctgagtagctgggattacaggtgtgagccaccacacctgattaattctttttatagtattagtagagatggggttttgccatgttggccaagctggtcttgaactcctgacctcaagtgatctgcctgcttcggcctcctaaagtggtgggattacaggagtaagccaccacacctagccaaaaactgattttctttattcaatgggtgtgagaactgacaaagggaaacaaaaattaaaaaactattagacatgctaatatgttaattgtacaactccatctaacagtttctctttaattttgcaataacattaagctgtaatcttaatagagttcttatattgcagttcagcaaatttttacatgccatgacttttattcacaactaagtatgaagataaggtctccagaggatctcactctaaagataaaaccaacaaacagtaatattacataaacttcaactgaagataatttgtattaagttaaagaaaagggaattaatactttaacaatctcagcatttttagctaagaattcacatatcctttgaagaaacaattactattccactgtgcatctgagggtatgtcacatagcccatacacataaactaatttaaaagctgttgcaaatcaaattatcatctcatgaagattaaacagtagatatccatttagatttaatcaagcatttagaaaacgcttgatgctaacaaaaattagccagccatggtggcgcccacctgcagtcccagctactcccagctacttgggaggctgaggtgggaggatcacttaagcctgggcaacacagcgaatctctgtctcaaaaaaaaaaaagaaaggaaagaaaagaaaagaaggaagagaaaagaaatggccaacaactttacaaacctataatcacataaaaagttgtaaaacatatgagacatgtggctaaagtcaaagacttcatggaaccatgttatgacttaacaatcacaaaaggaagtcaatttatctctactaaagtgaatataaatattgcaatcattctttttctggcataattatgttttggaactatgtcttctataaaaagcatctgtatacccacctgtcccagttgtgttggctgccaactacaagcatcctctgtccttatttttccaaatcactctactaaaaatactattcacacaatacctgcaaaatagtatttcaatattggttttgccaatcagtcaaaggtacctctccaattttcaagagataagtccaatcctggggttatcagtgagaggaagatttggtattgcgcctagactgtggcaagttcactgtgcccccttcacccagaaacttgcattgaccatacatttactatgtggcaaatacatgtgtcaacttaaaactttgaaagtggaaccagtccatgttgagtatctgtaaaatccaagtgtccaaattcttgtttcaagtttaatttttaaaatctgagtatccaaagtcttgtttcaagtttttaaaacttaaaggtaatatagtaaatttttaggatcttaacatgtctggtatttaaacttagctacgaaaaaattacaatgaaaaaaaggacaccattactgtcaataaatccaaatgatatcttcattttcagaatcacgtcttccactaccttcttcaaacatcacttcctctccactacttcccccagtcctttaggcaaatcagtgattcacaccgccccttccacccaagattcttaaaatgatccactgtgcacgaacgagaaagccccacgatccaagtacattgccctagtgatctttgatgttttaaaaggcacctgtaaaaatgccaaagcccaaaattagatccccaagggctccttttctttcttgaccacacttctctttttcagtgcctccctcaccccttgaggccagacgatttcccatccaacagccctcctccttctagtcaaacctaaatcctgccctccatcaccaccagccccacccggggtgggaggcggataagagggctccgtaagaggagaaccccatgagagggctccagtcccagccccgatcgccctccctcgccctgggaagggaacaccggcccaggtcttgctcctctgactcctcatccccgctgccaaacccagagcatctcttcttccgggtccacattcccgcaggaccttcgatctttttcccccactgcgcagctttcaaaagcccccaagctctgggctcttcaagcctccccctctcgctctctccctctcgttcctcggcctccacttatccctcagccttcaggccctcagttcgacaacctccatttgcttcagattccattccagagctgactatcccggttccctcaaccgtctccccggggcccctccaggtcgcggtccctcggcagcccccggctccatcccagactccccactcacccttggcagcaggcgccccccaagctcccctctcctcagcctcagctcccgctcacctccgcggtccgagtcgggctccccggacccacctccgagtcggcgtccgagccgccgtcggagtccggggccctccccgcctcgccggagtgaagcgcctcaagcggcgggggcggagcccggggcggggagccggagtggaggcgggggcggtggcgactgcgcgcaggcatcgtcccggccgccgtcaccgccgcgccggcagctgctcggagccgaaccggaactgcttcgggaggcggggccctaccggccggggacggggttctaccggcagggggcggggcccacactggaaaagacgcgaggctccagatgggcccgagaggagaaccgagatgctgccgcggaggagcccgagggcgcatgcgtcatgccggaggccaaagcgacaggaggaagcggggctagcggagccggggcggggcctgtgggatcagtaaatggggttagggcctagaaggaggtaatccgaattcctctggagagagccagctcttctccaatagccagcccccaatgatcattgttataatttattgcccatttactctttgacagtgtctatgccaaacgccatataaacatctcatttaatccttgtgctaaggccgggagcggaggctcacgtctgtaatcccagcactttgggaggctgaggcgggatcacctgaggtcaggagttcgagaccagcctggccagcatggggaaacctcgtctgtactaaaaatacaaaaattagccgggcgtggtggtgcatacctgtaatcccagctactcgggaggctgaggcaggagaatcgcttgaacccgggaaatggaggttgcaatgagccgagatcacgccatggcactccagcctgggcgacaagagcaaactccatctcaaaaaaaaaatcctagtgctaattctgcaagggggatcctatagcacagaaaagtaaagaaacatactgcctgacatattgcaaactgatattccaacccaaatctctctaacatcagatcctgtattttcctcactccaccatgctgcaccaccctgagggaaggtctcctcccaagccaggtctagcattggcataaaccaagtccaaacccagctgtaacctggacacgagcccctccttggtcttgcctccccacacagtgccgggccgacttcaatggttctgaatgggatagacatgagtgtagactgcttccatgggatgccctggtgtggcctttcccttcaaactggtcttaaggccaagggcagctgggaacctccccactgcagctcatacccttcccagctccattagggccactgagaagtcacatgagagagggtgagacatctcatctctcttgctgataaccagctctggcagaaggacaggttgacctttctcagtttctattttgggacccaaagcccttataggcagaggaatctccctcccactgtttctgatgacagttagcccctttggctctcaaagtctagggcaacactcacctcccgtctccccatttgacatacaaggccctcttcagccttctcttctgagaagttagccatcttcactacaggaccattgttcaaaccttgccccattggcccggcacggcggctcacacctgtaatcccagtactttgggaggccgaggcaggctgatcacttgaggtaggagttcaagaccagtcagaccaacatggcaaaaccccatctctactaaaaacacaaaaattagtgtggcatggtggcacatgcctgtaatcctagctactcaggaagctaaagcaggagaatcacttgaacctgggaggtggtagtggcagtgagccaagatgatgccactgcactccagcctgggtgacagagtgagaccctgtctaaacaaaacaaaacaaaaaaaaacaccttccccctccccccatgaatcttgtgggcaccctttaaaggaagctctccatgtctcttacccatatttctctgactctacaactcagaaaactgtccctgacctccgtaattcagagactcatccaacagacatccaatccagctcctgcccaatttgtggcccacctagactgtacacttctttcagttctttctatcattcatccttggaaccagccacctcctctgcaccctggatctctactttaactcagtcctcagaacctaatagccttaggcagggctctacatctactaattccacagatgtttctaagcacctactatgtgtcagacccagcatgtcctttgtttcatctaatcctcaaattctctgaggtaggtgtgattatccttactttacagatgaagaaactgaggttcagggtggtagctgacttgcagaggtctctctgattctgtgttctcatggagtttgggggtggggggaggcttggggaggaaaaggtcttgtccactccagaggcccctgtgacttgctgagtcacttgcttctgtcacctgtccctgtcaatctctgggaaggagaaatgacactggagaggcagagaggagtgaccacagaggcagaggggtrggcgggctggcccatggctgagacctctctcccagagctggggggagaggacaaagccacgccttgycccagcatcctggagctggaggagctcctgcgggcagggaagtcttcttgcagccgtgtggacgaagtttggcccaaccttttcataggagatgcgtgagtggtagctggccaaggggcatgggggtggggacgtggagaggcagttcttggtcgctttaccagacacaggagggtggaaacaaggagaaatagctctgctctgaccatcccaggccagggaccttctccaggacccccgggggtgctgaggtcagtgcagtgaccaggtatggccaccagggagagcagggacttcgcctgcctgaaagcagggagtctcccaggagttccaggaaacatttccaggacaactgtcaagtgtagaggcagaggcccaggaaatagtatttgggrcatgagataaggtagacagagagccccctgtttctgggcccagcctccctcctctggatacagacggtggagaagcctgactgaaggtgaatcagagaaggtgttgcctctaaacatttgtaggttagaagcaggtatgaggtggtagccagtagaggacggatatgcgtgggaggacatggggcaagaagggaggggcagccaggttccagggctgaagcaatcccttccttcctgtcctggccaaggcagggacagatgcattgaggaagcaaagagggtctaaagatcccccgacacacacaccgccggctcagccaccagaaagtgcggggctctgggtatagggctgtggagtcagaccccacttggagcttgctggggttggactctctttggaccctaatggctcggtccctctgcagcagggggccaggcacagcctccctcctggtcccatggcttggccggcatcaagtgcccttcctgccctccccagggccacggcaaacaaccgctttgagctgtggaagctgggcatcacccacgtgctgaacgccgcccacaagggcctctactgtcagggcggccctgacttctacggcagcagtgtgagctacctgggggtgccagcccacgacctccctgattttgacatcagtgcctacttctcctctgcggctgacttcatccaccgtgccctcaacacgcctgggggtaggacttggggtccaagcccatatcccatcttgctcattcatggggaggatgcctcatttcctctcagtcatcagtgccctcccatccctgctttttaaaaatcctctgcttaggccgtgtgtggtggctcatgcttgtaatcctagcactttgggaggccgaggtgggtggatcgcctgaggtcaggagttcaagaccagcctggccaacacggtgaaacctcgtctctactaaaaatacaaatattagccgggcatggtggcacccacctataatctcagctactctggaggctgaggcaggagaattgcttgaacatggggggcggaggttgcagtgagccgagatcatgccacttcactctagcctgggcaaaagggcgaaactccatccccccccgccaaaaaaaagtcctctgcttagtgctccagcattttgtcgaacccgattccttcccagatggggaaactgaggcctggaatacaaggtcatgccatgagttaggagcaaccctgaggctgaaagccatttctcccaaacagcagaacagctctttctctgcaacactcaactttgggaaagcaccatttggtacctagatgtctgccccaaagtactttttttctccttttttttttttttctgagacagagtctcagtgctacccaagctggagtgcagtggcgcgatctctgctcctccgcctcctgggttcaacctctgcctctgggcttcaagcaattttcgtgtctcagcctcccaagtagctgggactacaggcatccgccaccatacccggctaatttttgtattttagcagagacagggtttcaccatgttggcgaggctggtctcgaactcctaacctcaagtgatctgtctgcctcggcctcccaaagtgctgggattataggcatgagccaccgcacccggcccccaaagtacttttaactagaaaagaaatatatcttcaaatactcaggatacagcataggagcccagggaggctggtgtcctggctttgtgtccatcctagaagacagctgtgtccctcactgtgtgaccctgggcaagccagtgtccctttctggacttcagtttcctcatctatgtgacaggaatgacaagattacagctcacatgactttttagtatccaacacactttgacattcttttgctatttatccattcattcaccagctatttactgagtatccactacgtgcctggcactgagctaaatactgggaatccagactttaagaagcaggatccctgccctcttggaactggtggaaagacagccaaattgcgaatagtatagtgagagctactcataagagtgggccagtgtggagggctctgggagcacacggcgggggtgctaagcccagaggatcgggaaggtggggggacttccctctacaaaggtatccatgggtaatatgcaaaaaagatgagctgctttgtgattcaagcaatactttgagcggtcaagaaagcctgtggaggaagccgtgtctcagccaaaacctggtggatgagtagtggaagttagtcagaccgagaccaggggaaacaatttgcaggtatttggaatagcatgtggtaaggctggaggtcagaaaccatggcagcctcaaggaactgcaagttcctccatgtttctcgagctgaaggtgggggagggacaatctgagatgaggcgacaggggccagctcttgaagtgttaaaaaggtttggaggccaggagcggtgtctcacgcctgtaatcccaacactttgggaggccaaggtgggagaatcacttaagttcaggagttcaagaccagcctgggcaacatagtgagactttgtctctactaaaaaaaaaaaaaaaaaaaagaaaagaaagaaaagaaaaaagaaattcggaccctatcccaagggtaggcagaacaggtgttgatctacccattttaccgatcaggaaactgaggtccataaaggctgagtgacttgctcaggatcacagagtgcacccaaggcagggtcaggaaaggaacttgggtccccatcccagcccgtgggtgggccggtgtgtgggacagggtttttcaccaggatgtcttcctcagccaaggtcctggtgcactgtgtggtgggcgtgagccgctctgccacgctggtcctggcctacctcatgctgcaccagcggctgtccctgcgccaggcggtgatcaccgtgaggcagcaccgatgggtcttccccaaccgaggcttcctgcaccagctctgcaggctggaccagcaactgcggggtgccggccagagctgaggggccaggtgaggcctcagggggcaaagctggatgtggttggccggaagaggccaggtgagggcctaggctgcagacataggattggattcttccaggattggttggcagggctgtgtgtggctggaagtgaggattaaagggggcctggccctctctccaaactgctgggttcccttaacctacccagggtctcacccaagggcctggcctaggcaattctcctgtaggacccccaacccatatcccccaccccacctggatccttcagaccccaaagagaagagaaggactaggatgcgagggtgtggaaagcataaaatggaagaggggagactttcctacctggtcttggggccaacctgccctgcctcagctgaaagcctgtgggggctcccctaaatctcactgaggcatctgcacagccagcctggaccctcctgaacctccacatccccttccccctaggtctggaccccaggtacagtgccacagagaaaactttccaggcttagctaattctcatcagtgagctaaggccaggcctccacggtggctccccacccagcagggcctgcctccacctctgcttcctctacaactccttgcctgtctcgcctcaagcctgtctttggctgtccctaccaccccatgccacagacgggctgccatttgggggtgggtgactggcctgggcatgcttgggagctggaacagcagtagctttttcctcccagaaacctcccagggcagggcctgactctctccctgcctcccacccctaagagcagttcctgtctctgaaggcatagccagcccaagcagaagggaggcccttcagcagcatcgaccccttcccctgtgctggmtggaggataagcatcttgaggagcaggattagggaaggatcaggggctaagtttagagtttgggggtgactgtgataagaaactttgggttatagctgggcttgagattggcctgtagccaagctgtggcatggagctctgtgggtagaaggtctgaagggggcatgtttcccatggaatggcagattccctgcctgctctctctcctctagacaggacccaggaacctggcggagcatcagatctcggaccatgcccagtcacccttctccctcagcctggggccttaggctccctgacctctgacctcagcatctttcccatcaggcagctgactttggggaagttggataggcaggggtacagcattgcacaattcatggaggtgtcatccaccaaactgtgcaactggaggccccaggagttatgcagtgtgcagcctgtgcagccatacagagcagctctgggtccaggtactctgaaagataaggggcccatggggagaggtcatctctgtccctaagccatggataccaaatctacctcctcatctctcccagcagctgcactcacttgaccttatgcacagggctcaaggcagaagcaggtttaggtgacagctcttatccctgccccaacaagtcccagccagcctgggccttggttcacctgcctgtaacacagagctcatctctcttccagagctggtccttactccctgccatggggctctgccactttgccaccctggcactgatcctgctggtgctgctggaggctctggcccaggcggacacacagaagatggtggaagcccagcgtggggtcggccctagagcctgctactccatctggctcctcctggcgcctacaccccctctcagccactgtcttcagtctccacaggtgggagtgggctcccctctcagccaagccctcaggcttcttggccagggaccccaagttccctgggaaagtggggaggggaggagagaggaagggggttccagatatttgtgatagctgttggccacagctgtctccagcagctcccctcagggctcagagagccccaggaggggctgagccttagctccctggagctcagacctcagagacccagtgcaggtatggctgcaggcatgggtgtgccctgttcccaccatctgggagtgcaagcggggagtagtatcaaggtatgygtgtatgacaaaggtctgtggatgacagagaagatttctagtaggcccaattgaaggtcctagctgaccacagttagcatggggagagaccttaaagaccatctctctggcctcaggggacagtggggcctgggtgtccctgccttttgggttgggggaggagcttggcagagggtgggagtggccctggacacactgcttctgcctgcagcccagggctgtctgaagacctgctctacacctgtgtctgtgtgtgggcctgtgcygcttccctcagcctgagtcttctaggtctttatcctggacctgtcccatcggccttggcccctaactgagggccccggacctgggtcctgctgttggcaatgccaccagtttacatgtgatttttggctagcctcttcactgtcctcctccacagaacatccttccaacttgaacttcctgcccttcttctataatacccttgaaggccaagggagagggtctcactccagttgcttaggctggagtgcaatggcatggtcaaggattagggctcactgcagccttgacttcctgggctcaggtgattctcccacctcagcttcccgagtaggagggactataagtgtgtgccaccacaaccagctaatgttttttttggagacggagtttcgttcttgttgccaaggctggagtgcaatggcgtgatctcagctcactacaacccccacctcccgggttcaaatgattctcctgcctcaggctcccgagtagctgggattacaggcatgcgccaccacgcccagctaattttgtatttttagtagaggcaggttttctccatgttagtcaggctggtctcgaactcccgacctcaggtgatccgcccacctcggcctcccaaagtgctaggattacaggcatgagccaccgcgaccagcccaactcactaattttttgtatttttagtagagacagggtctggctatattgcctagactggtcttgaacccctgggctcaagcaatcctcccacctcagcctcccaaagtgtcgggattataggcattagccactgcatccggccaagggaccttttaaaatggtttatttgatcttccttctcccactatctctttttttctttttgttttttctttttttctttttgagacggagtctcgccctgtcgcccaggctggagtgcagtggcgcgatctcggctcactgcaagctctgcctcccgggttcacgccattctcctgcctcagcctcctgagtagctgggactacaggcatccaccaccacgcccggctagcctgttagccaggatggtctcgatctcctgacctcatgacccaccctcctcggtttcccaaagtgctgggattataggcttcagccaccgcgcccggccccttctcccactatcaacatacatgtacacaawatgccacagtcagacctgggctgagctgccttgattcttagcagtgctgggacagaggcctgggcctggagggaaaggtgcctgactgtgcktggcactggccatgccatggaaccagtggacaagttgggagtggcaggggaggctggaagaggggagtagacagcatgctttataattaaactcaaatcaaaaaatagaaacagcatcaagtgtgcggagacaggcggctgaaagccrgcagcacgaactgcccgtcagagaagtgcacagcctgggccagatactcccacaggtgggtgagtgctcctaatttggggggggtaggatgtggtccctgakcatgctgggtaatgagggccaggacacttgtgcctgtgtggggaggggtggggtttgggttgggtagagaaccgactgggtcagagatgaaggcgcagacaaggtatagtagagtcagagagacctgggtttgaatcctgactcccacatcaattggctatgtgactctgggtatgttgcttaacctctctgagtctcggtttcctcatctgtaaaatggggatgataatattacctgctccataaaggcactgtgaggattcaatgagaaaatgtgagcacctagctctgtctggcacatagtacatccttgatgagtgctaaatataacaattattgctggacagagaaagaaatatcaagaaatacagagatagagaagaaatctcactgtcccgtagggaagttaccctccacataggatatggctggggctggaaagggtaagagtaattatagtagtgataataatagtaagacgtgccatttattgggcatctaccataagacagaccctgtgggaggtgctttacattaattattacatggaattctcacagcagccccactgaagaaactggcttggtgaagacaagaccacatagctgcaagtaccagacctgagatttctacccaggtctgccctccccaagaccctcaggctgagcacagagacccacagctgttccycactggcagccacacgccacccttctgcaggccttctccccacactcctcactggtcctgccctgagatctccagccccacatggcctgtggccacacttctgtctggcctccctggagtggagtcagaaaggatgggcaggaagaaagtccaggggactatctgaaactgcagctgagaggtggatggcaaacagctgccccctgccccaaggaagcctgtgcctctgcccgatgtcttgggcacacagagcagcgtcatgggaggctgcaaaggcacatgagcttcctgggggaggatgggagacagaggcaaacgggggagtgacccagggaggagagatgcaaacacagaaaagaagtgcatggacttgcaaacagcagcagcacaggagcagccaggaaaagccctgcctacagaggcagctgctctgctgagcgggggaggcaggaagggggcgaggaggagcacgggatcagggagagaaggaagactgcagggagtgggaggggagctcggccgggccctggccctgctggacgttgggcctgtgcttcacccagctggggacaaggagacatggaatgtagtgtcaggcagggccctccgaagaccaagtctcaggtgtcagaaaccggcggagctgccacaaccaccgacttcccctccttgggagggactggggcttaaaggacgagtccctgggggggtggccgggcctgactctgactgatgggatgggctgggtcccagtgggttagagtggacaggtggggcaacaccctgagcatcgggagcaaggcattaggtggagcctgaccaggcatagcgctaagtccaggggagagccccgttcttcagacctgggcctaggtcccctcggaggcagaggcatgcactgtggcctaccagcccccaaatccttgacccctctggagcctcctgggggtggagcctggctgcctgctccctggcaaggctgggctgtgacacacccattggccaccagggggcagcctcaccccatgccaagctccgcaggcctgagcccggagcctgtcccacttcccaaagccccatctcctgcctggggtggtgcagccccacctgatggctccagaccagtgtggctgttggactcctctgggtcctgggggcttccccaactccaccacactacactgccctctgccctgcagtgaccgcatatccagacactcctctctcattctcgggtcagacccccagagcatcctgaaaattaagtccagcatccctagcatgggaagataaactgtggtccagatgggagcaaagacttgctcgtggccacagaatgagttatggcagagtgctgggggagccaggctctcctccctgcctcagaagttctcttcccacctcttcaggtagactcccatcttcatggaggtttatggaaccaacggtcttcaatcccaaacagataccaagcagagaggaggcctgggggtttagagggaccggagggcccactgcagtccacaaggcctcagtcggctctcaggccccaccccccatgggcgccccagccagcacctggaattctagccgcttcacagtgtttgtgttctgggcagaacctgcccagccctgttccgctcaggcagagtcctgcccctgcacccactcccccattcccggccccaggccatgccccaggtaggtggcaggccactcagccacctggagaggtcacagtgggggatgaggaggacagcttggtcttcacttccgccttgccygacagcctcccactgggtgagcctggccaagccggcagcctcctgggtgcctgtttctttttctggtcctggcactgcctaccaaagggaaaagatgktcttcccagtatgcaccttccctagtcactggtccaggggatcaggggcagttagcaaagacaggaccccctctccaacacggcaccaggcccatattctggtgccgctgaaaatccagctccgcagggtccctgactccttcagccagcagatgcctgaaacaagctacctgacccgggtggggcctgacatccagtgctggcctgagtcgtgggggtaaggaggaaaacccagggcctrtaggcaggtgtgtggctcagcagtaccaggctcccttgaggaagcagatgggttagtgaccactctctggaggccccaaagatggtaactgaaaggcttggggatggactaaaaccccagccttgctactcatgagccgtatggctttgggcatcacttttaaaacattctgagcttcagcttcctcctgggtaaaataggaacagayatcccacgagtgagacatcaggctttttgttgttgttgagatggactctcgctctgttgcccaggctggagtgcagtggtgtgacctcagctcactgcaacctctgcctcacaggttcaaaaggttctcctgcctcagcctccctagtagctgggactacaggagtggaccaccacacctggctaatttttgtatttttggtagagacaggattttgcctcattggccaggctggtctcgaactcctgacctcagttgatctgcctgcctcagcctcccaaagtgctgggattacaagtgtgagccaccgtgcccagccagaggcatcagrcttataagaggcattagctcattccatgcggagttgctaacaaataccagttcacagtcctggcctcttacctggagataggctctgatctccaagcccctgaaagtgggaggggacgggggtctgaggatgagtactggaagtagcaggtgagggggcttgagatgagctgcttaggttggtgggggcttcctgggtgccctgagagccacagccatctggggctttcatccctacaaagtccaagctgatttagggatgagatctgcactgactagtgccacaaacagggaactccaagggccccttggccaaagcttcatacatctgcagctcagcagagggcaggagagaggtctgcccagctccatagcagtgacaaaggcttgattcccttgttccctggggaagggttctaggcctcagccccagctgagcttgttaatacctcatgtgaaatagatgaagcccttcctgcagcatcccygtggcacctaggcactgcaccangggcttccccatcagctggatccaccctctgggagcctgcctccagccactgcggtgtccactctgttccaggatggactcactgcagaagcaggacctccggaggcccaagatccatggggcagtccaggcatctccctaccagccgcccacattggcttcgctgcagcgcttgctgtgggtccgtcaggctgccacactgaaccatatcgatgaggtctggcccagcctcttcctgggagatgcgtgagtaagacccacgttaggagtggggatggcggaagggtgtgaggttcacacgggaatgggggcatgagcctctctcagagccctctagggcagaggtggcacscttgcctcccaccgtctctttccctatgtttctttccttttatattattactgcttttaactgtggaactagaatgcacataagaaaagtgcacagggccgggtgcggtggctcacgcctgtaatcccagcactttgggaggccaagacaggtggatcacttgaggtcagaagttcgagaccagcctggccaacatggtgaaacctcatctctactaaaaatacaaaaaattagccaggtgtggtggtggacgcctgcaatcacagctactcaggaggctgaggcaggagaatcacttgaatccaggaggcagaggttgcagtgagccgagatcgtgccactgcactccagcctggacaataagagcgaaactctgtctcaaagaaagaaaaaaaaaaggaaaaaggaaatgtgcacagagcacgtatgaacagcttcatcacccagtgaagaaaaaggatattacttgtctcccagaagcccctactgaatccttctcattataacttttctattctctgtggttaatcactatctgttgaattaattattttctgtaaagttttaccacctatatatctaaacagtgtagttagtttcacctgttgtttaaaatgatatgagtggaatcatgttgtgtgtgttttgtgcctgggatcatttgctcaaatttgtgagtcacccacattgttatgtgtacctgaagttcattcatgttttcactgctggagtcatcatatgattatgccacagtttatccattttactgaatatggacatttgaattgtttccactttttgactattatgaacagtgatcctagtaatatttcattttaaaatttttatttatttatttagagacaaggtctctctctgttgcctaggctggaatgcagggattatcatcattcactgcaacctcaaattcctaggctcagcaattctcccacctcagcctctcaagtagctgggaatacaggtttgcacaaccacacctagctaatttttctttttttttttttttttgaggcggggtctcactgtgccacccaggctggagtatagtagtgcaatctccactcactgcagcctcaacctcccaggctcaggtgattctcccacctcagcctcccaagtagctgggactactggcatatgccaccatgcctggctaatttttgcattgtttgtagagataaggttttgccatgttgcccaggctggtctcgaactcctgagctcaatgaatcctcccgccttagtctcccaaagtgttgggattataggcataagccacagtgcctggcctgaaaaggagtctattttttgttgttgttgttgtttttttgagatggagtctagctctgttgcccaggctagagtgcagtggcataatcttggctcactgcaacctccgcctcctgggtttaagtgattctcctgactcagtcttctgagtagctgggactacaggtgcccaccaccatgcytggctaatttttgtatttttagtagagatggggtgtcaccatgttggccaggctggtctcaaactcctgacctcaagtgatctgcccacctcggtctcccaaagtgctgggattataggcgtgagccaccgcacccagccygaaaaggartcttaaactccaacaggaggagccccttcaccctgggccaatttgcaggctcttgtctctacccttggtgggtggtgggcgggggtgtttgcaaacttcaacccagccagagctgccacagtgagatctacctccactctcctaaccccttgtgccctctcctccaggtacgcagcccgggacaagagcaagctgatccagctgggaatcacccaygttgtgaatgccgctgcaggcaagttccaggtggacacaggtgccaaattctaccgtggaatgtccctggagtactatggcatygaggyggaygacaaccccttcttcgacctcagtgtctactttctgcctgttgctcgatacatccgagctgccctcagtgttccccaaggtgcacntctggatcaggcatggtggagggtggagggtgtgctttaggactctccattattccagtagcactggtgggtgggagtccagagagacaaaccctttcagtaaccctyccactccatagggaaaatagctactaccattcagtgagtgtccccttcagggacaccctggaggctagcaattgcagacataactaagatgcagtgtggtcatcagcatcaccacatccctccataagaggccaggcactggacagaaggtataggacccagtgaagctcttgagcgggttcctctaagatgaggccttggcatagagctgcaggggcagtcgagagggcagaactcgggggaaagggaggtagatggacaccccctataatctgatgcaaacccagtgacctcaggaattcagtaaacccccttcccctggcccagagttgcaaaggatgcctgaggaagcacctggactggaagaaggaaatcccggctgctaacctaaaccctgcctctaacttgctatgtgactttgagccagcctcctctctttgggcttcagttgccccatttgacagagtagacagtgtcagtattccaggatactgtagaggatggccatgggtgtctcttcttcccaaaggggtgggtggttcaagggcaggtagctgatgctaagttggttctccctacaggccgcgtgctggtacactgtgccatgggggtaagccgctctgccacacttgtcctggccttcctcatgatctrtgagaacatgacgctggtagaggccatccagacggtgcaggcccaccgcaatatctgccctaactcargcttcctccggcagctccaggttctggacaacsractggggcgggagacggggcggttctgatctggcaggcagccaggatccctgacccttggcccaaccccaccagcctggccctgggaacagcaggctctgctgtttctagtgaccctgagatgtaaacagcaagtgggggctgaggcagaggcagggatagctgggtggtgacctcttagcgggtggatttccctgacccaattcagagattctttatgcaaaagtgagttcagtccatctctataataaaatattcatcgtcataaagacaggtgatcttttggtggtctgtggggcaaggacttactctcgggatggtcacaaggttccagatggcttgccaactctgattcagtgggatggcagcctcggggaggagtacaggtgggaataattcgtgatatctgccttgggtgcaggaggaaggtttgggggtacaagtgtgaggattagataacctcgtcctcatcttgtcctcctcatcttgtcctcctcataccctcacccaatagttaggttgtctgataaagacccaagttcaatgcatcaccattatctccatgcccatcctacccaaggctaaatatcaaaattcactgtccactagtagcatctcttgaaaccagtcagtcttttcactagcactctgctttcaaacggactgcttaaaattagactcctaacaaattaaagcattaaacaagaggatgatggggttgggaaggagacataccagaaatactaggcaaaggacagttatatgatggaacaaaatagctctgagtttcttagttcttatcttggcacaacataaaataaaacaataaagaaaggccccctcccaggttcctcacctgtaaaatacatcataaaaacccaaggtatttatggggtttaaatgggcagctttcctctacctctctggctgctgttagtgaggtcttgcctcctctgtttgtgtgtgtgtgtgtttgggttttctggttgttttgagacagggtctcactctgtggtccaggctggagtgcagtggtgcagtcagctcactgcagtcttgatccccacaccccacctcgagcaatcctttcatctcagcctcccaagtagctgggaccacaggcgtgagccaccacacccagttaattttaaattttttttgtagagatgaggtctcactatgttgtccaggctgctcttgaactcctggactcaagtgattctcctgcttcaggcttccaaagtgctgggattacaggtgtgagccactgtgcctggccccttgcctcctttggctggcccttcaatatcaaggtttctcagagttccatcctctgcctcctctctcctgcagtgtttctgctctctcagttctctgcaacacttgctcccaatcccacattgctgttggctgcctcaggtgctctctgggtcttttacagaggatatacatatgtcttaggtggaggatggtgggagggctggtgctgccgtgtctagcttagtcacagggcccagccccctcctggcaggtgcaaacacccctgggctccccaccctaggaatggaagactgttctcaattcatcctggggttgatggagtctatgattctctggagcagacaaacccagttccagctcagtagccccacctgcccattcccaattcccttggatccctcttccacctgacaactcaatgcttgttgcggtttcttgctcatgcaccatcagtgggacccaagatagtggctccagaagccagtcatccccatctgagtatgggcagcctgcccctgttggctggggtggatgcactgaggctgcracagagccacactctgggcctggggcttgggttccagcaggtcascttcttgggtctctgtggattgggtgcagaatctgaggctgcagggggagattgaaggaagccatgaggaggcaggtggaggggaagccaaacattccccaagtactgaggaaatcgaggccgagctccaggctggtacctcctctgggatgccttcctgcctgccacactcacccagggcagcctgtaataacatatctccctcttctatagagcagccttgtgaaagaagtggtgtattgtgaggagcaccactttggagccagactctttgggtgcaaatcctacttctgccccttgtcagatgtatgatctcaatctctccatacctcagtttccctatccataacacaggattaatgacagccaccacataggattgctgtaaggattaagtggggcatatagaaagtgctttgcacaatatgtggtgagttcccagaaatggtagctgtggccaggtgcagtgcttcatgtctgtaatcccagcactttgggaggccaaggcaggaggatcgcctgagcccaagagttcgagaccagcttgggcaacatggcaagaccccatgtcatttataaaaataataaaatacataattaaatgatagctgtgatcaatcatcatcacagcacatagtactggggctccagtcttggactgaaagctggcagcattctcagtgcattgaacgaatggatgaatgagtaaaaattagctgacttaaaggcaacatggtatcctggattggatcctgggttttttttgtttgctttttgttttgagatggagtcttgctctgttgcccagactggagtacagtggcacaatctcggctcactgctcactgcaaactccgcctcccaggttcaagtgattctcctgcctcagccttctgagtagctgggattacaggtacctgccatcatgcctggctattttttgtatttttagtaggaacagggtttcactatgttggccaggctggtcttgaactcctgacctcaggtgatccgcccacctcggcctcccaacgtgctgggattccaggtgtgagccactgcgcctggcatattatttatttattttttttttagtagagacagggtttcaccatgttggtcaggctggtctccaacttctgacctcaaatgatctgcctgcctcagcctcccaaagtgctgagattacgggagtgagccaccccacctggacttggattggatcctggaacagaaaaaggacataagtggaaaaactggtgaaatctgaataaagtttgtggtttagttaatagtgttatagcaatgttaatttatttgataaaggtagcaaggttatgtaagaagctaacatcagagaaagctgagtggatatacaagaaatgtctctgctatctttgtaagtttgctgtaaatctaaaattatttcaaaaataaaaaaattagctgacaattaccaactgytttgcatatgccgggcactgtgccaagttctttagatacaaatttttttttttcaaatttcatccataatgttttatgtcttttgaaaacacatgaatcggagcccaggagctataggctacagtgagccaaactgtgattgcaccactgcagtccagcctgggcgacagagtgggaccctgtctctaaaaaggaaaaaaaaatcaagtatcaaatacagcaaaatgttaagatttgaccatatttatggagttgtgggaatacaggtgtttattatatgattttttatatttaaaaaaatttcatcactttaaaaattaaaaataaataaatctactaacttctaaattaggaacatcctactctgtatttaggtttggaaaccatcaagtcaaatggattttaggaagtattctgggctgggcgcagtggctcacgcctgtaatcccagcactttgggaggctgaggcaggcagatcacttgaggtcaagagttggagaccagcctggccaacacggtgaaaccctatctctactaaaaatacaagaattagcgtggtgtggtggtgcatatctgtagttccagctacttgggaggctgagacacaagaatcgcttgaacctgggaggaagaggctgcagtgagccaagattgcaccactgtactccagcctgggtgatagagcgagactctgtctccaaaaactaaataaataaaaataaaactttaaagaggctatattacaaataatcttgcttaagaaaaaaggtaatgatgactcagttggtagtatttagataaagtaaccgtgttgaagagaagctaagccagtaagtcatactctccatcatttctttcactcctcaatcctgtagggtgggtcgtgtgaacaccattttatgggtgagaacacaggcccagggagattaggccagaacagcagctagtattgattgagaactttattatctacctgtgccttagtcagtcaggctaggccaatgactctgacagccccaaaacctgagtgacctaaactcagcaacactttattgattgattgatatttttattttttagatagcgactcactctgttgcccaggctggagtccagtggtacaatcacagctcactgcagcctcgattttctgggctcaaggggtcctcccacctcagcctcccaagtagttgggaccacaggcacatgccaccacgcccagctgactttttgtagagacggggtctccctatgttaccactctgttcccaaactcctggactcaagcgatcctcctgccttggcctcccaaagtgctgggatgacaggcatgagccaccacacctggccaggccatgctttattttttattcaaacacaggtagatggagggccaggagagtaagcatggaggaatggaggccaggtctactactgcccctcaagttccatgggccagaaccagtcacatggccacacctaactgcaggggaagccaggaaatagtctagggtggtgcccaagaagaagaggaaactgcagatattgatgatcatgagctttctacagcgggcattaaaaaaaacaaaaacaggctttgcagacgccacagccactggcaggagccctgtactatcagccatggttaaccccaccatgttctttgacatcgccgcgagcccttagactgtgtctccttcgagctgtttgcagacaaagtttcaaagacagcagaaaactttcgtgctctgagcactggagagaaaggatttggttgtaagggttcctgctttcacagaattattccagggtttatgtgtcagggtggtgacttcacatgccataatggcactggtggcaagtccatctactgggagaaatttgatgatgagaacttcatcctaaagcatacaggtcctggcatcttatccatggcaaatgctggacccaacacaaatggttcccagtttttcatctgcactgccaagactaagtggttggatggcaagcatgtggcctttggcaaggtgaaagaaggcatgaatattgtggaggccatggagggtccaggaatggcaagaccagcaagaagatcaccattgctgactgtggacaactctaataagtttgacttgtgttttatcttaacctccagaccattccttctgtaactcaggagagcatccttccacccaatttgctcgcagtatcctagaatctttgtgctctcactgcagttccctttgggtgccatgttttccttgttcccttccatgcccagctggattgcagagttaagtttatgattatgaaataaaaactaaatgccaaacaaacaaacaaaatatatacatacacatacacacatgtataatttatatgtataatttttacatttgtattaatttagaaattatatatatgtatatacaattaaactctcataaaccctaagaggtagataatgttgttattcccattttacagataagaaaactgaggcttaaagagcttaagtaaagtttctcaggttgcttagctagcagggtagaatcatactaccaactcagtcagtgaacctgtgttcttaaacacttcgtgagcctccattctggattggccttagtgacttgctggccaggagaatgcagcagaagcagcattctggggcttccgaggctgtcataagacactttgcatcttctacctgggtctcttggaatgtgctctctgggaatcctgagccaccctgtagaagtcggcctgtgccccactctgccatgctggactggtcatgggtaggccaactggttgacagcctcactgagcccagacactagacatttgtgtgaccctttcttgtttactccataccagcatatctgccagcgaaataccacagagtgacctctgtcaatgccacatggaacagcaaaattgtttac

SEQ ID NO: 95063 - DNA, 28418 bp, Homo sapiens
aataaatctgaaaagtaaagtatcacagaaaagatgtttgaattgcaaatcactttagaatagaacaatttgctttccaaaaaaaaccctaagagttatgttttactttccctaatttttaactatttctacaaagaagtttttccacagtttctttatgatgcttactgcatgacattttctgttttagatctccagcgttataagacctgatttttattggattatatttctaatgaaataaatctttagggtcagcagtaggtgaggtttcaagatttttttttaatttatgagtttttcatttgtttgttttacctaaagcatcaatctattttgtagatgtggcaaaagcttcaaaataaataggaagcctctcaccactcaaagttaccatcatttatacctagcagaatgtcagtgcaatctacttcttgaaatttcagagtgtctgtgtcagttttctataatttggcaacattataatgaaattactgagtttctctttagatgagcctattttttagttaatactgtatgtcaacactcagagatttccttctcttcatcctccttcgatctctcttaccatccccgcccctctgaaaaaaacccgtgcccatttgaaagctaaatttttctacaaatttttaactgacttacatttttttctttcaatattttaacaaagttaaccttccccttcttagtttttcattatttttttttaagagacaggatctcgctgtgttgcccaggctggaatacagtggctcttcacaggcgcaatcccactactgatcatcacactccatttccagcctgggctggttcgtccctccttaggcaacttggtggttctctactcccgggaggtcatcatactgatggcaaacttaatgtggacacccgatcggcatagcaccctatagcccagaactcctgggctcaagtgatcctaccccagtcccaagtagctgggactgcaagcacatgccattttttatagttaaaaaaaaaaaaaaaaaacagcgtggtcatggaaaattagaaaataaagacctatatatgcattgtttacttaaaataagataatactaaatgtgctgttctgtaacctatatttttcagttaacagtcttcatttcagtatctttccattttatcaagtccattgttgaatttcccagtccagaaccaagtttcacatctggttgttatgtccctaagtctcttaaaaaaacacacacaaaacagccccctccttttttattttcatatcacttattgagttgaggagacaggaccagctgtcctgcaggatgtctcaccttctagaagtgtctggttgcttcctcctttaacttgttcctctatcccttgtatttcctgttaaccagagattaaattttatgtcctgagagatccaagtgaaacattttgggctggaatgtatggtaagtgatatattttttattatgacttatcaggagacagcttctggatgggtcacaattaaggagactaaagttgaccactgaattagggtatgactatctgatcttttcactgtcaagtttaatctttttcttctttcaactagaaaataacatatttggtgttactttgcacagtatgaatctctaggtcatggcaaacgtatacctgcatttaacacttgcctgaatctgtaatatcatgagggattacataatgctaattttcttattttttaaaaaaatttacttcttattattagataggcttttgcacaacagagtattttatttactagggtttttgatttgttctgaaatatggctgctcctacaaagacaagtaaataatttttttcactcagttgccaatttttgtcagcttagaagattaggtaagttttttgctggctttctcctttttaaatattattgcagattcgtggatttttattgcttcgttgtgtttcagtctacttcactcataattcttacaaatttgactaataggaaagaggaccttttagactgattcctgtgtctttttgccatgatgttatatatttatggaaatgtttaaacaaaagtatatagtgagtggtatactgaacttccaatatatctgtcactctcagttttagcaattagcaataattttctaattttatctgtctcctgctgcttttttgacacccttgatttttatttcattggtagtggaaagtttgttttctggtgtggcaaggtgtcccatccctagacctggaattactcatttctttaagaagccctgattgtctttagtaacgaatggcatcagacaataaaacctggacataaggattattggaagtttttaaatttgatttttctttattttcccatcgtgtgcttcaacatattggtagctgtgttagtttgttcttgcattgctgtaaaggaatacctgagactgggtaatttatttttaaaaaaaaagaggcttaaaattggctcacaattctgcaggctatacaaacatggtgccagcatccactcagcttctggggaggcctcagggagcttttactcatggcagaaggcaaagctggagcaagcaggtcacatggccagggcaggagccaagggagtgtgggcaatgcttttaagcaatcagatctcacgcaaactcattcatcatcaaggggatggcgctaagccattcaagagggatgcacccccatgatccaaacacctccccctagaccccacctccaacactgaacattacatttcaacatgagatttgggtggggacaaatgcccaaactatatcagtagccttgttccataagcagggttgcaggcatgcgagtagtggaggaagggcacttctcaaagataggataaaaagctttatatttctatattagttggtcaaaatgtaaggcgtagctgacagattactcagctgttgacatgtaagtgcttttaatgaaggatttaaaaaaaaaaataaacaccatttagtgttatcagtttgcccccactgcaatataaggaaatcctcaatttatatgacttcttaagttttgtttgttacacactttggtttctcatagtaataatgcagatgatgaattattctcagttaatagggttaaaaatgtattattgggtttccacttcttaaaatctgtattcacctcctttcccttctgatgccccagcaaaataaaatgtttaaaaatgagaaatgaagaagccagtaacagtaaataggaggactacccaaggatgatagttgaacagatttccagatctctagttgagtaccagtaggcccaactataccctcttctcccctcctcatacctctttcacccctacacttgaatacagatagctggcaagaatcccaggcaaacactaggcagattttctttacagagcatgagaaagacgaaggcttctaaagtgtgtgctgtgttcgtgtaacaaaagagaaaacaccatcttctttctggcatttgaaaggtctgctggctccccacccactcaccctgtgggaacactgccagtcagcttatgtccagcccacacagagctccctctttttatcccctccaggggaacaatctagccaaaatcagactatcttcaaaataacacaggaaatctatgttggctaatgagtcattctcccttaaatgtgaatgagtaaccgaagatcaccaggcatggtgggaaaaactaatggcatgaaagactaaataaccaggaaaatggccagtggaaaaagtaaaactaataagaaagaactttattttaaaaaaagaagaataaatcatctaatatattcagagatccaagaagatactacatctattaaacaagaataggaggacacaagtttttagattgaaagggcacaccaagcactgaaatagagaatcaaacatggtactgtgacacatctcaaaactgcagaattcctaggataaacaaagatcccggaagaaatcacacacatagtaacaagtaacagactgaaatcaaaccccttatgaataacttttaatgatttaagacagtaaagtattgcctacaacattttagaaagaaaataatatgcaaccatggattctacaacctgccaaactattaatcaagggtgagagcagaatacagttgttttcagacactgaagggtgcaaagtttgccttccattggaagtaaaagaaatgaatgaattacacattcaccatcaacttcttgagaaacggaagtttagcatttgattttttttaatatatcattgctgccaaaagggttgaggggaaaatgagaaggggggattaaaaacgataaaattagttgttgattcacaccatacaataaattacagagctcctgtggcaaacggcagttaaactactccctttactctcagcaggctgaaatgtatcatacattatatgtataactatccataatttcccatgtttcccaatcatcccagcaaaaagtaacccaggactacttgcattgcaatcacaacaggctcatacaccatatggccagaagaagcaacagcatcacattttcctcccatcaggactggaatgacatgatctgacttaaatttaagagcatcattctgactgctgtgttaagaatagacttgagggtggagtagtagggtaagcgtagaaggagagagaccagtttgaatataactgctgtgttccaggtgaaagatgacagtgattctgacagggtagtaacaatgtagttggtgaaaagaggtcagattctgggtataatttgaaggtagaaccaacagaatttcctgacttatgggatattgagtgaataagaaagggtcaagatttttagtctgagcagtaggaagggtggaacagattgaggaaaagattgggagttaagttttggatgttatttcagaaatctatttgacctccaaataaagatatatgtattggatatacgtatctgcagctctgaagaaagacctggcctggcgagagaatttggggatagtcagccttgtatttaaaggcatgaggttgggtgagatcaaagtgaatagactgaatagagataaagaagttcaaaagactggggccctaaggtactctaacatttaagaattagggagatgaaaaggaagactcaaagaagagaagaacagccagtgggattttaggagaaccaaaagagaatggtgccctagaaaccatgggaagaaaatgtttcaagaaggaaagagccattgactattttatgctgttaggaggtcaagtaggatgagcactaaaaattcattgttggatttagcaacatggatgttggtgtttaccttgaaaaggtctactgtgttttttcagacagctactaaggtgttaggacataaatacttgtacataagtagttatttggccctaactatttaataaatgctacatgttgagcatcccaagttcagaaatcgaaaatacaaaatgcttcaaaatcaagaactttttaagcatcaacgtgatgctctaaagaaatactcagtgaagcgtttcagattttagatctggggtgctgaactgttaagtgtaatgcagatattcccaaatctgagaaaaatccaaaatccaaaacccttctggtcccaagcattttgggtacagcatactcaaactgtattaggtatttcttttggcctagggggcattgtgaaaaattactgagataccaagggagccacaaactaagaaagtttgaacatctctgctttagaagcttgagctaactaaggatttcaccaaaaggaggaagcacctcttacctttttttgtgctgaaaagtttgagtttgcaattttaaatctgatccaaaattgtcctaatacagttgttcaacattaaaaaaaaaaaaagcaaagaaaactttatcctatgaaatgccggtagtacatctttgcatgattttttttcttcttgcctccataggtatggtctgaatatgcgttgcttggcagctcgggtcaactataagactttgattattatctgcgcactcttcactttggtcacagtacttttgtggaataagtgttccagtgacaaagcaatccagtttccacggcgttcgagtagtggcttcagagtggatgggtttgaaaaaagagcagcagcatctgagagtaacaactatrtgaaccacgtggccaaacaacagtctgaggaagcattccctcaggaacagcagaragcaccccctgttgttgggggcttcaatagcaatgtgggaagtaaggtgttagggctcaaatatgaagaaattgactgtctcataaatgatgaacacacaattaaagggagacgagaggggaacgaagtctttcttccattcacttgggttgagaaatattttgatgtttatggaaaggtggttcagtatgatggctatgatcggtttgaattctctcatagctattccaaagtctatgcacagagagccccctatcaccccgatggtgtgtttatgtcttttgaaggctacaatgtggaagtccgagacagagtcaagtgcataagtggggttgaaggttggtatctgtctgcttcacttgcatttttcaagcatgattgtgttgaggaataagaaaatgttgttaattatacatcaagtacatagcttactgtcaaaagacctttcatcactctaatttagcagggaggaacaggttaagcctgaacctagggcaactttctagatgctatgacttaagggctgccataagaccaaacctgggcaaacagaattattttattaacgtaactcagaatctaaaattctcaccagtaaggtaaaggcattgtttctccagaagtttgcgttaaaatatatagctagaatcctgtgagagatgggaaagggagagagaccatccagtggacccatcaatgtaccagtgtggtctggttacctaatgagtcaggtgtcatctctggaaggaggtttcaagtcttcagaacaagacaatatgtagatgctttttctctggacttatactgaactcctagtctattacatttttcattgtctttaaaacctggggcagtaagagttccttgtggatacaattaatatgctttggaatttgcttttcaaaccagaaagccaaattgaatttgactttaaagtatatcacttaaacagaggaaagagcttaatatgtttgagatttcttggtttgggttttactttcctcattttgttataaagtgattttaagatcttaatattttaaaatctgtattgaagtaagtttttaactaactaaatatatattttttgctctggaaagaagtttgtgctcacttggtgaccatgtggatgttttcagactcccacagaccgaaggattatagcccactcatgtctgtgaagttaatggtgtgtttattcatccagttggaaattggaatttacatatctgatgcaggagttttttcctttgtttttactacttagataaattttttataatatcwttttctcttattttgagacagaatctcactctgtcacccaggcctggagtgcagtgatactgtcatggcttactgcagtctcgatctcccaggctcaagtgatcctcccacctcagcctcccaactagctgggactataggcatgctccaccatgcccagctaattttttaaaatttattttttgtaaaaacagtgtctcactgtgttgtccaggcttgtgtgaaactcctggactcaagcagtccttccaccttagcctcccaaagtgctggaatcacaaacatgaggcactgtgcctggccaatatccttaccaaatgtttagaagagagaagtgaccagattcacctatactcttaccacctcaatataattattattatttttatatattctctggaggcctttgtacttagacatatgttttagcataatcgtaatgatgtttactatacagtgattcaggagagtaatagagatttcaaagatattcagagtcaaacctttttttcagcagttttttaaatgcatgaaattaataggcgcctaaattctaaaataaaaaagtaaaaagtacccataaccactattaatattttgactttttttccccattctttttgttgttgtagaaatatatttttattttattttattttatttttaatttttaagttcaggggtacatgtgcagttttgttatataggtaacttcatgtcatggagatttgttttacagattattttgtcacccaggtattaagcctaggacccatcagttatttttctgatcctcgcccgccacctacccyctaccctccagaggccccagtgtgtgttgttcccctctatgtgtccatgcgttttcatcatttagctcccacttagaagtgagaacatgcagtatttggttttctgttcctgcgttggtttgctaaggataatggcccctcgctccatccatatttctacaaagcacgtgatctcttcttttttatggctgcatagtagaaatgcatctttaaaaaaaattcagatcatactgtatggtcaatttttattctgatattttctacttaacatgtttcaactatttcccctcactgaatatttattgaacattttaataactaatatttgtagtaaggacatgccatgatatatgtaatgtatgagacccttctctttagttgtacacttaggtcatttccaggttttttatgttttttaattaatgttttatatttaatttttgtgggtacatagtaggtgtatgtatttatggggtgtattagatattttgatacaggcatgcaatgtataataatcatcacatcagggttaatggtgtatccatcacctcaaccatttatcctttcttagtgttacaaacaatccagtaatattctttcagttatttttaaatatataataaattaagatcaagtgaataaaatctggtatttggtagcacaaagggtgactaactatatttccatttttttgctattataaatgttacagattttcattgttaatctttatttgctattttaattttattctcattgtagtgtattcctattctgagaatataattaactgccatgtcaaataacctgccaaacctttgtactgttttgccagccattttccagaaaggtggaacttgctcatgcttccagcagcagagtatgagggtgccgttttcacccaactcttgccatcatggaccattgtttttttgtctgttggttacagagggatattataattttctctctttaacaactagtgaggtcagatatctttttcttatgctttttgccgtattttcatgttctttacccctttttcgaatgtgataagtggagttttttaaaaatgtatttgtgtgaacttatgtagtaagggtagcagtactcatatttgttagagacgtttcttcaatctggttgtcttttcattttacatatgatttgttggttttagaagtttttagttccatttattaaacttatggggttttttggatctttgtacctcttctttttatgcttagaaaggcacttgccacaccacattatgatcagcttttcacttttagtttctctgatagttttatggtttcatttttttacgtttaacttttttagttctgctaaattgatttatattttggcaaatggtacaaggtcacagcctaattttaaacctttttccccaatatgtattgaatcatctcttttcccactgagtttgatggaatattcgtcattatactaaattcttaggagtactagaatgtgtttctggactgctacttggtttcattgatcagtcccagttcttgtgccagttgcacattattgtagtcaccactcatgtttaatgaagttgtataaaccaccttttattaattgataataattctatttgaattacagaggrgatccccctcttggaggaaaggtacaaatgttaaaaagcttatctgtagcctacctaattccgtaaacattgttttgaatctacaacaaaacacataaaattttgtagattcccagtctctgctgtgctcatcagattcttattaattttagaactacagatagtagtttatctctcaatacatacgtgattcaaccatacaacattatgtaaatgtaggatttgtagctcctaagtagtaaattactaagaaaaacactaataccaaacatttaaaagttgtacttagaactttacataaggtaatccattaatgaattatttcaagaatctatggtaaaatatacaaactaaattcatgttttaaaaaacacttcttaagaattacattttaacaggaaagatatgaaaaagaatttcaagctgtgtttatatttwaaattgccaagtcacaactgkkttttttttttttttttttttttttgagacagagtcttgctccatcatccaggctggagggcagtggcgccatctcggctcactgcaacccctgcctcctgggttcaagtgattctcctgtctcagcctcccaaatagctgggattacaggtacctgccaccacccccagctagctttttgtatgttagtagagacggggtttcaccgtgttgcccaggctggtctcaaactcctgagctcaggcagtccacccaccttggcctcccaaagtgctaggattacaggcatgagccaccgtgcctggccacaactggctttttaagcaaatacattaaccatcagatgacatacctaattagtagaccacactttgacattggagggaaagatgagtatgtagtaacttgactgttaagtataaatgtttaagaaaatttcaggattaatattgaaaatagaactgtggtgacattagctatacgcatctaaattgtgcagaatttgaatgtaggaaacaggattatgaaacatgacatctgtagccatgagcaaaagtaacacacacaaaaagccagtccttaaaaggtaatttatagcgttgcactatttgttaacaaataatgaatgagagtgaaagaatacttaatttttgtttttcacatctggttaatttggtactagatctggtcattatgagagcagtattataaggaagcccacaacttcctgataaccctgtaagatcccccagaagtaaatcagtgaggaatggtattaggaataggcttgtaatgtctggatatgattattcattttgtttctctattttataggtgtgccattatctacacaatggggacctcaaggctatttctatccaatccagattgcacagtatggattaagtcattacagcaagaatctaactgagaaacctcctcacatagaggtatatgaaacagcagaagacagagacaaaaacaagcctaatgactggactgtgccaaagggctgctttatggcgaatgtggctgataagtctagattcaccaatgtcaaacagtttattgcaccaggtaagttatgtattatatgtgcctgctaattttatgttgatttatgggaccctgatagtmccttaaaattttaatatggtttaaaaaaacacataagcagaccctttatattacatatataaagtaacaaatggtgtcaccccaatgaaatctctaaaaaagatacagctaaaaagtcaaggttataaaaaggaatatttactatgtaaagagccaagccatagattgaatggtaaggtccaggttactgcacaatgtgtacctgcctccaggggtctatatctgataggaatgaagttcctccatttaatatttcagtacagtatagtttaatttttaaacttttgcagtaaatagaatggttttaaggagacagccatcttttcctttgcctattttttgccaatagcttttaattttttcaggataatagagcattaccaaagaggcctgtttcccatattggattttgttaatgtagtagattatctcaaacttcatgtaaagtcattttcattaataaaataattaacaaaatcaaattaactttatgcaacatttccccttttactaagacagtctcattaattagaatgtaatgcattttcctgcactaatcaatatcaatgagaattaatgagtccattacttaagaagacaatgaaataattttagttagcacctcaggtttaattctctatgggggaatgttgtcaagtacagaacttgttccccctcccaccagtcttgcagttggtaaataaaaagagaggaaaggttataagacctcttctgtattctctccttgttcttcattgatgactgtgtaatttacagaccctgaaagccacaatacaaacctactcattctagatagccttaagtaatgaatttatgagtactgaatgcagtgcaaataatagatgacctttaatttttattctgtcactagaactccttttctcccatggcattctgtgatattctggtacacagagcatctttgcttattgtaaacaacaggtttggctgagtgagaaagtacaactaaatttttaagaatatttagcttgtgatacctaagaggttattgcaacaggaaatgattagactatgcaaaagaacttttgggtgcactcaagaaacttatttttgcactagttaataatggttgtctggattagggtggaatcagcagccctcaccttgatctccttgagtgtttggaaggttttctaggacagtcttttgaactctgtcctatttagagcaacagatttcattgtgcacttttgggtgctttgagtaatacaaaagataggtccccacatcttaaatgagggatccttagcccctcattctgtagccagtagctggagataaaactacttcctaagatggttttaagcatatagaggagagaactctgtctctaacagccactctgcgagtgggacacagctgttctaagttggaactccctgttggtggaagcgtgctagctgggaatggaattctgtgtgtgcatgtacaggttgagtatcccttatctgaaatgcttgggactagaagtgtttcagattttggaatatttacatatacataaatatcctggggatgggactcaagtctaaacacaaaattcttttatatttcatatgctatacacatagcccgagggtaacatattataatatttttaataatatatgcgacccatcatgagggaagatctggaattttccacttgtggcatcatgttagcactcaaaaagttttggattttggagcatttcagatttcggatttttgaactaaggatgctgcctctccagttgcatactataagagtatgagagaaggtgagttggagttacatgggagttattgctcagaacagagcaggagaagggaatcaaagaggtgagactattttattgaagcataggtatgagaaatgaggctttttagaggatatagacctcatgggagataaattcagagaatcaccattaagaggaaattggaacttgtacataaaagcataggctcaagtgaggtgagaccctggaggaccacaagctgaatgctgttggtctttttttttttctttcttggccttcgatttttttttctgaaaggggataaaatcaaatatgagkgaagaggcatataatatgggtctgcagcatatttttgttgttttatttgtcgaataatgttttattcctttttctaattttaaaattgaatgaattgaaactttaggcctgtcctactctattaaattaaattagctttccctttccccaagcactcttttcatttgatttccatgacctcactttctcctatttctgtagccattctttctcaggcttcttgggagcttctcttcttctgcctgattcttctttctcttggtgtttcttaagattttgagtagggcctcttctcatgctgcatagtaaatctgttgattaaacgaatggattgattaacagtttttgttggatgtgaaacattgatttaaaggctttttttcccagctttattgaggtataactggcaaatgtatacaatgtgatgctttgatatacatatatgttgtgaaatgactgccataattaaattagttaacacatccatcacctcatagttacctttctttgtatggtgttggtggtggtgagaacatttaagagatattttagcacatttcaggcatacaatacagtattataagctgtagtcaccatgctgtacatcagacccctagatcttactcatcttatatctgaagtttgtaccctttgatcaacatctccccatttttcccacccccccagcccgacaaccaccattctactgtttctgtgagttcagttgtttggaggtccacatataagtgagatcatacagtatctttctctgacttgtcacacgtagcataattccttcaaggttcgtctatgttgtcacaaacggcaggatttccttctttgttatggctaatattctattctataggtatgtgtgtgtgtatacacacatgtgtgtgcacgtgcacacacacacacacatatttacaccatattttctttatctatactagacacttaggttgctcccatgccttggctattgtgaataatgctgcaaagaacatgggagtgcaggtrtctttttgaggttattgatttcatttccttgggttgtataccaggaagtgggattgctggatcatatggtagttctatttttaattttttgaggaacctccatactgtttcctaatgactatgccaatttacattcccacccaaagtgcgcaagggtttccctttctccatatcctcaccagtacttcttatctcttcccttttttatgatagtcatcccaacaggtgtaaggtgatgatatatcattgtggttttgctttgcatttatttccctcgtgattaatgatgttgagcacctttttatataccttttggccactcgtgtcttctttgaaaaagtgtctattcagatcatttgcttattttttaatcagatttttttttgctatttgtataagttcctgatagattttggatattaacctcttatcagatatatgtttgtacatattctctcctattctataggttgcttttcattttgttgattgtttcccttgctgtgcaaaagctttttagtttgatgtagtcccacttgtttttctgtgccccttttgcttgtacatttgatgtcaaatctaaacaatcattgctaagaccaatgtcaaaagtattcttaaatgttgatcatcctttattgcctaaagtgcatatatatgtgtcacatataccaaaaataaacagttatagtaactactgggaataactggttaggagaggatgggtcatggctttcaaacaataaaaaaaaaacaaaactttctattagatttgaaggaggaatcttcagatagcctagtacctccagtagagctcagaaccttacctggtacattgccaaactggtttccaccatcccatttgctcccattcaggtcctcgtgaatgatgccaggaggttatttaacgtcctctgtatatctataaaatgggaattaaatgatttgtaagattgttgtgaagattataattgttggttggttaatttaaattgaggattgtgacttctgtcacttctcctagatgactcagtaacaccctctgctggtgttaaggtcttaggaaaattaatacattggctttttaaaaggttacatcccttgacatcgttcattactgagttctttggactggtttgtcatatgaagatataaggtgactgattaaaccatgtcatttcattaaattygtgtaaataaaattgtaattctgggaggaaatgggtactcttccagcttccgaaattctgggaggaaatgggtacttttccagcttcctcacacttrgacttctaaagatgggtcattgttatccagtttggccagaatagaygtcatagttaataatcccatctgatgagaatgaaaaaataagcactcaagatagtctgctccactgaatataatttaatcttgagtggttcataagtcagttcagaatcctgcagtgtttcagggatgttgtcctgaacttcagatcccattttactatagatgcagaaaaatgctagttaagagagagagtacatgttgacattttgccagataagatggattttttactgtattagaagtttacttctgcaatcagtttttctattaagttactcagagcattgtttgatgcataagtctatgaggatgttctcattcttgatacaactttcagaattgtctgttccatccaatgaagtaattaagagccttgggacaaatataaccatactgcttgagtccagtgttgcaagagttaaatgatcaactcagcatactgacaccctccaagtatacactatcatcagttcacattcctttttccctttctttttttttttaagagacagagtctcattctgtcacccagaacaagagtggtgtgatcatagcttacttcagccttaaactcctgggctcaagcagtcctcccacgttggcctcccaagtacctaggactacacatgccactgcacttggctattgtattatattttttgtagagttagggtctcgctttcttgcccagactggtctcaagctcctcgcttcaagcagtcctcctgccttggcctccgaaactgctgagtgtgaccagttgtgcctggcccagttcacatttctgatctttgctcctggtgacacactaaagattttttcaaggattctgcaaagcatagatctgcttctatggctgcatctaagagaacctttctattgaatattctcataagaataccatctccaatatcatttgtytttttcacagtctgaacctgagtccgggaaacctggattctagtccctgctctacaactaattagcttttggcattgggcaaaccatttaaccttgcaaagcctacatatcttcrcctctaaaatggagatgtaatataataattcctgccctaccagcttcagaagattaagtatcaagtgagataatacatgtgaatgcgttttggacatttaagctgtgaaaagatcaagataggaagatttccctttaatattttaaaatttgtactacgtatatttttgttcttattcttgctgctgctactgctattttaatatgctcagtttcttggtagatctagatgagcagtattcaaaatgtcatctttctgggaattagccatcattartactataaatattcaagagaaattttctctttaataatttgtcaaataaaacagctttaactttttgacctctgaagccagtggcttcggaataataaccatcatttattactatattccactccattgtctttcttaaaatcctcacaattaccctgcaaagtaatattatctctatttaacatgtgaagaaactgaggctcaaagaggtgcatcttgccagacttctcaaagctagtggttgaacaaaaattcaaatctgaggtttttaaactccaaagcctgagctttaccctgtcactccaccattctctcactttttgttgtacacatgagcccattgcttaatttccagaaattttattagcacttctagcaagtatgtgaaaacaaatctatcattttcaaaatcaaattaataatgtgttgtggagcgagaccaggcaacctgggttcaagtcttgtaccttgggcaagttacttctttgtgtctcagttcctcatccataaagtaatagtaatagcacctacccttgtaattgttcaggggattaaatgaataaataggtgtaaagcccttagarcatagtaagtacatattaaatgttaaatagtttaaaattcatgtataaccattttttctagcctctttcttgcaatattatgtgctgagccaggttttggcttttttttttttttctgtttgcagaatgggtatagtagaatagtcattgattactgatcagctagtactagatttaggaaaggcagttttgatcaacaataccttagccatttgctctcaatcctctgctagaacctagacagggcaaaaggtaagagctttggcctgatgctcacaagccatcgtgaactcaccaattctgtcatttgtttttgtttaatttaataaaaaataaaattacaaatgatctgatactaaaaatatgtaagtgttaattttgtgcrgtcagggttttcaaggatgaattgcaattcaatttcaaatacaaaagtgcttttattctaaccagtctttgttggtatattctcccctacagaaaccagtgaaggtgtatccttgcaactgggaaacacaaaagattttattatttcatttgacctcaagttcttgacaaatggaagtgtgtccgtggttctagagaccacagaaaagaatcagctcttcactatacattatgtctcaaatgctcagctaattgcttttaaagaaagagatatatactatggcattgggcccagaacttcatggagcacagttaccagggacctggtcactgacctcaggaaaggagtgggtctttcaaacacaaaagctgtcaagccaaccaaaataatgcccaagaaggtggttaggttgattgcaaaaggtaagggattcctcgacaacattaccatctctaccacagcccacatggctgcattttttgctgctagtgattggctagtaaggaaccaggatgagaaaggtggctggccaattatggtgacccgtaagttaggggaagggttcaagtctttagagccaggatggtattctgccatggcccaagggcaagccatttctacattagtcagggcctatctgttaacaaaagaccatatattcctcaattcagctttaagggcaacagccccttataagtttctatctgagcagcayggagttaaagctgtgtttatgaataaacatgactggtatgaagaatatccaaccacacctagctcttttgttttaaatggctttatgtattctttaattgggctgtatgacttaaaagaaactgcaggggaaaaactcggaaaagaagcaaggtccttgtatgagcgtggcatggaatctcttaaagccatgctgcccttgtatgacactggctcaggaaccatctatgacctccgtcacttcatgcttggcatcgctcctaacctggctcgctgggactatcataccacccacatcaatcagttgcagctactcagtaccattgatgagtccccartcttcaaagaatttgtcaagaggtggaaaagctaccttaaaggcagcagggcaaagcacaactagagctcacaaccaaaactgcacttcagcctctgctgtacacagaaactacaggctctgtctcaggagagcataggcacattttaaaaggttatgtactaggtttttgtggattctatcaaagtgataagtgatccttaaaaccagccttctaaaataattgcattccatgggttgggtatttagaaatgtaggtggcatttagaacacaatgtttaatcaatgggctgaacaaagatgcttcactttgccttgcccatcaccctatacagtttcgcagatagtctagtcactctatgtgagaaagataatggtaagtagttgctactggccaactgtctagcacttacctgaaaacttagtatggagctcttttaaaatgtgattatttatatttatgttgaaagcggactttaaaaaaaataatgtgctgtaacacagtaaatatgtacttgtagcctggatagcagactgtgttcaactttttaaaaagatgtttcctttctawagattaatttcttgggagcaaatgagtatttgytgcatttgttcaatttgttgtatatggtgaatatttaattatggttttcttgaaacgtgtaaattaaaaacacaatcagtgttcaggcttcagttatataatgtaagcacaactaaaatgaaacttgttgactgcacaagaaattacaaaaatgtttctgttttgaaacttgatctacaatcagtaaaagtttgataatcagtatatcccttcccaacccccattgtgacagtttctttttgtcactgtctagaattttgtattttatttcagactataccttggagttttgtatattttgagagagatatttttgggacattattttggaaacttattacaaatctaaatttggaaaggagctagtagctttaaggccaccaccatattttacttttttaggatttttccccctttaaataaaaatattagatcaaatactatatgcaagaaatcatagcaaagtttttttttcctaccaagatcattcttgatcatcagcttcccaaactagtaagtctgtgcatcattgggtgtttttttttaatttaattttaaattatcccagctattagatagaagggatgttactgcacttatgtgtaatcagatctttatttaggtatacatatcctcctataccgcacataaatagatttcagagcccccatacaatgggcagtgtctgctatagggcttcaggcattaaataaaaccgagggttgttgattttgctgtgacagtacactaaatcaatrctatatcttatacagtttgaaaatatgataccctacactttcaggggaccgagtctgacaaacacaatacatttatctgtgacctatatcaagtacacatttaggagccaggtaggttacctgcttacacactatattttaattgaattcaaactatcaagcactacttagaaactggaaaacatatatatgttagcatcaaagggggcagaagcaaagaagatacagatctgcactgaagacattagactggccatagaaaagtaagcttgaactcccaattgatgtgaccacactcttcttaattttgttcacagtaaaaacacttttttgagttattaggcttacccctagcttttgacctttgcatttcatrtatgttagatgtctcagcaagaatatctggtctcccctaatttttattcccagtgccgatgttcaaaataaactttctccagtctgggaaccttttttacttccccatatttgttattatttagaatggttcatacgtctgctttgtttgcatactggtcttcagattatgagactcgatgataacagtatggtactgcttctgtgacaaatatcgtgccttaacaatgtggctgtccttttccactgaagaaggaaagacgttttgatctagaaatagcgttgtgatttccttgctgttggttttacactgccttccacattgcaacagcaagttgatttcttgtgatcccagaattttctaagaggatgagttgaatctatagcagcattgtcagtacagaccagtggttctcaaactttaaaatgcctcagcatcacttgggagcttattgaaatgcagatcccagagtcagtaaatctgcctgtgaagtatgatagtctgcatttgtaatgagcattcaagtgattctgatgcaggtgagctgggggcatacagggaggaacactgccctggactatccattgcatttttgcctctaaacaactacagaattttctagggttttaaattatgtaaaatgtttacttattctgagcttagagagaatggggagggtatttttaaattttattgttttatttctttaagtttttctttgctttaagattataggtattaggtttgtttttgtttttccacttatcttgagttcactttgatgttaaatctattgctacttcagttgtaaaaccagccaaaagtttctggatgaaggtcaagtttgaccttttaggagttattgtacataaaggcttcatccacgaaccatccagcgcacagaagcaagtgcaaaaatgacacaagcacaactctccagacgtggctccttctcctttctcagtgcagactctcactgaaagctgctattttcatcctccttgtggttgcttttcttgtttctcttccattgtacatgtgggttatataccatatgttaaatatgcaataaagtgtttacaggatgyccttctgaagggtagtcctttgtaaagctgtacagactttgcagtttaagcacaatgtgcacatgttagttttatatacagcaaaacttgattttttgcagatggaaaggtattttgtttctatacaaagtaaatggattgtttgtgcttaatgtaaagccgctttataaaactgtaaaataaagtttttttcttaaaaagaatatacctggatatttctctttcttctcaaattattctaaggttatttgagcccagcaagcagatttctgaccatttcctgttcaacccgtgaccagaagtcaggcaacaaatgttgttcatcaaaggcataccaagccctgtcagacaatgtgtgggaacaaagagtatgcatgggctttaatcctaaggacccttagtcttcaagggggagcacaatgtatactaaaaactcgaagaaaaataaaatgctaaattgtgtactcagggaaggtgttagggaagagacagagcctaagctggtgttccaggggtggagtccaggtggaagaagaggagggagtaacctgagcaaaaacaggtgtccatgccaggtgagaggatggcctttcccatgctcattcagactgggtaaccattttttatttagatttatttgagagtttgtccctcatatattttctctacttgcctcttcagaacaattagcattatttaatgtttacccccttctcaaagaataatgatttaacctcccaaacagacaaaaccagagaccagagtcttgcttcatgttatgtttcattgcacagtattttttggattataaacattctgcaccatttgtgtaatggaattacaattgatcacgaatcaactttttccagctgatgggtgcacagattttgacaggctactaatcaacattcttgggagcttttccttccccaccgtcttcagttgggaaatggccataaggttgcaagaagtcttgggctgaatgagctctccagctgctcttgctttgattttgctgcttgtagccaaactgttaatacgttggctgttctgccttagcacactgagcatctcatattcatctccccattgcccttgagtggggtgggccctccatactccagagaacttacttggcagtctgatgagtgctccttcccttcatagccacaggctctggcggccactgtatgccatgtgaccctgccttctctggccatgacttagacgaggggcgaatccccctcactcaagctggccgaccaatcagtcttttccccaggaattcaaaatgggatggattaaaaaactaaagcagaaatacagtgaaaagcggagatgagaaacagaagacaatgctccaggccctggatccaatgcccttctgaggccagctgtattcctctcaggttccgcgaggtaccactgtatccttaggataaattcttttttttttttttttttttttttttttttttttgagacggagtctcgctctgtcgcccaggccggactgcggactgcagtggcgcaatctcggctcactgcaagctccacttcccgggttcacgccattctcctgcctcagcctcccgagtagctgggactacaggcgcccgccaccgcgcccggctaattttttttgtatttttagtagagacggggtttcaccgttttagccgggatggtctcgatctcctgacctcgtgatccgcccgcctcggcctcccaaagtgctgggattacaggcgtgagccaccgcgcccggctggataaattcttaacatttgctgaagttggctggatttagtttctgttacttgcaacaaatgagccctaattaataatgtatctccattatagaggaaaatacgtgtaaatacagtgtaaattctgcattttcctccaatctggaccctgttgtattagcttgctagagctgctctaacgaataccacagaccgggtggcttacacaagaaatttattattctcacaattctggaggcttgaagtccaagattaagatgttggtaggtttggtttcttccaagacctctcaccatgtcttgcagatggtgccttcttgctgtatcctcaaggctgtctctccaactgtgctctctgtgtctagggcccactcatgtgacctcattttaccttaattacctctttgaaggcctgtctctaaatgcagtcacgttctgagatgccggggagttaggacttaacgtgtgagtggtgaggggcacacaattcagccagtagcaaccactcaaagggttgccatttaattcgatgataatcattgaaggacaaaactgaaatctgtagggaacattagttgggcagaaatctagacttggtactcagaatacagggctccctggctcagccattagagcatcaagaatttactcaggccaggtccggtgtctcacgcctgtaatcccagcactttgggaggccgaagtgggcagatcacctgaggtcaggagttcaagaccagcctgggcaacacggcgaaaccccgtctctacgaaaaatacaaaacttagccaggcatggtggtgcgcacctataatcccagctactcaggagggtgagccaggagaatcacttgaaccctgcagggagaggttgcagtgagctgagatcatgccactgcactccagcctgggtgacagagtgagactccgtctcaataaaagaagaatttactctttcaccccatagacttcagttgcctcatggtacaatccaataaatagagaactctgctctcaaagtttgtaataaactaacaaaaggtaaccactaaatttaagcagtggtaaaaacaacaacaacttctaggtttttattcttcttacctgtatgcctttttcattagctcattcggaatgcagaactctggggtactgggagcgggttggtgggaagtatagacagagtatataaaagtgcaagtagtggtgagattttgtttaatgataattttttaatcccaagtctgcactatcgtaacttacaaataacaatatagggataaagtattgattttcattataccagctcattaaggatgtcaaactgaaaatggatgtgaatgtaaatgttgtattggtgatgaatttgaatgtttgctgctcaatttctggtgaaaagagatacatttaccatctggtaagaatgattgataacttgcatgcgtatgctgcatttcctgaatgttaagtagcagcaacactgtgtaattttgctaatccttttctaggaggatttcacaaaatgacaggactgcaaagcaagccatcaaagagcagtagcaaagagaacagcaaaaggggcggaaaaaaagtcctgtgaaggaccagaaatagagcagtggacaactggtattaaatacacagtttagataagatgttcttaagcaacgcaaagctcattgcatctaagcttaacgtcagaagagctggtgtctccctgggagtttgctctgttctgtcagcacctagtgaaatcactgagataagaatggctgctccatttcagttcagaaaatctagtaaagagagttcatctctctggggactacagaaggaagtaaatctctgaagtggggtgaggaagaggtcttgtttttaagcaaacatatagcaaagatgcatgatcttaatttaatgcctgttattctgtcatctttcctttttaacaccaatgaagttaagtttctgcaattcagttgaatacagtgggaggccccaaacagattcctatcaatggcgtggcaaggtagtcttagggaaagtgtctgtctatcttctcagctactgcaggcaacagaaagaggcactctcttcatctgaaaatatccatcagaagaaattacctaggcaacttcttgtgagcttgaattagtaggtttcagtgtctggggtactggaaaccatggtcctgggttagtgtttcttgctaatgagcatttaggaataggaagaggaaacaggcaccattacaggtgctcctcaaactaactctcattaactgctcaccatgactctggaagcccgactcctggtaggtgagaaaaagaaacactgctgcctagtgttccattatcggaatgctaagcatgtgggagttatttacatcctactgctcaaggtcatcgccaaggtctgatttttcattcgtgcaaaaattcaaaaaattgtaacccctggcataaatgggttaaggagcttgctgaagttcgtgcagttcttttcactacgtatttattgaacaccttcctactgattgtgctacctgccaaaagcaaagatgagacctgtccctgtcatgagtcataactagttaacataaataactgagtccacagctgactggcctggagtgctcttccctggggtaagctttggatggcctttcctttccaaaatcacaggcagagcagtggggccaacacgaagagccagagtgtctaagctcccacagtgggtcgggctcttgctagaagactccacgggtgttctttctaatccttttgacaaccttgggaggaagtctgtgaacttcacggatgaaaaaacaaacttggagaagttaacaacttgccagaaaccatttagctatttgataaacaaggtctcaagcccaggtatgtctgactccaaattccatgttctgacccatcgtccccaggcaataactataatccactatctcctgactccaccgtctacacagtgggctcaaccagggaggcagatctcagccccagagctctcctacattcgccaggtaagataattagtccatttcatctgtggactctatatcagatctgctgaaattggtatttgctccactaaatggttagaaaagcccaaaagcagagacaggaagttttttcagcaattgagtctcttagcatgtgcctccatttcttcaacttccattgatgttattttttgaataacccaacataaaaacccctctagcctctctccagccctctcctgctatttgctstcttccctagtggactttcaaaaagctgcctctattacaaattaaaatgtacacagcgtgtgtttaatacgtgcaaatacgcgcacacacacacacacaagtgaatacacagatgcacagcaaacagcctgcactgtgctggctgcaagggatgcagtgatgagtgagatgaagtctctgccttctgtgagtccatgaagtgacagctttgggaggtacacaattttattctttgctgtgaaaaatgaaaccgtttaaaatttttcaaattccaaattagagtttgaattaatgagattctaaagaaccttcctacgttatactttttagctcatttcatgaaaataatgacatattttatcctcagaatggccctaagagactggccgagtgggcacctcctctcagtggcggagcagcggtgtgtgtgtgaggactgtgtggggtcaacgtcctggtgacggagctggagtaaaaccctggtctgtagactcgcagttggattctcttcatcttggtgccttcacatctatgggaatctggaaaagagcttcccggtgtgcacttaggcagggccatgtcttgtctcctttggccctaggcttggcatgaaaggagaggggaaatggggccattctcttgtgtttctgtttctcctcggctgtcagcacttctctgtctcattatgtctgagctctcaccaacaggaacccacccaaaggcctgtctacatgttgcctggttgtcttatttaaagctgtattttaatttttaaaaatacattttttgtggggtgtgatggctaatgcctgtaatcccagcactttgggaggccgaggtgggtggatcacttgaggtcaggggttcgagaacagcctggccaacatggcaaaaccccatctctactaaaaatagaaaaattagccaggtatggtgacgcagcctgtaatcccagctgctcgggaggctgaggcaggagaattgcttgaacttgggaggcggggcccctgcactccagcctgggtgacggagtgagactgtgtctcaaaaaaaaaaaaaaaaaaaagtatagaaaatcagatttgacaatagaaccagcacacagatgcttcccaagtagctgggactacaggcatgtgccatcatgcccagctaatttttgtatttttagtagag
